United States Patent Application Publication US 2016/0230186 A1 - sequence listing, part 2

SEQ ID NO: 1038 - DNA, 2203 bp, Diabrotica virgifera
  SmartBlast Evalue=3E-31; Info=Reverse transcriptase (Fragment) n=1 Tax=Aedes aegypti RepID=Q4F8Q4_AEDAE
cgtatgttgtataatccgtgtataatattaatatacacggagtatacgacatacgacagaagctcgaaacaaatgactattaatgaaaagccctgtagggatcaatattcataactctgatcatactactcatccatcagccgacaaagctacgtgcgatcgctggcggttcagcagtacgtttgaattttattcactgcacactcgagctgacccgcggagtgcactgagaacacgatagtttctgctacgccgccacgtgcacgcggcttgaaaacaagtcaggagggttggcagtctgtgctgggaaatcattcagtacacgctgaccgcccgatcgattacaacgtagatacagatctgtgtgaccacccaataagatctgtagtttctttttatatagctctgtcatataaactttcaaaaaaactgtcagatattattacagaatacactaaatttttcacctaaattcaccgtaaaaaatatactagaattagttaataaaatacaacattttcaattgcgcaacaactccagactaatttcattcgacgtaaaaaatctttttcctagtgtttctcctatagaaacttttgttctagttaaaaatcttttagaccataatacaaatccgatcattgcatttgaaattttacacctacttcacaaacaacagtgcaggacttattatgggtaatcctctaagcccattgctatcagatatatttatgaaccaacttgaaacaacaatttctaaacatcccgtatttaaacagttcttatattggtggagatacgtggatgatatactagtatgctttacaggaactaacagacaacttgaccaatttctatcataattaattcacttcatagtaatattgagtttacaatagaaacagaacagaataagtccataaactttctagatgtaacgattaccagactacacaacaaacatgagttctccgtatatcataaacctacccatactgacacaactatacacaattcatcatcccatcctacacaacacaaattagcagcctaccatagcatgatacatagactgacagaaattcccatgtcaaaaaataacttcgagatagaactaatatcattaaacaaatagcagtaaacaatggctataacgaacaaacaattaacaacattttaaaccaaaaactccataagaaagccctgaaattagtctatccaccaccacagaaagaacccagtaccttctgctctatcacatatactggcaagataacaacaaaaatagccagatacataaaaaagaaaggaataacaccagctttcagaactaacaacaacttaagcaaatatattaagaacaataagagccgaaagagaaaacaactacagagtggtgtttacaaactaacttgtggtgactgtccgaaaacttacatcggtcaaactggcagaacctttgacaaacggatagcagaacacaaaagggctttcaacaatagaaaaacagacacttctacatacgcacttcaccttctagatcataatcattctttcaatgaagagtttcaaattctgcatatccaaaataaaggccttaagctatctttattagaatctatggaaattaataaattgaaaaatacagatataattctgaatggccaactcgagacaaacagctccccactcctcaacttcttcagttaaagactttaaaaagacaaacccatagtaatctaaatcacttgaggaaggcactctgccgaaacagctgtagtcacatagttgtaataaattttgtggaagtatagaaaacaaacgttttcagtgttttattgttagatttacattatcttctataaatttaaaacaatataatttagatgactatgactcttacgataacaactttgacgcttcttatgtgttgcttcatctaccagtagatcttgttatgataatataatgtattattaggatataaatgattgaatattattcaaatcaaatgagtttatttatctaaattttaacttcttaattatattaagggtttcttaaggacttaagccaaaaatatacagtgtgttccagttctcatcagaaagttcattaaatttgcaggaaacggaagatctgacaacaatgtaaatacaatgtaaatattgggtgttgcatatataaaactcacactgtatag

SEQ ID NO: 1039 - DNA, 2441 bp, Diabrotica virgifera
  SmartBlast Evalue=0; Info="Atypical protein kinase C, isoform F n=1 Tax=Drosophila melanogaster RepID=Q0E971_DROME"
tgtatgtgcgcgtagttcatactgtcgtttttataaaaattcaccctcaacaattttcccaagcgcgcctaacgaagtagcacttcaaaaaaaaaaaattgggaagttaatttttttcactgacattacgtaccattcatctagaaaacggcattcttggcaaaaaaccgaacttctctatacaatacaataaaaactgcagcagactaagactagacggcagacatgacaattcggcaatatggagggtacaagtacgggttagcccaatactgaactcggatagataatacattctatatttgagcaccctaataaactaaagaagaaataataaacgattaagtactaaataaatacataaatacttttcgatttgaaatagacactaaagcactagttgagaggaaggcaaaagatattttgaagtaaagatttggcgggctgcggtctcacgtccacctgcaggtagtgtcccccgttgccgatgtccacggcggagtcccccaggtccggaggcggcggtggcgggaacaacggaggaggataacggtgcgccgccgccggtggtggcggtggaggcaggttggagggatgcaatgcacagaggacgttatgtcacacgcaatcttctaacgacatgagtagcgggttcacgtactcgaacccttcgaattctgattgatcgatcttctcgattactcgtggatcatctggtgtaaggtgtacaggttcatcggtaaattctggtgggaaattggctaaatctctttctgagtccaatcgtggtttatagggagggggtacttgcttctgttccaacatatcccagtcaatacttttgaaaaactgatgacccgtaatctcaatgaaagcttcagggctgtgacatcctagcctgtcagccgggtttttgttcaagaatcctttcagaacgttcgcagctttcacgctaagcgatcgaggtatacgaatagttttctcgagaatcacttggaatagatagtcttcagtgttttggtctggattttcagacgctcccgctatatcgaatggcgagcggccggccaacatctcgtacaacaagacacctaaagcccaccaatcaacggaaaatccatagtcttcgccccttaaaatttcgggagctatgtaattgggcgtaccgcagaacgtggatgtagtatcgcctggcctaataccttctttacacataccataatcagtcaacttgatatgaccctcgtgatccaatagtacgttatctagtttcagatccctatagatgattcccttgcagtggaggaagtttaaggcgagggagatttccgcagcatagaatctcgcatgttcttcgggcaacctcctctgcctctgcatatgaaacatcaaatcaccacccctaacgaactcaataacgaagaacaatctcgaaggcgtttgaaagcacgaatgcaatccgaccagaaacggatgattggaagcagtttcgaaaacgtgtttctcggtttgcacccaatcgatatcctcgtcgtcggtaacaagagccttcttaatcaccttcatggcgtatatgcgttttgtctttttcaattctaccatcaggactttggcgtaggagccgcggccgattacgcggatcagttcgaaatcgttcagggaatattggcgttgagagccgggttctaaatcgtcgacaggcttgttggggtcttctacgggaacagattcgccagtgacatctggcggaggttccggaaaatctttttctcgtatctcccacttggactcggttatcggcgtattattcgcttgcgcttccccattgtggtcttctcgaattactggttcttgatgctcactcgtgcaaggtttatttacagccttgtggcatttcttatgaacgagaagtttacactggatacacttgaaaccttgtctgcctaatccccagattctatcgttacaatacgcgcaaaatgctctcctattgaatcttttagcttggaatatgtgtccattaaccctataaagcttcctccaccgacgtgctcctcttctataaatacttctgtcctcgccctggcagggcattcctggctgcgacggcacattggggaaaacaccagtggtgtttccgataagggaagagggttcgtacgtgtatatgggatgatatgcccacaaaacggtagcttctgcgaaatcagcgaaaagtttcctcaaccaagttctatctaccatcttctgtgcatcacatggcacaacaataacaaaaaaagcactaaaaaacactgcacttacaactaattgattcacgattacacttccaacaatacattaagttataagcgacggaaaattaattgttaattagacaccaacaaattaaaaagttttttccgttttaggtgaactgatttatctcgattctgaacgtg

SEQ ID NO: 1040 - DNA, 2276 bp, Diabrotica virgifera
  SmartBlast Evalue=0; Info="Atypical protein kinase C, isoform F n=1 Tax=Drosophila melanogaster RepID=Q0E971_DROME"
tgtatgtgcgcgtagttcatactgtcgtttttataaaaattcaccctcaacaattttcccaagcgcgcctaacgaagtagcacttcaaaaaaaaaaaattgggaagttaatttttttcactgacattacgtaccattcatctagaaaacggcattcttggcaaaaaaccgaacttctctatacaatacaataaaaactgcagcagactaagactagacggcagacatgacaattcggcaatatggagggtacaagtacgggttagcccaatactgaactcggatagataatacattctatatttgagcaccctaataaactaaagaagaaataataaacgattaagtactaaataaatacataaatacttttcgatttgaaatagacactaaagcactagttgagaggaaggcaaaagatattttgaagtaaagatttggcgggctgcggtctcacgtccacctgcaggtagtgtcccccgttgccgatgtccacggcggagtcccccaggtccggaggcggcggtggcgggaacaacggaggaggataacggtgcgccgccgccggtggtggcggtggaggcaggttggagggatgcaatgcacagaggacgttatgtcacacgcaatcttctaacgacatgagtagcgggttcacgtactcgaacccttcgaattctgattgatcgatcttctcgattactcgtggatcatctggtgtaaggtgtacaggttcatcggtaaattctggtgggaaattggctaaatctctttctgagtccaatcgtggtttatagggagggggtacttgcttctgttccaacatatcccagtcaatacttttgaaaaactgatgacccgtaatctcaatgaaagcttcagggctgtgacatcctagcctgtcagccgggtttttgttcaagaatcctttcagaacgttcgcagctttcacgctaagcgatcgaggtatacgaatagttttctcgagaatcacttggaatagatagtcttcagtgttttggtctggattttcagacgctcccgctatatcgaatggcgagcggccggccaacatctcgtacaacaagacacctaaagcccaccaatcaacggaaaatccatagtcttcgccccttaaaatttcgggagctatgtaattgggcgtaccgcagaacgtggatgtagtatcgcctggcctaataccttctttacacataccataatcagtcaacttgatatgaccctcgtgatccaatagtacgttatctagtttcagatccctatagatgattcccttgcagtggaggaagtttaaggcgagggagatttccgcagcatagaatctcgcatgttcttcgggcaacctcctctgcctctgcatatgaaacatcaaatcaccacccctaacgaactcaataacgaagaacaatctcgaaggcgtttgaaagcacgaatgcaatccgaccagaaacggatgattggaagcagtttcgaaaacgtgtttctcggtttgcacccaatcgatatcctcgtcgtcggtaacaagagccttcttaatcaccttcatggcgtatatgcgttttgtctttttcaattctaccatcaggactttggcgtaggagccgcggccgattacgcggatcagttcgaaatcgttcagggaatattggcgttgagagccgggttctaaatcgtcgacaggcttgttggggtcttctacgggaacagattcgccagtgacatctggcggaggttccggaaaatctttttctcgtatctcccacttggactcggttatcggcgtattattcgcttgcgcttccccattgtggtcttctcgaattactggttcttgatgctcactcgtgcaaggtttatttacagccttgtggcatttcttatgaacgagaagtttacactggatacacttgaaaccttgtctgcctaatccccagattctatcgttacaatacgcgcaaaatgctctcctattgaatcttttagcttggaatatgtgtccattaaccctataaagcttcctccaccgacgtgctcctcttctataaatacttctgtcctcgccctggcagggcattcctggctgcgacggcacattggggaaaactgtggacaaaacaatataaattaggccatttttttcactggacagactatctctgataacttttaacattttttagaccaacatgcaccgaatacacgttccttttatttatttgtgttggaaaatgttattgtgttgtgctgcaagttcga

SEQ ID NO: 1041 - DNA, 1658 bp, Diabrotica virgifera
  SmartBlast Evalue=2E-28; Info=Reverse transcriptase (Fragment) n=1 Tax=Aedes aegypti RepID=Q4F8Q4_AEDAE
ctatgttgttactacagctgtttcggcggggtgcctttctcaagtgatatattttgcagtgtgtttgccttttttaagtctttgactgaagaggttgaggagtggggagctgtttgtctcgagttggtcgttcagaattatatctgtatttttcaatttattaagcccattattatcagatatatttatgaaccaacttgaaacaacaatttctaaacaccccgtatttaaacagttcttatattggtggagatacgtggatgaatactagtatgctttacaggaactaacagacaacttgaccaatttctatcataattaattcacttcatagtaatattgagtttacaatagaaacagaacagaataattccataaactttctagatgtaacgattaccagactacacaacaaacatgagttctccgtatatcataaacctacccatactgacacaactatacacaattcatcatcccatcctacacaacacaaattagcagcctaccatagcatgatacatagactgacagaaattcccatgtcaaaaaataacttcgagatagaactaatatcattaaacaaatagcagtaaacaatggctataacgaacaaacaattaacaacattttaaaccaaaaactccataagaaagccctgaaattagtctatccaccaccacagaaagaacccagtaccttctgctctatcacatatactggcaagataacaacaaaaatagccagatacataaaaaagaaaggaataacaccagctttcagaactaacaacaacttaagcaaatatattaagaacaataagagccgaaagagaaaacaactacagagtggtgtttacaaactaacttgtggtgactgtccgaaaacttacatcggtcaaactggcagaacctttgacaaacggatagcagaacacaaaagggctttcaacaatagaaaaacagacacttctacatacgcacttcaccttctagatcataatcattctttcaatgaagagtttcaaattctgcatatccaaaataaaggccttaagctatctttattagaatctatggaaattaataaattgaaaaatacagatataattctgaatggccaactcgagacaaacagctccccactcctcaacttcttcagttaaagactttaaaaagacaaacccatagtaatctaaatcacttgaggaaggcactctgccgaaacagctgtagtcacatagttgtaataaattttgtggaagtatagaaaacaaacgttttcagtgttttattgttagatttacattatcttctataaatttaaaacaatataatttagatgactatgactcttacgataacaactttgacgcttcttatgtgttgcttcatctaccagtagatcttgttatgataatataatgtattattaggatataaatgattgaatattattcaaatcaaatgagtttatttatctaaattttaacttcttaattatattaagggtttcttaaggacttaagccaaaaatatacagtgtgttccagttctcatcagaaagttcattaaatttgcaggaaacggaagatctgacaacaatgtaaatacaatgtaaatattgggtgttgcatatataaaactcacactgtatag

SEQ ID NO: 1042 - DNA, 6681 bp, Diabrotica virgifera
  SmartBlast Evalue=7E-31; Info=Reverse transcriptase n=1 Tax= Schistosoma japonicum RepID=C7C210_SCHJA
cgtatgttgtataatccgtgtataatattaatatacacggagtatacgacatacgacagaagctcgaaacaaatgactattaatgaaaagccctgtagggatcaatattcataactctgatcatactactcatccatcagccgacaaagctacgtgcgatcgctggcggttcagcagtacgtttgaattttattcactgcacactcgagctgacccgcggagtgcactgagaacacgatagtttctgctacgccgccacgtgcacgcggcttgaaaacaagtcaggagggttggcagtctgtgctgggaaatcattcagtacacgctgaccgcccgatcgattacaacgtagatacagatctgtgtgaccacccaataagatctgtagtttctttttatatagctctgtcatataaactttcaaaaaaactgtcagatattattacagaatacactaaatttttcacctaaattcaccgtaaaaaatatactagaattagttaataaaatacaacattttcaattgcgcaacaactccagactaatttcattcgacgtaaaaaatctttttcctagtgtttctcctatagaaacttttgttctagttaaaaatcttttagaccataatacaaatccgatcattgcatttgaaattttacaccttgaaatttgcataaatcaagactattttgaattcaataatcaaatatacacaaacaacagtgcaggacttattatgggtaatcctctaagcccattgctatcagatatatttatgaaccaacttgaaacaacaatttctaaacatcccgtatttaaacagttcttatattggtggagatacgtggatgatatactagtatgctttacaggaactaacagacaacttgaccaatttctatcataattaattcacttcatagtaatattgagtttacaatagaaacagaacagaataagtccataaactttctagatgtaacgattaccagactacacaacaaacatgagttctccgtatatcataaacctacccatactgacacaactatacacaattcatcatcccatcctacacaacacaaattagcagcctaccatagcatgatacatagactgacagaaattcccatgtcaaaaaataacttcgagatagaactaatatcattaaacaaatagcagtaaacaatggctataacgaacaaacaattaacaacattttaaaccaaaaactccataagaaagccctgaaattagtctatccaccaccacagaaagaacccagtaccttctgctctatcacatatactggcaagataacaacaaaaatagccagatacataaaaaagaaaggaataacaccagctttcagaactaacaacaacttaagcaaatatattaagaacaataagagccgaaagagaaaacaactacagagtggtgtttacaaactaacttgtggtgactgtccgaaaacttacatcggtcaaactggcagaacctttgacaaacggatagcagaacacaaaagggctttcaacaatagaaaaacagacacttctacatacgcacttcaccttctagatcataatcattctttcaatgaagagtttcaaattctgcatatccaaaataaaggccttaagctatctttattagaatctatggaaattaataaattgaaaaatacagatataattctgaatggccaactcgagacaaacagctccccactcctcaacttcttcagttaaagactttaaaaagacaaacccatagtaatctaaatcacttgaggaaggcactctgccgaaacagctgtagtcacatagttgtaataaattttgtggaagtgtggaaaacagacgttttcagtgttttattgttagataaaatgaacttccatcaagtaactgtcgaatccatcaataatagtagaattccatggcagtcttgatttactcaatcaccaaataaaaaatatgcccctcattttataaaatttaactccgtgcctttatatgccagtgcgtctgtttagaaattagtctaatgtttcatctttcatattataatgataagttcatatactaataattaaaccattaaattatataaaattagggctcgaaaaactaaactaactcaaccaactgaaagtttaaacgtaaactgaaagttcggcttttgttaacatttacataatactcacatatacagattcggaaaaatttcgatgagatatttcggctacctaatagcgctatatcgttttaagtaggtgtttctgacttagtagcatgtaaagtcaataccttctttaaattcttaccgatgctgtatttctgcattgttgcgctctatacttcttattctttgtattcatttaactctccacctcagaagtccataactgtattagaaaaatatctgccttgttagtcacaataaggatacctaatataaaaaagttgtctttttgctttaaaatcgtgtgtcagatctaacgtatctaaatatttgattgttaaatgatctacaccaataaaaaaatatgtaattttcttgtattatattaattaatattaactgtatatgtatataatatatttcatgaagcttaattcgatttaattacatattttatttattaagtaaaagtatgtatatttcattaatcccactgtaaattttgctaacaaggctaaattttgcatgggtgttagatattgtaaatatcaaataacaattatattttgcaatgtctgttgacacataattctattgttgtaaataaagtatatttggattatttatcaatttaggtgcatatatttgtaattgatttgtgagcatttatttttaattacaaaggatttattattaataacccaaatcacgcatatttatgtaaattattgttaagacaacacagaacataccgtttaatacaaaacgtaaaaatttatgtgatttagcactctggtgtaattttggttccaacatagtcgggtgcaatcatcggagaagccactcttgattagcttttactattttttgtgataacggcagcagatttttttttataaaaagaactagtcaaacatatttcattcatttttgacagatcataaaaattattaatttaacatttagaaggtaatttcaatagcaacgtgtttcatccattagatgatatgtgaccttctgcactgttacaaataacacacatgaaaacagtatatgagagatagataatttttgagtatatagttggatagtctccttatactagtcaaaaaagtgcctgtttcagatcttggtttctttgtaccatctgggacccatctttttttaactgtgttatgaagtgttgtgatttttctttgaagttgaagttttatttaagctgtccactcacagtacacagtactgcgttatcgttcgacaagatcgtcgatgatatcaatttttgcaatactgcagtagacaggccagtctaattggcaggtctgcggtcaaattgtacgatttcgttggatgcacggtcacacacgatcaaaatgtttaccaattagtcgaattcgacaaagtggccaactttatagttaatcaagcacaagttcgggagagacttgttttaaaaacagtctgctgaaaataggtttttttgttaaatatattaatactcaatatggaaaattataatgataaataaattgccttttattttttaagcattttatactattcgtccaaaggtaataattaatagaataagaaaacagattttatagtttattgttaaaacaacgaattgaaaaatagaagaatcggaattccacatttaaaatatggaactaattccatgtgtcggctcgatgtagaagtagattgatgaactaaatctagtggacgctggattcgaaccacaagtcagctagataattttcaaaacatattaggtatatataaaatccaaagttataggctttcaaatgagtagtacggtgagagatacggtttcacggctcgatgaaactcgtataagtaattcctgcggatgcaaaaaattaccaatataaaataccaaccgaacatccctgaaagaagataattagaaataaataaaatcctcatataaagcaaaatatacataatgtgagatataaactgttatatgagtgatgtgaaattaacaagaaacatagagctgaatgaaaggacacacgcaggagaaaatagctagataaaagtcgaaattatgtgatacaataataggagaaacattgcctttaaaaatactaagtattaataacttttataaactttttctggcactattaataacacttagccattgtaactcgttttggaagacattttcgatgtgccaataattaacaatttgtcaaataatgtgcctctcatgtccataaactgtgataactaaaaatatatattttacttaatagtatttattgtaatgataattaacatgttctgtgttgtttaaacattaatcttctcttctaaatactatcaaataatatgtatagattatgattctcttgatttattggacttttattgcgcgagtaagtagtattgaaagatgagcaaatttcttaaatattacatagtagaaatccgatcacccaaatctgaagtgattgctgttcaatataaagtaatacttatttcaaagtacttaatcaaaatatccaaattaaattactttcaatttccaaaatacctctgaccactagactatatttttgttaattagtatatttcggcaagtaataccgaaatatattagaaacaattagatattgtttgtgtagtaagcaagtctctcaatgagcttacttctttttcccttttgtggacgtccgtgaaatttgggcctcctttttaattgcgtacaattatgggcttcaacgtaattattaataccatcaacaattcttcctaatgattgatgagataatacggcgttcccggccactgttaatcaaacagtacgaatctatagaatttcagctgcttcaacagccgactgcgcttgagcttgtcacgtgatgaaaatgtatataacacacaccttaatggcgcttggcacacttctttgactacaacccccaccacactcacgagtagtagtgattacgcagataaaaactgaacttgggttgctttgaaaaggtttttattattttatctttagttttgtccatgatggcaggtgtaatttttcccgtcaattcatcaaagctcttcaaatatattcttatgtaattgacaaacatgtatgcaaatctttgtttaaaaatactcgggaaatccgggatctttaatacactgacaaggatctggacgtattgccttttaagaatcttgaaagcacggattctccagtcgccattaatcgaatttctcccaatctctattggctttgttcatttgtaccttcagtagttcttctaacttacgtcctcggttatattggtgtttagaaatacaagttttttctattataatctttatagccaccatagggcgattaccataatcttgcaaattacacttaaattatcagtagtaattgcacaagagctctaaaattattgaatttttcccgagtgtcactttggcagttttaattgcacgagccgaaggcgagtaaaattatgtcaaagtgtcacgagggcaaaaattctatattaattttagagttcgagtgcaatttgttgcgattatttcatgaataaaactgttcaaaaccaaaatttcattgtaatttatatatgtaagtaccaattagtgaaattaaacacacagttgttataaatatgtatttgacggttgaaagtcatcacttttataatttttaaaacagttgtcattaatgtcactgaatgtattttttcgtagcaacgaagggcatctgacgtaatatgcttaacgacgggagattatcaaaaattatcaccttaatttgcatgtctgtagctttctattggtcagaatctcctatgaatgaaataatcacaataatatttcttagtctcgatctagtcacgattaccttagtgtttaggattattttattttggttaatattgaataattacaaagatagttatataacaaatgtcccattatcggtagggtttgttgtataagtaactatttgaattgtgtattatttaatatataacactgtattcgggcaagatttcagatgtatcaaaacatgattttagttaaatgttgatgatgtgagcacatattatttatgtagggaaggtaataagtctactatactactcacaagtttattcgattttatttgtttaaagtgtgaagtggaggttgggcgatcggtttcgatgtttaaatatgcatcgtcatcgggcccttaagaagctaagatgtcagtacatggagttagcaaattagccctttccctctagacattttttatattaaagaatttttgtgataccaaattgtgtgtacaatcttttagttgtctcgttggtctcaccaacaaaaattctttaatataaaaaatgtctagagggtggggcctggtttgctaattctatgtactggtgtcttagcttcttgggggcctgatgatgatgtatattttaagcatcgagaccggtcgcc

SEQ ID NO: 1043 - DNA, 1606 bp, Diabrotica virgifera
  SmartBlast Evalue=9E-26; Info=Endonuclease-reverse transcriptase n=1 Tax=Schistosoma mansoni RepID=Q4QQE8_SCHMA
cttctctccatcccaggccaattctttcatgatctcttgttacagtttttctccatctattatcgggtcttcgtcttcttcttcttccgtctggttggtattcgagtgcttgtctggctatattatttcggtccttccctagagtatgtcgaatccatctccatttccttcttttaatcgtgactgttattttctcttgttttgttcttcatagatctatgtttgttattttatttggccagtatattttcactatttttctcaacgatttatttataaaggtttgtaatttttttgtagttgtctcttcctgtctccaagattctgcgccatacaataatatactcttaatacagctgttaaatattttgattttggttaattttaatatatcgcgtgtgttccagattttctttaatgagttatatgcatgttgtgcctttactattctttttcctacatctgatctactattttagtagatctcgaagttattttttgacagaacagatataactgaacatcattaaacaaatagcagtaaacaatggctataacgaacaaacaattaacaacattttaaaccaaaaactccataagaaagccctgaaattagtctatccaccaccacagaaagaacccagtaccttctgctctatcacatatactggcaagataacaacaaaaatagccagatacataaaaaagaaaggaataacaccagctttcagaactaacaacaacttaagcaaatatattaagaacaataagagccgaaagagaaaacaactacagagtggtgtttacaaactaacttgtggtgactgtccgaaaacttacatcggtcaaactggcagaacctttgacaaacggatagcagaacacaaaagggctttcaacaatagaaaaacagacacttctacatacgcacttcaccttctagatcataatcattctttcaatgaagagtttcaaattctgcatatccaaaataaaggccttaagctatctttattagaatctatggaaattaataaattgaaaaatacagatataattctgaatggccaactcgagacaaacagctccccactcctcaacttcttcagttaaagactttaaaaagacaaacccatagtaatctaaatcacttgaggaaggcactctgccgaaacagctgtagtcacatagttgtaataaattttgtggaagtatagaaaacaaacgttttcagtgttttattgttagatttacattatcttctataaatttaaaacaatataatttagatgactatgactcttacgataacaactttgacgcttcttatgtgttgcttcatctaccagtagatcttgttatgataatataatgtattattaggatataaatgattgaatattattcaaatcaaatgagtttatttatctaaattttaacttcttaattatattaagggtttcttaaggacttaagccaaaaatatacagtgtgttccagttctcatcagaaagttcattaaatttgcaggaaacggaagatctgacaacaatgtaaatacaatgtaaatattgggtgttgcatatataaaactcacactgtatag

SEQ ID NO: 1044 - DNA, 6706 bp, Diabrotica virgifera
gtgattttgacattttcacaattttcagtcggtgtttagacgggagagaaaaaaaaattgtttgtaaagtttagtgtctacctgaaaataaataaatatgtctattaaaaacaataacatgtggatgtttggcctagttttgtttactgttacagtagttgccttaagtactgcccaatcaacagacccttacgacaaattagctgatcattggttcaataaatgtaacaacgaaacaaaagggactgtagccttcgacaaactatattcgaatagcgtcgagttcaagaggtacttgaaatacaccttcaagtttatcccaggagagaagaaagtattttgtgataaagaacgtgacatcctaaaaaagaggatgcaggaactaacgtccaacatgagaccttgtttgccccaaaaggaaaagttttttgaacaatttatatatgacagcttcaaggaagtcttgcactttttgtgtcataataacggagaacacattgatgctttcttttcgaccagatccagtgaatgccgaaacaaactgttcaactcagaaaatccaaatttgggaaattgtttctctggaatattcagacctgcatcaggccttaataaaacagttttgtgctctgattatggagtagtcaaaaaatgttttgccgaagccttgacacagaactgcccagccgatggtggcttcaaaaaacttaacgaagacttctttagttacgctagtaaaccctgctcaggctgtgctttctacatcaactcattgttactgactgtttcaatactcgcgtcgtacatctttagtcgtaaataacttgagttttttaattagaaactctgctatccaattttgttgttgatctatggtacgaaaactacataaacataataatttctaatggtctttttaacggagtttagtaattgtgacgtttgataatctgctacaaatattgtaaattgaataatgttcataataaatgtctccgtggcaaatatttgctaccaaatcaattgcaaaatatatcccaaattcaatttcttttagcacattccagtagcctttatttaatataatatctagaacatgtttataagaaccaaaaagtctttgtaacaaattcatttgccgttttttcagattcaccagaatatgtaaaactaaagagtgcaaatagtaattctataattcttctaataatacggagatattgaataatgttaaaacgcttggaatacgctgaaaataaaacgaaaatatggaatctctaataaaaaatatgaagcattgttatgttataaatagtaaacaaaccggcaaatttacaggaacgcaggtatatataaaggcacgtatccactatgttggcgctccgcgttccatgcaactgctctaatcgatagggcatgcgctgctctacatataaaccgccacccttttaacccactctccagtttcttccaatttaacattgcgattgaactgtcttgattaaaatgtaaaattaaacaataatagtagatctatcaataaaacactgaaaacgtttgttttctgtacttccacaaaatttattacaactatgtgactaaagctgtaatcataatcattcttttaatgaacagtttcaaattctgcatattcaaagtaaaaaccttaagctatctttattagaatctatggaaattaataaattgaaaaatacagatataattctgaatggccaactcgagacaaacagctccccactcctcaacttcttcagttaaagactttaaaaagacaaacccatagtaatctaaatcacttgaggaaggcactctgccgaaacagctgtagtcacatagttgtaataaattttgtggaagtgtggaaaacagacgttttcagtgttttattgttagataaaatgaacttccatcaagtaactgtcgaatccatcaataatagtagaattccatggcagtcttgatttactcaatcaccaaataaaaaatatgcccctcattttataaaatttaactccgtgcctttatatgccagtgcgtctgtttagaaattagtctaatgtttcatctttcatattataatgataagttcatatactaataattaaaccattaaattatataaaattagggctcgaaaaactaaactaactcaaccaactgaaagtttaaacgtaaactgaaagttcggcttttgttaacatttacataatactcacatatacagattcggaaaaatttcgatgagatatttcggctacctaatagcgctatatcgttttaagtaggtgtttctgacttagtagcatgtaaagtcaataccttctttaaattcttaccgatgctgtatttctgcattgttgcgctctatacttcttattctttgtattcatttaactctccacctcagaagtccataactgtattagaaaaatatctgccttgttagtcacaataaggatacctaatataaaaaagttgtctttttgctttaaaatcgtgtgtcagatctaacgtatctaaatatttgattgttaaatgatctacaccaataaaaaaatatgtaattttcttgtattatattaattaatattaactgtatatgtatataatatatttcatgaagcttaattcgatttaattacatattttatttattaagtaaaagtatgtatatttcattaatcccactgtaaattttgctaacaaggctaaattttgcatgggtgttagatattgtaaatatcaaataacaattatattttgcaatgtctgttgacacataattctattgttgtaaataaagtatatttggattatttatcaatttaggtgcatatatttgtaattgatttgtgagcatttatttttaattacaaaggatttattattaataacccaaatcacgcatatttatgtaaattattgttaagacaacacagaacataccgtttaatacaaaacgtaaaaatttatgtgatttagcactctggtgtaattttggttccaacatagtcgggtgcaatcatcggagaagccactcttgattagcttttactattttttgtgataacggcagcagatttttttttataaaaagaactagtcaaacatatttcattcatttttgacagatcataaaaattattaatttaacatttagaaggtaatttcaatagcaacgtgtttcatccattagatgatatgtgaccttctgcactgttacaaataacacacatgaaaacagtatatgagagatagataatttttgagtatatagttggatagtctccttatactagtcaaaaaagtgcctgtttcagatcttggtttctttgtaccatctgggacccatctttttttaactgtgttatgaagtgttgtgatttttctttgaagttgaagttttatttaagctgtccactcacagtacacagtactgcgttatcgttcgacaagatcgtcgatgatatcaatttttgcaatactgcagtagacaggccagtctaattggcaggtctgcggtcaaattgtacgatttcgttggatgcacggtcacacacgatcaaaatgtttaccaattagtcgaattcgacaaagtggccaactttatagttaatcaagcacaagttcgggagagacttgttttaaaaacagtctgctgaaaataggtttttttgttaaatatattaatactcaatatggaaaattataatgataaataaattgccttttattttttaagcattttatactattcgtccaaaggtaataattaatagaataagaaaacagattttatagtttattgttaaaacaacgaattgaaaaatagaagaatcggaattccacatttaaaatatggaactaattccatgtgtcggctcgatgtagaagtagattgatgaactaaatctagtggacgctggattcgaaccacaagtcagctagataattttcaaaacatattaggtatatataaaatccaaagttataggctttcaaatgagtagtacggtgagagatacggtttcacggctcgatgaaactcgtataagtaattcctgcggatgcaaaaaattaccaatataaaataccaaccgaacatccctgaaagaagataattagaaataaataaaatcctcatataaagcaaaatatacataatgtgagatataaactgttatatgagtgatgtgaaattaacaagaaacatagagctgaatgaaaggacacacgcaggagaaaatagctagataaaagtcgaaattatgtgatacaataataggagaaacattgcctttaaaaatactaagtattaataacttttataaactttttctggcactattaataacacttagccattgtaactcgttttggaagacattttcgatgtgccaataattaacaatttgtcaaataatgtgcctctcatgtccataaactgtgataactaaaaatatatattttacttaatagtatttattgtaatgataattaacatgttctgtgttgtttaaacattaatcttctcttctaaatactatcaaataatatgtatagattatgattctcttgatttattggacttttattgcgcgagtaagtagtattgaaagatgagcaaatttcttaaatattacatagtagaaatccgatcacccaaatctgaagtgattgctgttcaatataaagtaatacttatttcaaagtacttaatcaaaatatccaaattaaattactttcaatttccaaaatacctctgaccactagactatatttttgttaattagtatatttcggcaagtaataccgaaatatattagaaacaattagatattgtttgtgtagtaagcaagtctctcaatgagcttacttctttttcccttttgtggacgtccgtgaaatttgggcctcctttttaattgcgtacaattatgggcttcaacgtaattattaataccatcaacaattcttcctaatgattgatgagataatacggcgttcccggccactgttaatcaaacagtacgaatctatagaatttcagctgcttcaacagccgactgcgcttgagcttgtcacgtgatgaaaatgtatataacacacaccttaatggcgcttggcacacttctttgactacaacccccaccacactcacgagtagtagtgattacgcagataaaaactgaacttgggttgctttgaaaaggtttttattattttatctttagttttgtccatgatggcaggtgtaatttttcccgtcaattcatcaaagctcttcaaatatattcttatgtaattgacaaacatgtatgcaaatctttgtttaaaaatactcgggaaatccgggatctttaatacactgacaaggatctggacgtattgccttttaagaatcttgaaagcacggattctccagtcgccattaatcgaatttctcccaatctctattggctttgttcatttgtaccttcagtagttcttctaacttacgtcctcggttatattggtgtttagaaatacaagttttttctattataatctttatagccaccatagggcgattaccataatcttgcaaattacacttaaattatcagtagtaattgcacaagagctctaaaattattgaatttttcccgagtgtcactttggcagttttaattgcacgagccgaaggcgagtaaaattatgtcaaagtgtcacgagggcaaaaattctatattaattttagagttcgagtgcaatttgttgcgattatttcatgaataaaactgttcaaaaccaaaatttcattgtaatttatatatgtaagtaccaattagtgaaattaaacacacagttgttataaatatgtatttgacggttgaaagtcatcacttttataatttttaaaacagttgtcattaatgtcactgaatgtattttttcgtagcaacgaagggcatctgacgtaatatgcttaacgacgggagattatcaaaaattatcaccttaatttgcatgtctgtagctttctattggtcagaatctcctatgaatgaaataatcacaataatatttcttagtctcgatctagtcacgattaccttagtgtttaggattattttattttggttaatattgaataattacaaagatagttatataacaaatgtcccattatcggtagggtttgttgtataagtaactatttgaattgtgtattatttaatatataacactgtattcgggcaagatttcagatgtatcaaaacatgattttagttaaatgttgatgatgtgagcacatattatttatgtagggaaggtaataagtctactatactactcacaagtttattcgattttatttgtttaaagtgtgaagtggaggttgggcgatcggtttcgatgtttaaatatgcatcgtcatcgggcccttaagaagctaagatgtcagtacatggagttagcaaattagccctttccctctagacattttttatattaaagaatttttgtgataccaaattgtgtgtacaatcttttagttgtctcgttggtctcaccaacaaaaattctttaatataaaaaatgtctagagggtggggcctggtttgctaattctatgtactggtgtcttagcttcttgggggcctgatgatgatgtatattttaagcatcgagaccggtcgcc

SEQ ID NO: 1045 - DNA, 6637 bp, Diabrotica virgifera
  SmartBlast Evalue=9E-31; Info=Reverse transcriptase (Fragment) n=1 Tax=Aedes aegypti RepID=Q4F8Q4_AEDAE
cgtatgttgtataatccgtgtataatattaatatacacggagtatacgacatacgacagaagctcgaaacaaatgactattaatgaaaagccctgtagggatcaatattcataactctgatcatactactcatccatcagccgacaaagctacgtgcgatcgctggcggttcagcagtacgtttgaattttattcactgcacactcgagctgacccgcggagtgcactgagaacacgatagtttctgctacgccgccacgtgcacgcggcttgaaaacaagtcaggagggttggcagtctgtgctgggaaatcattcagtacacgctgaccgcccgatcgattacaacgtagatacagatctgtgtgaccacccaataagatctgtagtttctttttatatagctctgtcatataaactttcaaaaaaactgtcagatattattacagaatacactaaatttttcacctaaattcaccgtaaaaaatatactagaattagttaataaaatacaacattttcaattgcgcaacaactccagactaatttcattcgacgtaaaaaatctttttcctagtgtttctcctatagaaacttttgttctagttaaaaatcttttagaccataatacaaatccgatcattgcatttgaaattttacacctacttcacaaacaacagtgcaggacttattatgggtaatcctctaagcccattgctatcagatatatttatgaaccaacttgaaacaacaatttctaaacatcccgtatttaaacagttcttatattggtggagatacgtggatgatatactagtatgctttacaggaactaacagacaacttgaccaatttctatcataattaattcacttcatagtaatattgagtttacaatagaaacagaacagaataagtccataaactttctagatgtaacgattaccagactacacaacaaacatgagttctccgtatatcataaacctacccatactgacacaactatacacaattcatcatcccatcctacacaacacaaattagcagcctaccatagcatgatacatagactgacagaaattcccatgtcaaaaaataacttcgagatagaactaatatcattaaacaaatagcagtaaacaatggctataacgaacaaacaattaacaacattttaaaccaaaaactccataagaaagccctgaaattagtctatccaccaccacagaaagaacccagtaccttctgctctatcacatatactggcaagataacaacaaaaatagccagatacataaaaaagaaaggaataacaccagctttcagaactaacaacaacttaagcaaatatattaagaacaataagagccgaaagagaaaacaactacagagtggtgtttacaaactaacttgtggtgactgtccgaaaacttacatcggtcaaactggcagaacctttgacaaacggatagcagaacacaaaagggctttcaacaatagaaaaacagacacttctacatacgcacttcaccttctagatcataatcattctttcaatgaagagtttcaaattctgcatatccaaaataaaggccttaagctatctttattagaatctatggaaattaataaattgaaaaatacagatataattctgaatggccaactcgagacaaacagctccccactcctcaacttcttcagttaaagactttaaaaagacaaacccatagtaatctaaatcacttgaggaaggcactctgccgaaacagctgtagtcacatagttgtaataaattttgtggaagtgtggaaaacagacgttttcagtgttttattgttagataaaatgaacttccatcaagtaactgtcgaatccatcaataatagtagaattccatggcagtcttgatttactcaatcaccaaataaaaaatatgcccctcattttataaaatttaactccgtgcctttatatgccagtgcgtctgtttagaaattagtctaatgtttcatctttcatattataatgataagttcatatactaataattaaaccattaaattatataaaattagggctcgaaaaactaaactaactcaaccaactgaaagtttaaacgtaaactgaaagttcggcttttgttaacatttacataatactcacatatacagattcggaaaaatttcgatgagatatttcggctacctaatagcgctatatcgttttaagtaggtgtttctgacttagtagcatgtaaagtcaataccttctttaaattcttaccgatgctgtatttctgcattgttgcgctctatacttcttattctttgtattcatttaactctccacctcagaagtccataactgtattagaaaaatatctgccttgttagtcacaataaggatacctaatataaaaaagttgtctttttgctttaaaatcgtgtgtcagatctaacgtatctaaatatttgattgttaaatgatctacaccaataaaaaaatatgtaattttcttgtattatattaattaatattaactgtatatgtatataatatatttcatgaagcttaattcgatttaattacatattttatttattaagtaaaagtatgtatatttcattaatcccactgtaaattttgctaacaaggctaaattttgcatgggtgttagatattgtaaatatcaaataacaattatattttgcaatgtctgttgacacataattctattgttgtaaataaagtatatttggattatttatcaatttaggtgcatatatttgtaattgatttgtgagcatttatttttaattacaaaggatttattattaataacccaaatcacgcatatttatgtaaattattgttaagacaacacagaacataccgtttaatacaaaacgtaaaaatttatgtgatttagcactctggtgtaattttggttccaacatagtcgggtgcaatcatcggagaagccactcttgattagcttttactattttttgtgataacggcagcagatttttttttataaaaagaactagtcaaacatatttcattcatttttgacagatcataaaaattattaatttaacatttagaaggtaatttcaatagcaacgtgtttcatccattagatgatatgtgaccttctgcactgttacaaataacacacatgaaaacagtatatgagagatagataatttttgagtatatagttggatagtctccttatactagtcaaaaaagtgcctgtttcagatcttggtttctttgtaccatctgggacccatctttttttaactgtgttatgaagtgttgtgatttttctttgaagttgaagttttatttaagctgtccactcacagtacacagtactgcgttatcgttcgacaagatcgtcgatgatatcaatttttgcaatactgcagtagacaggccagtctaattggcaggtctgcggtcaaattgtacgatttcgttggatgcacggtcacacacgatcaaaatgtttaccaattagtcgaattcgacaaagtggccaactttatagttaatcaagcacaagttcgggagagacttgttttaaaaacagtctgctgaaaataggtttttttgttaaatatattaatactcaatatggaaaattataatgataaataaattgccttttattttttaagcattttatactattcgtccaaaggtaataattaatagaataagaaaacagattttatagtttattgttaaaacaacgaattgaaaaatagaagaatcggaattccacatttaaaatatggaactaattccatgtgtcggctcgatgtagaagtagattgatgaactaaatctagtggacgctggattcgaaccacaagtcagctagataattttcaaaacatattaggtatatataaaatccaaagttataggctttcaaatgagtagtacggtgagagatacggtttcacggctcgatgaaactcgtataagtaattcctgcggatgcaaaaaattaccaatataaaataccaaccgaacatccctgaaagaagataattagaaataaataaaatcctcatataaagcaaaatatacataatgtgagatataaactgttatatgagtgatgtgaaattaacaagaaacatagagctgaatgaaaggacacacgcaggagaaaatagctagataaaagtcgaaattatgtgatacaataataggagaaacattgcctttaaaaatactaagtattaataacttttataaactttttctggcactattaataacacttagccattgtaactcgttttggaagacattttcgatgtgccaataattaacaatttgtcaaataatgtgcctctcatgtccataaactgtgataactaaaaatatatattttacttaatagtatttattgtaatgataattaacatgttctgtgttgtttaaacattaatcttctcttctaaatactatcaaataatatgtatagattatgattctcttgatttattggacttttattgcgcgagtaagtagtattgaaagatgagcaaatttcttaaatattacatagtagaaatccgatcacccaaatctgaagtgattgctgttcaatataaagtaatacttatttcaaagtacttaatcaaaatatccaaattaaattactttcaatttccaaaatacctctgaccactagactatatttttgttaattagtatatttcggcaagtaataccgaaatatattagaaacaattagatattgtttgtgtagtaagcaagtctctcaatgagcttacttctttttcccttttgtggacgtccgtgaaatttgggcctcctttttaattgcgtacaattatgggcttcaacgtaattattaataccatcaacaattcttcctaatgattgatgagataatacggcgttcccggccactgttaatcaaacagtacgaatctatagaatttcagctgcttcaacagccgactgcgcttgagcttgtcacgtgatgaaaatgtatataacacacaccttaatggcgcttggcacacttctttgactacaacccccaccacactcacgagtagtagtgattacgcagataaaaactgaacttgggttgctttgaaaaggtttttattattttatctttagttttgtccatgatggcaggtgtaatttttcccgtcaattcatcaaagctcttcaaatatattcttatgtaattgacaaacatgtatgcaaatctttgtttaaaaatactcgggaaatccgggatctttaatacactgacaaggatctggacgtattgccttttaagaatcttgaaagcacggattctccagtcgccattaatcgaatttctcccaatctctattggctttgttcatttgtaccttcagtagttcttctaacttacgtcctcggttatattggtgtttagaaatacaagttttttctattataatctttatagccaccatagggcgattaccataatcttgcaaattacacttaaattatcagtagtaattgcacaagagctctaaaattattgaatttttcccgagtgtcactttggcagttttaattgcacgagccgaaggcgagtaaaattatgtcaaagtgtcacgagggcaaaaattctatattaattttagagttcgagtgcaatttgttgcgattatttcatgaataaaactgttcaaaaccaaaatttcattgtaatttatatatgtaagtaccaattagtgaaattaaacacacagttgttataaatatgtatttgacggttgaaagtcatcacttttataatttttaaaacagttgtcattaatgtcactgaatgtattttttcgtagcaacgaagggcatctgacgtaatatgcttaacgacgggagattatcaaaaattatcaccttaatttgcatgtctgtagctttctattggtcagaatctcctatgaatgaaataatcacaataatatttcttagtctcgatctagtcacgattaccttagtgtttaggattattttattttggttaatattgaataattacaaagatagttatataacaaatgtcccattatcggtagggtttgttgtataagtaactatttgaattgtgtattatttaatatataacactgtattcgggcaagatttcagatgtatcaaaacatgattttagttaaatgttgatgatgtgagcacatattatttatgtagggaaggtaataagtctactatactactcacaagtttattcgattttatttgtttaaagtgtgaagtggaggttgggcgatcggtttcgatgtttaaatatgcatcgtcatcgggcccttaagaagctaagatgtcagtacatggagttagcaaattagccctttccctctagacattttttatattaaagaatttttgtgataccaaattgtgtgtacaatcttttagttgtctcgttggtctcaccaacaaaaattctttaatataaaaaatgtctagagggtggggcctggtttgctaattctatgtactggtgtcttagcttcttgggggcctgatgatgatgtatattttaagcatcgagaccggtcgcc

SEQ ID NO: 1046 - DNA, 6092 bp, Diabrotica virgifera
  SmartBlast Evalue=9E-28; Info=Reverse transcriptase (Fragment) n=1 Tax=Aedes aegypti RepID=Q4F8Q4_AEDAE
ctatgttgttactacagctgtttcggcggggtgcctttctcaagtgatatattttgcagtgtgtttgccttttttaagtctttgactgaagaggttgaggagtggggagctgtttgtctcgagttggtcgttcagaattatatctgtatttttcaatttattaagcccattattatcagatatatttatgaaccaacttgaaacaacaatttctaaacaccccgtatttaaacagttcttatattggtggagatacgtggatgaatactagtatgctttacaggaactaacagacaacttgaccaatttctatcataattaattcacttcatagtaatattgagtttacaatagaaacagaacagaataattccataaactttctagatgtaacgattaccagactacacaacaaacatgagttctccgtatatcataaacctacccatactgacacaactatacacaattcatcatcccatcctacacaacacaaattagcagcctaccatagcatgatacatagactgacagaaattcccatgtcaaaaaataacttcgagatagaactaatatcattaaacaaatagcagtaaacaatggctataacgaacaaacaattaacaacattttaaaccaaaaactccataagaaagccctgaaattagtctatccaccaccacagaaagaacccagtaccttctgctctatcacatatactggcaagataacaacaaaaatagccagatacataaaaaagaaaggaataacaccagctttcagaactaacaacaacttaagcaaatatattaagaacaataagagccgaaagagaaaacaactacagagtggtgtttacaaactaacttgtggtgactgtccgaaaacttacatcggtcaaactggcagaacctttgacaaacggatagcagaacacaaaagggctttcaacaatagaaaaacagacacttctacatacgcacttcaccttctagatcataatcattctttcaatgaagagtttcaaattctgcatatccaaaataaaggccttaagctatctttattagaatctatggaaattaataaattgaaaaatacagatataattctgaatggccaactcgagacaaacagctccccactcctcaacttcttcagttaaagactttaaaaagacaaacccatagtaatctaaatcacttgaggaaggcactctgccgaaacagctgtagtcacatagttgtaataaattttgtggaagtgtggaaaacagacgttttcagtgttttattgttagataaaatgaacttccatcaagtaactgtcgaatccatcaataatagtagaattccatggcagtcttgatttactcaatcaccaaataaaaaatatgcccctcattttataaaatttaactccgtgcctttatatgccagtgcgtctgtttagaaattagtctaatgtttcatctttcatattataatgataagttcatatactaataattaaaccattaaattatataaaattagggctcgaaaaactaaactaactcaaccaactgaaagtttaaacgtaaactgaaagttcggcttttgttaacatttacataatactcacatatacagattcggaaaaatttcgatgagatatttcggctacctaatagcgctatatcgttttaagtaggtgtttctgacttagtagcatgtaaagtcaataccttctttaaattcttaccgatgctgtatttctgcattgttgcgctctatacttcttattctttgtattcatttaactctccacctcagaagtccataactgtattagaaaaatatctgccttgttagtcacaataaggatacctaatataaaaaagttgtctttttgctttaaaatcgtgtgtcagatctaacgtatctaaatatttgattgttaaatgatctacaccaataaaaaaatatgtaattttcttgtattatattaattaatattaactgtatatgtatataatatatttcatgaagcttaattcgatttaattacatattttatttattaagtaaaagtatgtatatttcattaatcccactgtaaattttgctaacaaggctaaattttgcatgggtgttagatattgtaaatatcaaataacaattatattttgcaatgtctgttgacacataattctattgttgtaaataaagtatatttggattatttatcaatttaggtgcatatatttgtaattgatttgtgagcatttatttttaattacaaaggatttattattaataacccaaatcacgcatatttatgtaaattattgttaagacaacacagaacataccgtttaatacaaaacgtaaaaatttatgtgatttagcactctggtgtaattttggttccaacatagtcgggtgcaatcatcggagaagccactcttgattagcttttactattttttgtgataacggcagcagatttttttttataaaaagaactagtcaaacatatttcattcatttttgacagatcataaaaattattaatttaacatttagaaggtaatttcaatagcaacgtgtttcatccattagatgatatgtgaccttctgcactgttacaaataacacacatgaaaacagtatatgagagatagataatttttgagtatatagttggatagtctccttatactagtcaaaaaagtgcctgtttcagatcttggtttctttgtaccatctgggacccatctttttttaactgtgttatgaagtgttgtgatttttctttgaagttgaagttttatttaagctgtccactcacagtacacagtactgcgttatcgttcgacaagatcgtcgatgatatcaatttttgcaatactgcagtagacaggccagtctaattggcaggtctgcggtcaaattgtacgatttcgttggatgcacggtcacacacgatcaaaatgtttaccaattagtcgaattcgacaaagtggccaactttatagttaatcaagcacaagttcgggagagacttgttttaaaaacagtctgctgaaaataggtttttttgttaaatatattaatactcaatatggaaaattataatgataaataaattgccttttattttttaagcattttatactattcgtccaaaggtaataattaatagaataagaaaacagattttatagtttattgttaaaacaacgaattgaaaaatagaagaatcggaattccacatttaaaatatggaactaattccatgtgtcggctcgatgtagaagtagattgatgaactaaatctagtggacgctggattcgaaccacaagtcagctagataattttcaaaacatattaggtatatataaaatccaaagttataggctttcaaatgagtagtacggtgagagatacggtttcacggctcgatgaaactcgtataagtaattcctgcggatgcaaaaaattaccaatataaaataccaaccgaacatccctgaaagaagataattagaaataaataaaatcctcatataaagcaaaatatacataatgtgagatataaactgttatatgagtgatgtgaaattaacaagaaacatagagctgaatgaaaggacacacgcaggagaaaatagctagataaaagtcgaaattatgtgatacaataataggagaaacattgcctttaaaaatactaagtattaataacttttataaactttttctggcactattaataacacttagccattgtaactcgttttggaagacattttcgatgtgccaataattaacaatttgtcaaataatgtgcctctcatgtccataaactgtgataactaaaaatatatattttacttaatagtatttattgtaatgataattaacatgttctgtgttgtttaaacattaatcttctcttctaaatactatcaaataatatgtatagattatgattctcttgatttattggacttttattgcgcgagtaagtagtattgaaagatgagcaaatttcttaaatattacatagtagaaatccgatcacccaaatctgaagtgattgctgttcaatataaagtaatacttatttcaaagtacttaatcaaaatatccaaattaaattactttcaatttccaaaatacctctgaccactagactatatttttgttaattagtatatttcggcaagtaataccgaaatatattagaaacaattagatattgtttgtgtagtaagcaagtctctcaatgagcttacttctttttcccttttgtggacgtccgtgaaatttgggcctcctttttaattgcgtacaattatgggcttcaacgtaattattaataccatcaacaattcttcctaatgattgatgagataatacggcgttcccggccactgttaatcaaacagtacgaatctatagaatttcagctgcttcaacagccgactgcgcttgagcttgtcacgtgatgaaaatgtatataacacacaccttaatggcgcttggcacacttctttgactacaacccccaccacactcacgagtagtagtgattacgcagataaaaactgaacttgggttgctttgaaaaggtttttattattttatctttagttttgtccatgatggcaggtgtaatttttcccgtcaattcatcaaagctcttcaaatatattcttatgtaattgacaaacatgtatgcaaatctttgtttaaaaatactcgggaaatccgggatctttaatacactgacaaggatctggacgtattgccttttaagaatcttgaaagcacggattctccagtcgccattaatcgaatttctcccaatctctattggctttgttcatttgtaccttcagtagttcttctaacttacgtcctcggttatattggtgtttagaaatacaagttttttctattataatctttatagccaccatagggcgattaccataatcttgcaaattacacttaaattatcagtagtaattgcacaagagctctaaaattattgaatttttcccgagtgtcactttggcagttttaattgcacgagccgaaggcgagtaaaattatgtcaaagtgtcacgagggcaaaaattctatattaattttagagttcgagtgcaatttgttgcgattatttcatgaataaaactgttcaaaaccaaaatttcattgtaatttatatatgtaagtaccaattagtgaaattaaacacacagttgttataaatatgtatttgacggttgaaagtcatcacttttataatttttaaaacagttgtcattaatgtcactgaatgtattttttcgtagcaacgaagggcatctgacgtaatatgcttaacgacgggagattatcaaaaattatcaccttaatttgcatgtctgtagctttctattggtcagaatctcctatgaatgaaataatcacaataatatttcttagtctcgatctagtcacgattaccttagtgtttaggattattttattttggttaatattgaataattacaaagatagttatataacaaatgtcccattatcggtagggtttgttgtataagtaactatttgaattgtgtattatttaatatataacactgtattcgggcaagatttcagatgtatcaaaacatgattttagttaaatgttgatgatgtgagcacatattatttatgtagggaaggtaataagtctactatactactcacaagtttattcgattttatttgtttaaagtgtgaagtggaggttgggcgatcggtttcgatgtttaaatatgcatcgtcatcgggcccttaagaagctaagatgtcagtacatggagttagcaaattagccctttccctctagacattttttatattaaagaatttttgtgataccaaattgtgtgtacaatcttttagttgtctcgttggtctcaccaacaaaaattctttaatataaaaaatgtctagagggtggggcctggtttgctaattctatgtactggtgtcttagcttcttgggggcctgatgatgatgtatattttaagcatcgagaccggtcgcc

SEQ ID NO: 1047 - DNA, 6040 bp, Diabrotica virgifera
  SmartBlast Evalue=4E-25; Info=Endonuclease-reverse transcriptase n=1 Tax=Schistosoma mansoni RepID=Q4QQE8_SCHMA
cttctctccatcccaggccaattctttcatgatctcttgttacagtttttctccatctattatcgggtcttcgtcttcttcttcttccgtctggttggtattcgagtgcttgtctggctatattatttcggtccttccctagagtatgtcgaatccatctccatttccttcttttaatcgtgactgttattttctcttgttttgttcttcatagatctatgtttgttattttatttggccagtatattttcactatttttctcaacgatttatttataaaggtttgtaatttttttgtagttgtctcttcctgtctccaagattctgcgccatacaataatatactcttaatacagctgttaaatattttgattttggttaattttaatatatcgcgtgtgttccagattttctttaatgagttatatgcatgttgtgcctttactattctttttcctacatctgatctactattttagtagatctcgaagttattttttgacagaacagatataactgaacatcattaaacaaatagcagtaaacaatggctataacgaacaaacaattaacaacattttaaaccaaaaactccataagaaagccctgaaattagtctatccaccaccacagaaagaacccagtaccttctgctctatcacatatactggcaagataacaacaaaaatagccagatacataaaaaagaaaggaataacaccagctttcagaactaacaacaacttaagcaaatatattaagaacaataagagccgaaagagaaaacaactacagagtggtgtttacaaactaacttgtggtgactgtccgaaaacttacatcggtcaaactggcagaacctttgacaaacggatagcagaacacaaaagggctttcaacaatagaaaaacagacacttctacatacgcacttcaccttctagatcataatcattctttcaatgaagagtttcaaattctgcatatccaaaataaaggccttaagctatctttattagaatctatggaaattaataaattgaaaaatacagatataattctgaatggccaactcgagacaaacagctccccactcctcaacttcttcagttaaagactttaaaaagacaaacccatagtaatctaaatcacttgaggaaggcactctgccgaaacagctgtagtcacatagttgtaataaattttgtggaagtgtggaaaacagacgttttcagtgttttattgttagataaaatgaacttccatcaagtaactgtcgaatccatcaataatagtagaattccatggcagtcttgatttactcaatcaccaaataaaaaatatgcccctcattttataaaatttaactccgtgcctttatatgccagtgcgtctgtttagaaattagtctaatgtttcatctttcatattataatgataagttcatatactaataattaaaccattaaattatataaaattagggctcgaaaaactaaactaactcaaccaactgaaagtttaaacgtaaactgaaagttcggcttttgttaacatttacataatactcacatatacagattcggaaaaatttcgatgagatatttcggctacctaatagcgctatatcgttttaagtaggtgtttctgacttagtagcatgtaaagtcaataccttctttaaattcttaccgatgctgtatttctgcattgttgcgctctatacttcttattctttgtattcatttaactctccacctcagaagtccataactgtattagaaaaatatctgccttgttagtcacaataaggatacctaatataaaaaagttgtctttttgctttaaaatcgtgtgtcagatctaacgtatctaaatatttgattgttaaatgatctacaccaataaaaaaatatgtaattttcttgtattatattaattaatattaactgtatatgtatataatatatttcatgaagcttaattcgatttaattacatattttatttattaagtaaaagtatgtatatttcattaatcccactgtaaattttgctaacaaggctaaattttgcatgggtgttagatattgtaaatatcaaataacaattatattttgcaatgtctgttgacacataattctattgttgtaaataaagtatatttggattatttatcaatttaggtgcatatatttgtaattgatttgtgagcatttatttttaattacaaaggatttattattaataacccaaatcacgcatatttatgtaaattattgttaagacaacacagaacataccgtttaatacaaaacgtaaaaatttatgtgatttagcactctggtgtaattttggttccaacatagtcgggtgcaatcatcggagaagccactcttgattagcttttactattttttgtgataacggcagcagatttttttttataaaaagaactagtcaaacatatttcattcatttttgacagatcataaaaattattaatttaacatttagaaggtaatttcaatagcaacgtgtttcatccattagatgatatgtgaccttctgcactgttacaaataacacacatgaaaacagtatatgagagatagataatttttgagtatatagttggatagtctccttatactagtcaaaaaagtgcctgtttcagatcttggtttctttgtaccatctgggacccatctttttttaactgtgttatgaagtgttgtgatttttctttgaagttgaagttttatttaagctgtccactcacagtacacagtactgcgttatcgttcgacaagatcgtcgatgatatcaatttttgcaatactgcagtagacaggccagtctaattggcaggtctgcggtcaaattgtacgatttcgttggatgcacggtcacacacgatcaaaatgtttaccaattagtcgaattcgacaaagtggccaactttatagttaatcaagcacaagttcgggagagacttgttttaaaaacagtctgctgaaaataggtttttttgttaaatatattaatactcaatatggaaaattataatgataaataaattgccttttattttttaagcattttatactattcgtccaaaggtaataattaatagaataagaaaacagattttatagtttattgttaaaacaacgaattgaaaaatagaagaatcggaattccacatttaaaatatggaactaattccatgtgtcggctcgatgtagaagtagattgatgaactaaatctagtggacgctggattcgaaccacaagtcagctagataattttcaaaacatattaggtatatataaaatccaaagttataggctttcaaatgagtagtacggtgagagatacggtttcacggctcgatgaaactcgtataagtaattcctgcggatgcaaaaaattaccaatataaaataccaaccgaacatccctgaaagaagataattagaaataaataaaatcctcatataaagcaaaatatacataatgtgagatataaactgttatatgagtgatgtgaaattaacaagaaacatagagctgaatgaaaggacacacgcaggagaaaatagctagataaaagtcgaaattatgtgatacaataataggagaaacattgcctttaaaaatactaagtattaataacttttataaactttttctggcactattaataacacttagccattgtaactcgttttggaagacattttcgatgtgccaataattaacaatttgtcaaataatgtgcctctcatgtccataaactgtgataactaaaaatatatattttacttaatagtatttattgtaatgataattaacatgttctgtgttgtttaaacattaatcttctcttctaaatactatcaaataatatgtatagattatgattctcttgatttattggacttttattgcgcgagtaagtagtattgaaagatgagcaaatttcttaaatattacatagtagaaatccgatcacccaaatctgaagtgattgctgttcaatataaagtaatacttatttcaaagtacttaatcaaaatatccaaattaaattactttcaatttccaaaatacctctgaccactagactatatttttgttaattagtatatttcggcaagtaataccgaaatatattagaaacaattagatattgtttgtgtagtaagcaagtctctcaatgagcttacttctttttcccttttgtggacgtccgtgaaatttgggcctcctttttaattgcgtacaattatgggcttcaacgtaattattaataccatcaacaattcttcctaatgattgatgagataatacggcgttcccggccactgttaatcaaacagtacgaatctatagaatttcagctgcttcaacagccgactgcgcttgagcttgtcacgtgatgaaaatgtatataacacacaccttaatggcgcttggcacacttctttgactacaacccccaccacactcacgagtagtagtgattacgcagataaaaactgaacttgggttgctttgaaaaggtttttattattttatctttagttttgtccatgatggcaggtgtaatttttcccgtcaattcatcaaagctcttcaaatatattcttatgtaattgacaaacatgtatgcaaatctttgtttaaaaatactcgggaaatccgggatctttaatacactgacaaggatctggacgtattgccttttaagaatcttgaaagcacggattctccagtcgccattaatcgaatttctcccaatctctattggctttgttcatttgtaccttcagtagttcttctaacttacgtcctcggttatattggtgtttagaaatacaagttttttctattataatctttatagccaccatagggcgattaccataatcttgcaaattacacttaaattatcagtagtaattgcacaagagctctaaaattattgaatttttcccgagtgtcactttggcagttttaattgcacgagccgaaggcgagtaaaattatgtcaaagtgtcacgagggcaaaaattctatattaattttagagttcgagtgcaatttgttgcgattatttcatgaataaaactgttcaaaaccaaaatttcattgtaatttatatatgtaagtaccaattagtgaaattaaacacacagttgttataaatatgtatttgacggttgaaagtcatcacttttataatttttaaaacagttgtcattaatgtcactgaatgtattttttcgtagcaacgaagggcatctgacgtaatatgcttaacgacgggagattatcaaaaattatcaccttaatttgcatgtctgtagctttctattggtcagaatctcctatgaatgaaataatcacaataatatttcttagtctcgatctagtcacgattaccttagtgtttaggattattttattttggttaatattgaataattacaaagatagttatataacaaatgtcccattatcggtagggtttgttgtataagtaactatttgaattgtgtattatttaatatataacactgtattcgggcaagatttcagatgtatcaaaacatgattttagttaaatgttgatgatgtgagcacatattatttatgtagggaaggtaataagtctactatactactcacaagtttattcgattttatttgtttaaagtgtgaagtggaggttgggcgatcggtttcgatgtttaaatatgcatcgtcatcgggcccttaagaagctaagatgtcagtacatggagttagcaaattagccctttccctctagacattttttatattaaagaatttttgtgataccaaattgtgtgtacaatcttttagttgtctcgttggtctcaccaacaaaaattctttaatataaaaaatgtctagagggtggggcctggtttgctaattctatgtactggtgtcttagcttcttgggggcctgatgatgatgtatattttaagcatcgagaccggtcgcc

SEQ ID NO: 1048 - DNA, 4208 bp, Diabrotica virgifera
  SmartBlast Evalue=0; Info="Atypical protein kinase C, isoform F n=1 Tax=Drosophila melanogaster RepID=Q0E971_DROME"
cgtatgttgtataatccgtgtataatattaatatacacggagtatacgacatacgacagaagctcgaaacaaatgactattaatgaaaagccctgtagggatcaatattcataactctgatcatactactcatccatcagccgacaaagctacgtgcgatcgctggcggttcagcagtacgtttgaattttattcactgcacactcgagctgacccgcggagtgcactgagaacacgatagtttctgctacgccgccacgtgcacgcggcttgaaaacaagtcaggagggttggcagtctgtgctgggaaatcattcagtacacgctgaccgcccgatcgattacaacgtagatacagatctgtgtgaccacccaataagatctgtagtttctttttatatagctctgtcatataaactttcaaaaaaactgtcagatattattacagaatacactaaatttttcacctaaattcaccgtaaaaaatatactagaattagttaataaaatacaacattttcaattgcgcaacaactccagactaatttcattcgacgtaaaaaatctttttcctagtgtttctcctatagaaacttttgttctagttaaaaatcttttagaccataatacaaatccgatcattgcatttgaaattttacaccttgaaatttgcataaatcaagactattttgaattcaataatcaaatatacacaaacaacagtgcaggacttattatgggtaatcctctaagcccattgctatcagatatatttatgaaccaacttgaaacaacaatttctaaacatcccgtatttaaacagttcttatattggtggagatacgtggatgatatactagtatgctttacaggaactaacagacaacttgaccaatttctatcataattaattcacttcatagtaatattgagtttacaatagaaacagaacagaataagtccataaactttctagatgtaacgattaccagactacacaacaaacatgagttctccgtatatcataaacctacccatactgacacaactatacacaattcatcatcccatcctacacaacacaaattagcagcctaccatagcatgatacatagactgacagaaattcccatgtcaaaaaataacttcgagatagaactaatatcattaaacaaatagcagtaaacaatggctataacgaacaaacaattaacaacattttaaaccaaaaactccataagaaagccctgaaattagtctatccaccaccacagaaagaacccagtaccttctgctctatcacatatactggcaagataacaacaaaaatagccagatacataaaaaagaaaggaataacaccagctttcagaactaacaacaacttaagcaaatatattaagaacaataagagccgaaagagaaaacaactacagagtggtgtttacaaactaacttgtggtgactgtccgaaaacttacatcggtcaaactggcagaacctttgacaaacagatagcagaacacaaaagggctttcaacaatagaaaaacagacacttctacatacgcatttcaccttctagatcataatcattcttttaatgaagagtttcaaattctgcatattcaaaataaaggcctcaagctatctttattagaatctatggaaattaataaattaaaaaatacagatataattctgaatgaccaactcgagacaaacagctccccactcctcaacctgttcagttaaagactttaaaaaggcaaacccatagtaaactaaatcacttgagaaaggcactctgccgaaacaactgtagtcacatagttataataaattttgtggaagtatacataacaaacgttttcagtgttttgattgatattgtgtactatttcattagaaaacgacaattttgacagacaaaccgaatttttccatataatacaatataaaatgcggcagagtaggattcgacggcagacatgacactttgtcaatgtggaaggagtacaggtacgggttagcccaatactgaactcggatagataatacattctatatttgagcaccctaataaactaaagaagaaataataaacgattaagtactaaataaatacataaatacttttcgatttgaaatagacactaaagcactagttgagaggaaggcaaaagatattttgaagtaaagatttggcgggctgcggtctcacgtccacctgcaggtagtgtcccccgttgccgatgtccacggcggagtcccccaggtccggaggcggcggtggcgggaacaacggaggaggataacggtgcgccgccgccggtggtggcggtggaggcaggttggagggatgcaatgcacagaggacgttatgtcacacgcaatcttctaacgacatgagtagcgggttcacgtactcgaacccttcgaattctgattgatcgatcttctcgattactcgtggatcatctggtgtaaggtgtacaggttcatcggtaaattctggtgggaaattggctaaatctctttctgagtccaatcgtggtttatagggagggggtacttgcttctgttccaacatatcccagtcaatacttttgaaaaactgatgacccgtaatctcaatgaaagcttcagggctgtgacatcctagcctgtcagccgggtttttgttcaagaatcctttcagaacgttcgcagctttcacgctaagcgatcgaggtatacgaatagttttctcgagaatcacttggaatagatagtcttcagtgttttggtctggattttcagacgctcccgctatatcgaatggcgagcggccggccaacatctcgtacaacaagacacctaaagcccaccaatcaacggaaaatccatagtcttcgccccttaaaatttcgggagctatgtaattgggcgtaccgcagaacgtggatgtagtatcgcctggcctaataccttctttacacataccataatcagtcaacttgatatgaccctcgtgatccaatagtacgttatctagtttcagatccctatagatgattcccttgcagtggaggaagtttaaggcgagggagatttccgcagcatagaatctcgcatgttcttcgggcaacctcctctgcctctgcatatgaaacatcaaatcaccacccctaacgaactcaataacgaagaacaatctcgaaggcgtttgaaagcacgaatgcaatccgaccagaaacggatgattggaagcagtttcgaaaacgtgtttctcggtttgcacccaatcgatatcctcgtcgtcggtaacaagagccttcttaatcaccttcatggcgtatatgcgttttgtctttttcaattctaccatcaggactttggcgtaggagccgcggccgattacgcggatcagttcgaaatcgttcagggaatattggcgttgagagccgggttctaaatcgtcgacaggcttgttggggtcttctacgggaacagattcgccagtgacatctggcggaggttccggaaaatctttttctcgtatctcccacttggactcggttatcggcgtattattcgcttgcgcttccccattgtggtcttctcgaattactggttcttgatgctcactcgtgcaaggtttatttacagccttgtggcatttcttatgaacgagaagtttacactggatacacttgaaaccttgtctgcctaatccccagattctatcgttacaatacgcgcaaaatgctctcctattgaatcttttagcttggaatatgtgtccattaaccctataaagcttcctccaccgacgtgctcctcttctataaatacttctgtcctcgccctggcagggcattcctggctgcgacggcacattggggaaaacaccagtggtgtttccgataagggaagagggttcgtacgtgtatatgggatgatatgcccacaaaacggtagcttctgcgaaatcagcgaaaagtttcctcaaccaagttctatctaccatcttctgtgcatcacatggcacaacaataacaaaaaaagcactaaaaaacactgcacttacaactaattgattcacgattacacttccaacaatacattaagttataagcgacggaaaattaattgttaattagacaccaacaaattaaaaagttttttccgttttaggtgaactgatttatctcgattctgaacgtg

SEQ ID NO: 1049 - DNA, 4164 bp, Diabrotica virgifera
  SmartBlast Evalue=0; Info="Atypical protein kinase C, isoform F n=1 Tax=Drosophila melanogaster RepID=Q0E971_DROME"
cgtatgttgtataatccgtgtataatattaatatacacggagtatacgacatacgacagaagctcgaaacaaatgactattaatgaaaagccctgtagggatcaatattcataactctgatcatactactcatccatcagccgacaaagctacgtgcgatcgctggcggttcagcagtacgtttgaattttattcactgcacactcgagctgacccgcggagtgcactgagaacacgatagtttctgctacgccgccacgtgcacgcggcttgaaaacaagtcaggagggttggcagtctgtgctgggaaatcattcagtacacgctgaccgcccgatcgattacaacgtagatacagatctgtgtgaccacccaataagatctgtagtttctttttatatagctctgtcatataaactttcaaaaaaactgtcagatattattacagaatacactaaatttttcacctaaattcaccgtaaaaaatatactagaattagttaataaaatacaacattttcaattgcgcaacaactccagactaatttcattcgacgtaaaaaatctttttcctagtgtttctcctatagaaacttttgttctagttaaaaatcttttagaccataatacaaatccgatcattgcatttgaaattttacacctacttcacaaacaacagtgcaggacttattatgggtaatcctctaagcccattgctatcagatatatttatgaaccaacttgaaacaacaatttctaaacatcccgtatttaaacagttcttatattggtggagatacgtggatgatatactagtatgctttacaggaactaacagacaacttgaccaatttctatcataattaattcacttcatagtaatattgagtttacaatagaaacagaacagaataagtccataaactttctagatgtaacgattaccagactacacaacaaacatgagttctccgtatatcataaacctacccatactgacacaactatacacaattcatcatcccatcctacacaacacaaattagcagcctaccatagcatgatacatagactgacagaaattcccatgtcaaaaaataacttcgagatagaactaatatcattaaacaaatagcagtaaacaatggctataacgaacaaacaattaacaacattttaaaccaaaaactccataagaaagccctgaaattagtctatccaccaccacagaaagaacccagtaccttctgctctatcacatatactggcaagataacaacaaaaatagccagatacataaaaaagaaaggaataacaccagctttcagaactaacaacaacttaagcaaatatattaagaacaataagagccgaaagagaaaacaactacagagtggtgtttacaaactaacttgtggtgactgtccgaaaacttacatcggtcaaactggcagaacctttgacaaacagatagcagaacacaaaagggctttcaacaatagaaaaacagacacttctacatacgcatttcaccttctagatcataatcattcttttaatgaagagtttcaaattctgcatattcaaaataaaggcctcaagctatctttattagaatctatggaaattaataaattaaaaaatacagatataattctgaatgaccaactcgagacaaacagctccccactcctcaacctgttcagttaaagactttaaaaaggcaaacccatagtaaactaaatcacttgagaaaggcactctgccgaaacaactgtagtcacatagttataataaattttgtggaagtatacataacaaacgttttcagtgttttgattgatattgtgtactatttcattagaaaacgacaattttgacagacaaaccgaatttttccatataatacaatataaaatgcggcagagtaggattcgacggcagacatgacactttgtcaatgtggaaggagtacaggtacgggttagcccaatactgaactcggatagataatacattctatatttgagcaccctaataaactaaagaagaaataataaacgattaagtactaaataaatacataaatacttttcgatttgaaatagacactaaagcactagttgagaggaaggcaaaagatattttgaagtaaagatttggcgggctgcggtctcacgtccacctgcaggtagtgtcccccgttgccgatgtccacggcggagtcccccaggtccggaggcggcggtggcgggaacaacggaggaggataacggtgcgccgccgccggtggtggcggtggaggcaggttggagggatgcaatgcacagaggacgttatgtcacacgcaatcttctaacgacatgagtagcgggttcacgtactcgaacccttcgaattctgattgatcgatcttctcgattactcgtggatcatctggtgtaaggtgtacaggttcatcggtaaattctggtgggaaattggctaaatctctttctgagtccaatcgtggtttatagggagggggtacttgcttctgttccaacatatcccagtcaatacttttgaaaaactgatgacccgtaatctcaatgaaagcttcagggctgtgacatcctagcctgtcagccgggtttttgttcaagaatcctttcagaacgttcgcagctttcacgctaagcgatcgaggtatacgaatagttttctcgagaatcacttggaatagatagtcttcagtgttttggtctggattttcagacgctcccgctatatcgaatggcgagcggccggccaacatctcgtacaacaagacacctaaagcccaccaatcaacggaaaatccatagtcttcgccccttaaaatttcgggagctatgtaattgggcgtaccgcagaacgtggatgtagtatcgcctggcctaataccttctttacacataccataatcagtcaacttgatatgaccctcgtgatccaatagtacgttatctagtttcagatccctatagatgattcccttgcagtggaggaagtttaaggcgagggagatttccgcagcatagaatctcgcatgttcttcgggcaacctcctctgcctctgcatatgaaacatcaaatcaccacccctaacgaactcaataacgaagaacaatctcgaaggcgtttgaaagcacgaatgcaatccgaccagaaacggatgattggaagcagtttcgaaaacgtgtttctcggtttgcacccaatcgatatcctcgtcgtcggtaacaagagccttcttaatcaccttcatggcgtatatgcgttttgtctttttcaattctaccatcaggactttggcgtaggagccgcggccgattacgcggatcagttcgaaatcgttcagggaatattggcgttgagagccgggttctaaatcgtcgacaggcttgttggggtcttctacgggaacagattcgccagtgacatctggcggaggttccggaaaatctttttctcgtatctcccacttggactcggttatcggcgtattattcgcttgcgcttccccattgtggtcttctcgaattactggttcttgatgctcactcgtgcaaggtttatttacagccttgtggcatttcttatgaacgagaagtttacactggatacacttgaaaccttgtctgcctaatccccagattctatcgttacaatacgcgcaaaatgctctcctattgaatcttttagcttggaatatgtgtccattaaccctataaagcttcctccaccgacgtgctcctcttctataaatacttctgtcctcgccctggcagggcattcctggctgcgacggcacattggggaaaacaccagtggtgtttccgataagggaagagggttcgtacgtgtatatgggatgatatgcccacaaaacggtagcttctgcgaaatcagcgaaaagtttcctcaaccaagttctatctaccatcttctgtgcatcacatggcacaacaataacaaaaaaagcactaaaaaacactgcacttacaactaattgattcacgattacacttccaacaatacattaagttataagcgacggaaaattaattgttaattagacaccaacaaattaaaaagttttttccgttttaggtgaactgatttatctcgattctgaacgtg

SEQ ID NO: 1050 - DNA, 4043 bp, Diabrotica virgifera
  SmartBlast Evalue=0; Info="Atypical protein kinase C, isoform F n=1 Tax=Drosophila melanogaster RepID=Q0E971_DROME"
cgtatgttgtataatccgtgtataatattaatatacacggagtatacgacatacgacagaagctcgaaacaaatgactattaatgaaaagccctgtagggatcaatattcataactctgatcatactactcatccatcagccgacaaagctacgtgcgatcgctggcggttcagcagtacgtttgaattttattcactgcacactcgagctgacccgcggagtgcactgagaacacgatagtttctgctacgccgccacgtgcacgcggcttgaaaacaagtcaggagggttggcagtctgtgctgggaaatcattcagtacacgctgaccgcccgatcgattacaacgtagatacagatctgtgtgaccacccaataagatctgtagtttctttttatatagctctgtcatataaactttcaaaaaaactgtcagatattattacagaatacactaaatttttcacctaaattcaccgtaaaaaatatactagaattagttaataaaatacaacattttcaattgcgcaacaactccagactaatttcattcgacgtaaaaaatctttttcctagtgtttctcctatagaaacttttgttctagttaaaaatcttttagaccataatacaaatccgatcattgcatttgaaattttacaccttgaaatttgcataaatcaagactattttgaattcaataatcaaatatacacaaacaacagtgcaggacttattatgggtaatcctctaagcccattgctatcagatatatttatgaaccaacttgaaacaacaatttctaaacatcccgtatttaaacagttcttatattggtggagatacgtggatgatatactagtatgctttacaggaactaacagacaacttgaccaatttctatcataattaattcacttcatagtaatattgagtttacaatagaaacagaacagaataagtccataaactttctagatgtaacgattaccagactacacaacaaacatgagttctccgtatatcataaacctacccatactgacacaactatacacaattcatcatcccatcctacacaacacaaattagcagcctaccatagcatgatacatagactgacagaaattcccatgtcaaaaaataacttcgagatagaactaatatcattaaacaaatagcagtaaacaatggctataacgaacaaacaattaacaacattttaaaccaaaaactccataagaaagccctgaaattagtctatccaccaccacagaaagaacccagtaccttctgctctatcacatatactggcaagataacaacaaaaatagccagatacataaaaaagaaaggaataacaccagctttcagaactaacaacaacttaagcaaatatattaagaacaataagagccgaaagagaaaacaactacagagtggtgtttacaaactaacttgtggtgactgtccgaaaacttacatcggtcaaactggcagaacctttgacaaacagatagcagaacacaaaagggctttcaacaatagaaaaacagacacttctacatacgcatttcaccttctagatcataatcattcttttaatgaagagtttcaaattctgcatattcaaaataaaggcctcaagctatctttattagaatctatggaaattaataaattaaaaaatacagatataattctgaatgaccaactcgagacaaacagctccccactcctcaacctgttcagttaaagactttaaaaaggcaaacccatagtaaactaaatcacttgagaaaggcactctgccgaaacaactgtagtcacatagttataataaattttgtggaagtatacataacaaacgttttcagtgttttgattgatattgtgtactatttcattagaaaacgacaattttgacagacaaaccgaatttttccatataatacaatataaaatgcggcagagtaggattcgacggcagacatgacactttgtcaatgtggaaggagtacaggtacgggttagcccaatactgaactcggatagataatacattctatatttgagcaccctaataaactaaagaagaaataataaacgattaagtactaaataaatacataaatacttttcgatttgaaatagacactaaagcactagttgagaggaaggcaaaagatattttgaagtaaagatttggcgggctgcggtctcacgtccacctgcaggtagtgtcccccgttgccgatgtccacggcggagtcccccaggtccggaggcggcggtggcgggaacaacggaggaggataacggtgcgccgccgccggtggtggcggtggaggcaggttggagggatgcaatgcacagaggacgttatgtcacacgcaatcttctaacgacatgagtagcgggttcacgtactcgaacccttcgaattctgattgatcgatcttctcgattactcgtggatcatctggtgtaaggtgtacaggttcatcggtaaattctggtgggaaattggctaaatctctttctgagtccaatcgtggtttatagggagggggtacttgcttctgttccaacatatcccagtcaatacttttgaaaaactgatgacccgtaatctcaatgaaagcttcagggctgtgacatcctagcctgtcagccgggtttttgttcaagaatcctttcagaacgttcgcagctttcacgctaagcgatcgaggtatacgaatagttttctcgagaatcacttggaatagatagtcttcagtgttttggtctggattttcagacgctcccgctatatcgaatggcgagcggccggccaacatctcgtacaacaagacacctaaagcccaccaatcaacggaaaatccatagtcttcgccccttaaaatttcgggagctatgtaattgggcgtaccgcagaacgtggatgtagtatcgcctggcctaataccttctttacacataccataatcagtcaacttgatatgaccctcgtgatccaatagtacgttatctagtttcagatccctatagatgattcccttgcagtggaggaagtttaaggcgagggagatttccgcagcatagaatctcgcatgttcttcgggcaacctcctctgcctctgcatatgaaacatcaaatcaccacccctaacgaactcaataacgaagaacaatctcgaaggcgtttgaaagcacgaatgcaatccgaccagaaacggatgattggaagcagtttcgaaaacgtgtttctcggtttgcacccaatcgatatcctcgtcgtcggtaacaagagccttcttaatcaccttcatggcgtatatgcgttttgtctttttcaattctaccatcaggactttggcgtaggagccgcggccgattacgcggatcagttcgaaatcgttcagggaatattggcgttgagagccgggttctaaatcgtcgacaggcttgttggggtcttctacgggaacagattcgccagtgacatctggcggaggttccggaaaatctttttctcgtatctcccacttggactcggttatcggcgtattattcgcttgcgcttccccattgtggtcttctcgaattactggttcttgatgctcactcgtgcaaggtttatttacagccttgtggcatttcttatgaacgagaagtttacactggatacacttgaaaccttgtctgcctaatccccagattctatcgttacaatacgcgcaaaatgctctcctattgaatcttttagcttggaatatgtgtccattaaccctataaagcttcctccaccgacgtgctcctcttctataaatacttctgtcctcgccctggcagggcattcctggctgcgacggcacattggggaaaactgtggacaaaacaatataaattaggccatttttttcactggacagactatctctgataacttttaacattttttagaccaacatgcaccgaatacacgttccttttatttatttgtgttggaaaatgttattgtgttgtgctgcaagttcga

SEQ ID NO: 1051 - DNA, 3999 bp, Diabrotica virgifera
  SmartBlast Evalue=0; Info="Atypical protein kinase C, isoform F n=1 Tax=Drosophila melanogaster RepID=Q0E971_DROME"
cgtatgttgtataatccgtgtataatattaatatacacggagtatacgacatacgacagaagctcgaaacaaatgactattaatgaaaagccctgtagggatcaatattcataactctgatcatactactcatccatcagccgacaaagctacgtgcgatcgctggcggttcagcagtacgtttgaattttattcactgcacactcgagctgacccgcggagtgcactgagaacacgatagtttctgctacgccgccacgtgcacgcggcttgaaaacaagtcaggagggttggcagtctgtgctgggaaatcattcagtacacgctgaccgcccgatcgattacaacgtagatacagatctgtgtgaccacccaataagatctgtagtttctttttatatagctctgtcatataaactttcaaaaaaactgtcagatattattacagaatacactaaatttttcacctaaattcaccgtaaaaaatatactagaattagttaataaaatacaacattttcaattgcgcaacaactccagactaatttcattcgacgtaaaaaatctttttcctagtgtttctcctatagaaacttttgttctagttaaaaatcttttagaccataatacaaatccgatcattgcatttgaaattttacacctacttcacaaacaacagtgcaggacttattatgggtaatcctctaagcccattgctatcagatatatttatgaaccaacttgaaacaacaatttctaaacatcccgtatttaaacagttcttatattggtggagatacgtggatgatatactagtatgctttacaggaactaacagacaacttgaccaatttctatcataattaattcacttcatagtaatattgagtttacaatagaaacagaacagaataagtccataaactttctagatgtaacgattaccagactacacaacaaacatgagttctccgtatatcataaacctacccatactgacacaactatacacaattcatcatcccatcctacacaacacaaattagcagcctaccatagcatgatacatagactgacagaaattcccatgtcaaaaaataacttcgagatagaactaatatcattaaacaaatagcagtaaacaatggctataacgaacaaacaattaacaacattttaaaccaaaaactccataagaaagccctgaaattagtctatccaccaccacagaaagaacccagtaccttctgctctatcacatatactggcaagataacaacaaaaatagccagatacataaaaaagaaaggaataacaccagctttcagaactaacaacaacttaagcaaatatattaagaacaataagagccgaaagagaaaacaactacagagtggtgtttacaaactaacttgtggtgactgtccgaaaacttacatcggtcaaactggcagaacctttgacaaacagatagcagaacacaaaagggctttcaacaatagaaaaacagacacttctacatacgcatttcaccttctagatcataatcattcttttaatgaagagtttcaaattctgcatattcaaaataaaggcctcaagctatctttattagaatctatggaaattaataaattaaaaaatacagatataattctgaatgaccaactcgagacaaacagctccccactcctcaacctgttcagttaaagactttaaaaaggcaaacccatagtaaactaaatcacttgagaaaggcactctgccgaaacaactgtagtcacatagttataataaattttgtggaagtatacataacaaacgttttcagtgttttgattgatattgtgtactatttcattagaaaacgacaattttgacagacaaaccgaatttttccatataatacaatataaaatgcggcagagtaggattcgacggcagacatgacactttgtcaatgtggaaggagtacaggtacgggttagcccaatactgaactcggatagataatacattctatatttgagcaccctaataaactaaagaagaaataataaacgattaagtactaaataaatacataaatacttttcgatttgaaatagacactaaagcactagttgagaggaaggcaaaagatattttgaagtaaagatttggcgggctgcggtctcacgtccacctgcaggtagtgtcccccgttgccgatgtccacggcggagtcccccaggtccggaggcggcggtggcgggaacaacggaggaggataacggtgcgccgccgccggtggtggcggtggaggcaggttggagggatgcaatgcacagaggacgttatgtcacacgcaatcttctaacgacatgagtagcgggttcacgtactcgaacccttcgaattctgattgatcgatcttctcgattactcgtggatcatctggtgtaaggtgtacaggttcatcggtaaattctggtgggaaattggctaaatctctttctgagtccaatcgtggtttatagggagggggtacttgcttctgttccaacatatcccagtcaatacttttgaaaaactgatgacccgtaatctcaatgaaagcttcagggctgtgacatcctagcctgtcagccgggtttttgttcaagaatcctttcagaacgttcgcagctttcacgctaagcgatcgaggtatacgaatagttttctcgagaatcacttggaatagatagtcttcagtgttttggtctggattttcagacgctcccgctatatcgaatggcgagcggccggccaacatctcgtacaacaagacacctaaagcccaccaatcaacggaaaatccatagtcttcgccccttaaaatttcgggagctatgtaattgggcgtaccgcagaacgtggatgtagtatcgcctggcctaataccttctttacacataccataatcagtcaacttgatatgaccctcgtgatccaatagtacgttatctagtttcagatccctatagatgattcccttgcagtggaggaagtttaaggcgagggagatttccgcagcatagaatctcgcatgttcttcgggcaacctcctctgcctctgcatatgaaacatcaaatcaccacccctaacgaactcaataacgaagaacaatctcgaaggcgtttgaaagcacgaatgcaatccgaccagaaacggatgattggaagcagtttcgaaaacgtgtttctcggtttgcacccaatcgatatcctcgtcgtcggtaacaagagccttcttaatcaccttcatggcgtatatgcgttttgtctttttcaattctaccatcaggactttggcgtaggagccgcggccgattacgcggatcagttcgaaatcgttcagggaatattggcgttgagagccgggttctaaatcgtcgacaggcttgttggggtcttctacgggaacagattcgccagtgacatctggcggaggttccggaaaatctttttctcgtatctcccacttggactcggttatcggcgtattattcgcttgcgcttccccattgtggtcttctcgaattactggttcttgatgctcactcgtgcaaggtttatttacagccttgtggcatttcttatgaacgagaagtttacactggatacacttgaaaccttgtctgcctaatccccagattctatcgttacaatacgcgcaaaatgctctcctattgaatcttttagcttggaatatgtgtccattaaccctataaagcttcctccaccgacgtgctcctcttctataaatacttctgtcctcgccctggcagggcattcctggctgcgacggcacattggggaaaactgtggacaaaacaatataaattaggccatttttttcactggacagactatctctgataacttttaacattttttagaccaacatgcaccgaatacacgttccttttatttatttgtgttggaaaatgttattgtgttgtgctgcaagttcga

SEQ ID NO: 1052 - DNA, 2185 bp, Diabrotica virgifera
  SmartBlast Evalue=0; Info=Heat shock protein 68a n=3 Tax= Tenebrionidae RepID=D6WU59_TRICA
ataacgacaacgacaagtaaacaagtgatatcaaagtagtcaagcgaattatttgacaaagtttttgaacgttttgtgaagtaaaagtattattgtgtgaaattacatcaagaaaatggttaaagttccagcaattggtatcgatttaggcaccacgtattcctgcgtgggtgtctggcagcatggaaaagttgaaatcatcgccaacgaccaaggcaacagaacaacacccagctatgttgctttcacagatacagagcgtctcttgggagatgctgcgaagaatcaggtggcgatgaatcccagcaacacagtttttgatgccaaacgtctcattggtagaaagtttgatgatccaaaaatccagcaagacatccaacactggtcatttaaagtaattaaccactgtggcaagccaaagattcaagttgactgtaaaggtgaacgaaaaatatttagtccagaagaaatcagttcgatggttcttatcaaaatgaaagaaactgcagaagcttatttgggaaccagtgttagagatgcagttattacagttccagcctattttaacgattcccaaagacaagccactaaagatgctggtgccatagccggtctcaacgttttgagaatcattaatgaaccaacagctgcagccttggcttatggtcttgacaaaaatctgaagggtgaaaagaatgttctaatattcgacttgggtggaggtacctttgatgtttccattttgacaatcgatgagggctcattgtttgaagtaagatccacagctggtgacactcatcttggtggtgaagacttcgataacaggttagtcaatcattttgctgatgaattcaaaagaaaattcaagaaagatctgaaaaataatccaagagctcttcgacgactaagaacagctgcagaaagagccaagcgtaccttatcatccagttccgaagccactatagaaatagacgctctttttgaaggtatcgacttctatactaaaatcagcagagccagatttgaagaattgtgttcagatctcttcagaggaacactacaacctgttgagaaagcactgaatgatgccaaattagacaaaggacaaatccacgacattgttctggttggtggttctacacgcattcccaaaatccaacaacttcttcaaaattacttcagtggcaaacaattgaatctttccatcaacccagacgaagctgtagcatatggagcagctgtccaagccgcagtattaagtggagaaactgattcgaagatccaagatgtcctactggttgatgtagctccactatcattgggtatagaaactgcaggaggagttatgaataacataatttcaagaaattcaagaattccatgcaaacagacccagtcatttacaacatatgctgacaaccaatcaggtgttaccgttcaagtatttgaaggtgaaagagcaatgacaaaagataacaattgtctgggaacatttgatcttactggcattcctcctgcgcctcgtggagttccaaagattgaagttactttcgacctggatgccaatggtatactcaacgtttccgccaaagatacaagttctggaaatacccgtaacatcaccataaagaatgacaaagggcggctgtcacaacaagaaattgaccgaatgttatcagaagccgaaaaatataaggaagaagacgaacgacagaaacagaaaatagcagcaagaaaccaacttgaaggctacgtcttccaactaaaacaagctgtacaggactgcggagacaaattatcatctgaagacaagtcagcaatcgagagagaatgcgaaagctgtctaaagtggctagatagcaacactttagctgacaaagaagaatacgaagagaaacagaaagaattgacaagagtatgcagtcctatcatgaccaaattgtaccaaggaagtcaaaataacaatcagcagcctaatggtggattgccaggtagctgtggacaagaatatggtggatttggaggaaaccaaaccggacctacaatagaagaagttgattaaaatttctcatttttaatatcattgtcgatattgtatataaaagactgattattgtttacgtttgtaaatagtattgttttgtaaataaattatgtattttgtatattacataaataaaacgtt

SEQ ID NO: 1053 - DNA, 2165 bp, Diabrotica virgifera
  SmartBlast Evalue=0; Info=Heat shock protein 68a n=3 Tax= Tenebrionidae RepID=D6WU59_TRICA
atacaacgacaagagtaaacaagtgatatcaaagtagtcgaacgaattattgaaactaagtttttgaaagttttgtgaagtaaaagtattttgtgtgaaattacatcaagaaaatggttaaagttccagcaattggtattgatttgggcaccacgtattcctgcgtgggggtctggcagcatggaaaagtggaaataatcgccaacgaccaaggcaacagaacaacacccagctatgttgctttcacagatacagagcgtctcttaggagacgctgcgaagaatcaagtggcgatgaatcccagcaatacagtatttgatgccaaacgtctcatcggcagaaagtttgacgatccaaaaatccaacaggacatccaacactggccatttaaagttgtcaacgactgtagcaagccaaagattcaagttgactataaaggtgaacgaaaaacatttgctccagaagaaatcagttcgatggttcttatcaaaatgaaagaaactgcagaagcttatttgggaaccagtgttagagacgcagttattacagttccagcctactttaacgattcccaaagacaagctacaaaagatgcaggtgccatcgctggtctcaacgttttgagaatcattaatgaaccaacagcagcagccttggcttatggtcttgacaaaaatctgaaaggtgaaaagaatgtactcatcttcgacttgggtggaggtacctttgatgtttccattttgacgatcgatgagggctcattgtttgaagtaagatccacagctggtgacactcatcttggtggtgaagacttcgataacaggttagtcaatcatttcgctgatgaattcaagagaaaattcaagaaagatctgaaaaataatccaagagcccttcgacgattaagaacagctgcagaaagagccaagcgtactttatcatccagttccgaagccactatcgaaatagacgctcttttcgagggtatcgacttctataccaaaattagcagagcaaggtttgaagaattgtgttcagatctcttcagaggtacactacaacctgttgagaaagctctgaatgatgccaaattagacaaaggacaaatccacgacattgttctggttggtggttccacacgcattcccaaaatccaacaacttctgcaaaattactttagtggcaaaccactaaatctttccatcaacccagacgaagccgtagcatatggagcagctgtgcaagccgcagtattaagtggagaaaccgattcgaagatccaagatgttctactggttgatgtagctccattatcattgggtatagaaactgcaggaggagttatgagcaacataatttcaagaaattcaagaattccatgcaaacagagtcagacgtttacaacatacgctgacaaccaaccagctgttactattcaagtttttgaaggcgagagagccatgacaaaagataacaatcgtctgggaacatttgatctaactggcattcctcctgcgcctcgtggagttccaaagattgaagttactttcgacctggatgctaatggtatactcaacgtttccgccaaagatacaagttctggaaatacccgcaacatcaccattaagaatgacaaagggcgattgtcacaacaagaaattgacagaatgttatcagaagccgaaaaatataaggaagaagacgaacgccagaaagagaaaatagcagcaagaaaccaacttgaagggtacgtcttccaactgaaacaagctgtacaggactgcggagacaaattatcatctgaagacaagtcagcaatcgagagagaatgcgaaagctgtctaaaatggttagatagcaacactttagctgacaaagcagaatacgaagacaaacaaaaagaattaacaagtgtatgcagtcctatcatgaccaaattgtaccaaggaagtcaaaataacaatcagcctagtggtggaatgccaggtggttgtggacaacaatacggaggttttgctggaagacaaaatggtcccacagtagaagaagttgattaatatttaatattgttcttcatattctttgtaaaaaagactgattaattgtttatatttgtaaatagagttaatttgtaaataaatgatttattttgtatattacaaaaa

SEQ ID NO: 1054 - DNA, 2159 bp, Diabrotica virgifera
  SmartBlast Evalue=0; Info=Heat shock protein 68a n=3 Tax= Tenebrionidae RepID=D6WU59_TRICA
acgacaaataaacaagtgatatcaaagtagtcaagcgaattatttgacaaaagtttttgaaagttttgtgaagtaaaagtattattgtgtgaaattacatcaagaaaatggttaaagttccagcaattggtatcgatttgggcaccacgtattcctgcgtgggtgtctggcaacatggaaaagttgaaatcatcgccaacgaccaaggcaacagaacaacacccagctatgtggctttcacagatacagagcgtctcttaggagacgctgcgaagaatcaagtggcgatgaatcccagcaacacagtttttgatgccaaacgtctcattggcagaaagtttgatgatccaaaaatccaacaagacatccaacactggccatttaaagttatcaacgactgtagcaagccaaagattcaagttgattacaaaggtgaacgaaaaacatttgctccagaagaaatcagttcaatggttcttaccaaaatgaaagaaactgcagaagcttatttgggaaccagtgttagagatgcagttattacagttccagcctactttaacgattcccaaagacaagctacaaaagatgcaggtgccatcgctggtctcaacgttttgagaatcattaatgaaccaacagcagcagccttggcttatggtcttgacaaaaatctgaaaggtgaaaagaatgtactcatcttcgacttgggtggaggtacctttgatgtttccattttgacgatcgatgagggctcattgtttgaagtaagatccacagctggtgacactcatcttggtggtgaagacttcgataacaggttagtcaatcatttcgctgatgaattcaagagaaaattcaagaaagatctgaaaaataatccaagagcccttcgacgattaagaacagctgcagaaagagccaagcgtactttgtcatccagttccgaagccactatagaaatagacgctcttttcgagggtatcgacttctataccaaaattagcagagcaaggtttgaagaattgtgttcagatctattcaggggtacactacaacctgttgagaaagccctgaatgatgccaaattagacaagggacaaatccacgacattgttctggttggtggttctacacgtattcccaaaatccaacaacttctgcaaaattactttagtggtaaagcactaaatctttccatcaacccagacgaagccgtagcatatggagcagctgtccaagccgcagtattaagtggagaaactgattcgaagatccaagatgttctactggttgatgtagctccattatcattgggtatagaaactgcaggaggagttatgaccaacataattacaagaaattcaagaattccatgcaaacagagtcagatgtttacaacatacgctgacaaccaaccagctgttactattcaagtttttgaaggcgagagagccatgacaaaagataacaatcgtctgggaacatttgatctaactggcattcctcctgcacctcgtggagttccaaagattgaagttactttcgacctggatgccaatggtatactcaacgtttcagccaaagatacaagttcaggtaatacccgtaacatcaccataaagaatgacaaagggcggttgtcacaacaagaaattgacagaatgttatcagaagccgaaaaatataaggaagaagacgaacgacagaaagagaaaatagcagcaagaaaccaatttgaagggtacgtcttccaactgaaacaagctgtacaggactgcggagacaaattatcatctgaagacaagtcagcaatcgagagagaatgcgaaagctgtctaaaatggttagatagcaacactttagctgacaaagcagaatacgaagacaaacaaaaagaattaacaagtgtatgcagtcctatcatgaccaaattgtaccaaggaagtcaaaataacaatcagcctagtggtggaatgccaggtggttgtggacaacaatacggaggttttgctggaagacaaaatggtcccacagtagaagaagttgattaatatttaatattgttcttcatattctttgtaaaaaagactgattaattgtttatatttgtaaatagagttaatttgtaaataaatgatttattttgtatattacaaaaa

SEQ ID NO: 1055 - DNA, 2159 bp, Diabrotica virgifera
  SmartBlast Evalue=0; Info=Heat shock protein 68a n=3 Tax= Tenebrionidae RepID=D6WU59_TRICA
acgacaaataaacaagtgatatcaaagtagtcaagcgaattatttgacaaaagtttttgaaagttttgtgaagtaaaagtattattgtgtgaaattacatcaagaaaatggttaaagttccagcaattggtatcgatttgggcaccacgtattcctgcgtgggtgtctggcaacatggaaaagttgaaatcatcgccaacgaccaaggcaacagaacaacacccagctatgtggctttcacagatacagagcgtctcttaggagacgctgcgaagaatcaagtggcgatgaatcccagcaacacagtttttgatgccaaacgtctcattggcagaaagtttgatgatccaaaaatccaacaagacatccaacactggccatttaaagttatcaacgactgtagcaagccaaagattcaagttgattacaaaggtgaacgaaaaacatttgctccagaagaaatcagttcaatggttcttaccaaaatgaaagaaactgcagaagcttatttgggaaccagtgttagagatgcagttattacagttccagcctactttaacgattcccaaagacaagctacaaaagatgcaggtgccatcgctggtctcaacgttttgagaatcattaatgaaccaacagcagcagccttggcttatggtcttgacaaaaatctgaaaggtgaaaagaatgtactcatcttcgacttgggtggaggtacctttgatgtttccattttgacgatcgatgagggctcattgtttgaagtaagatccacagctggtgacactcatcttggtggtgaagacttcgataacaggttagtcaatcatttcgctgatgaattcaagagaaaattcaagaaagatctgaaaaataatccaagagcccttcgacgattaagaacagctgcagaaagagccaagcgtactttatcatccagttccgaagccactatcgaaatagacgctcttttcgagggtatcgacttctataccaaaattagcagagcaaggtttgaagaattgtgttcagatctcttcagaggtacactacaacctgttgagaaagctctgaatgatgccaaattagacaaaggacaaatccacgacattgttctggttggtggttccacacgcattcccaaaatccaacaacttctgcaaaattactttagtggcaaaccactaaatctttccatcaacccagacgaagccgtagcatatggagcagctgtgcaagccgcagtattaagtggagaaaccgattcgaagatccaagatgttctactggttgatgtagctccattatcattgggtatagaaactgcaggaggagttatgagcaacataatttcaagaaattcaagaattccatgcaaacagagtcagacgtttacaacatacgctgacaaccaaccagctgttactattcaagtttttgaaggcgagagagccatgacaaaagataacaatcgtctgggaacatttgatctaactggcattcctcctgcgcctcgtggagttccaaagattgaagttactttcgacctggatgctaatggtatactcaacgtttccgccaaagatacaagttctggaaatacccgcaacatcaccattaagaatgacaaagggcgattgtcacaacaagaaattgacagaatgttatcagaagccgaaaaatataaggaagaagacgaacgccagaaagagaaaatagcagcaagaaaccaacttgaagggtacgtcttccaactgaaacaagctgtacaggactgcggagacaaattatcatctgaagacaagtcagcaatcgagagagaatgcgaaagctgtctaaaatggttagatagcaacactttagctgacaaagcagaatacgaagacaaacaaaaagaattaacaagtgtatgcagtcctatcatgaccaaattgtaccaaggaagtcaaaataacaatcagcctagtggtggaatgccaggtggttgtggacaacaatacggaggttttgctggaagacaaaatggtcccacagtagaagaagttgattaatatttaatattgttcttcatattctttgtaaaaaagactgattaattgtttatatttgtaaatagagttaatttgtaaataaatgatttattttgtatattacaaaaa

SEQ ID NO: 1056 - DNA, 1643 bp, Diabrotica virgifera
  SmartBlast Evalue=0; Info=Heat shock protein 68a n=3 Tax= Tenebrionidae RepID=D6WU59_TRICA
ataacgacaacgacaagtaaacaagtgatatcaaagtagtcaagcgaattatttgacaaagtttttgaacgttttgtgaagtaaaagtattattgtgtgaaattacatcaagaaaatggttaaagttccagcaattggtatcgatttaggcaccacgtattcctgcgtgggtgtctggcagcatggaaaagttgaaatcatcgccaacgaccaaggcaacagaacaacacccagctatgttgctttcacagatacagagcgtctcttgggagatgctgcgaagaatcaggtggcgatgaatcccagcaacacagtttttgatgccaaacgtctcattggtagaaagtttgatgatccaaaaatccagcaagacatccaacactggtcatttaaagtaattaaccactgtggcaagccaaagattcaagttgactgtaaaggtgaacgaaaaatatttagtccagaagaaatcagttcgatggttcttatcaaaatgaaagaaactgcagaagcttatttgggaaccagtgttagagatgcagttattacagttccagcctattttaacgattcccaaagacaagccactaaagatgctggtgccatagccggtctcaacgttttgagaatcattaatgaaccaacagctgcagccttggcttatggtcttgacaaaaatctgaagggtgaaaagaatgttctaatattcgacttgggtggaggtacctttgatgtttccattttgacaatcgatgagggctcattgtttgaagtaagatccacagctggtgacactcatcttggtggtgaagacttcgataacaggttagtcaatcattttgctgatgaattcaaaagaaaattcaagaaagatctgaaaaataatccaagagctcttcgacgactaagaacagctgcagaaagagccaagcgtaccttatcatccagttccgaagccactatagaaatagatgctcttttcgagggtatcgacttctataccaaaattagcagagcaagatttgaagaattatgttcagatctcttcagaggaacattacaacctgttgagaaagctctgaatgatgccaaattagacaaaggacaaatccatgacattgttctggttggtggttctacacgtattcccaaaatccaacagcttctgcaaaattactttagtggcaaaccattgaatctttccatcaatccagacgaagctgtagcatatggagcagctgtccaagccgcagtattaagtggagaaactgattcgaagatccaagatgtcctactggttgatgtagctccattatcactgggaatagaaactgcaggaggagttatgaccaacataattacaagaaattcaagaattccatgcaaacagacccagacatttacaacatacgctgataaccaaccagctgttaccattcaagtatttgaaggtgaaagagctatgacaaaagataacaatcgtctgggaacatttgatctaactggcattcctcctgcacctcgtggagttccaaagattgaagttactttcgacctggatgccaatggtatacttaacgtttccgccaaagatacaagctctggtaatacccgcaacatcaccataaagaatgacaaagggc

SEQ ID NO: 1057 - DNA, 1241 bp, Diabrotica virgifera
  SmartBlast Evalue=0; Info=Heat shock protein 68a n=3 Tax= Tenebrionidae RepID=D6WU59_TRICA
atacaacgacaagagtaaacaagtgatatcaaagtagtcgaacgaattattgaaactaagtttttgaaagttttgtgaagtaaaagtattttgtgtgaaattacatcaagaaaatggttaaagttccagcaattggtattgatttgggcaccacgtattcctgcgtgggggtctggcagcatggaaaagtggaaataatcgccaacgaccaaggcaacagaacaacacccagctatgttgctttcacagatacagagcgtctcttaggagacgctgcgaagaatcaagtggcgatgaatcccagcaatacagtatttgatgccaaacgtctcatcggcagaaagtttgacgatccaaaaatccaacaggacatccaacactggccatttaaagttgtcaacgactgtagcaagccaaagattcaagttgactataaaggtgaacgaaaaacatttgctccagaagaaatcagttcgatggttcttatcaaaatgaaagaaactgcagaagcttatttgggaaccagtgttagagacgcagttattacagttccagcctactttaacgattcccaaagacaagctacaaaagatgcaggtgccatcgctggtctcaacgttttgagaatcattaatgaaccaacagcagcagccttggcttatggtcttgacaaaaatctgaaaggtgaaaagaatgtactcatcttcgacttgggtggaggtacctttgatgtttccattttgacgatcgatgagggctcattgtttgaagtaagatccacagctggtgacactcatcttggtggtgaagacttcgataacaggttagtcaatcatttcgctgatgaattcaagagaaaatacaagaaagatctgaaaaataatccaagagcccttcgacgattaagaacagctgcagaaagagccaagcgtactttatcatccagttctgaagccactgtagaaatagatgctcttttcgagggtattgacttctataccaaaattagcagagcaagatttgaagaattatgttcagatctcttcagaggaacacttcaacctgttgagaaagctctgaatgatgccaaattagataaagggcaaatccacgacattgttttggtaggtggttctacacgtattccaaaaatccaacaacttctgcaaaattacttcagtggcaaaccattaaatctttccatcaacccagacgaagccgtagcatatggagcagccgtc

SEQ ID NO: 1058 - DNA, 1235 bp, Diabrotica virgifera
  SmartBlast Evalue=0; Info=Heat shock protein 68a n=3 Tax= Tenebrionidae RepID=D6WU59_TRICA
acgacaaataaacaagtgatatcaaagtagtcaagcgaattatttgacaaaagtttttgaaagttttgtgaagtaaaagtattattgtgtgaaattacatcaagaaaatggttaaagttccagcaattggtatcgatttgggcaccacgtattcctgcgtgggtgtctggcaacatggaaaagttgaaatcatcgccaacgaccaaggcaacagaacaacacccagctatgtggctttcacagatacagagcgtctcttaggagacgctgcgaagaatcaagtggcgatgaatcccagcaacacagtttttgatgccaaacgtctcattggcagaaagtttgatgatccaaaaatccaacaagacatccaacactggccatttaaagttatcaacgactgtagcaagccaaagattcaagttgattacaaaggtgaacgaaaaacatttgctccagaagaaatcagttcaatggttcttaccaaaatgaaagaaactgcagaagcttatttgggaaccagtgttagagatgcagttattacagttccagcctactttaacgattcccaaagacaagctacaaaagatgcaggtgccatcgctggtctcaacgttttgagaatcattaatgaaccaacagcagcagccttggcttatggtcttgacaaaaatctgaaaggtgaaaagaatgtactcatcttcgacttgggtggaggtacctttgatgtttccattttgacgatcgatgagggctcattgtttgaagtaagatccacagctggtgacactcatcttggtggtgaagacttcgataacaggttagtcaatcatttcgctgatgaattcaagagaaaatacaagaaagatctgaaaaataatccaagagcccttcgacgattaagaacagctgcagaaagagccaagcgtactttatcatccagttctgaagccactgtagaaatagatgctcttttcgagggtattgacttctataccaaaattagcagagcaagatttgaagaattatgttcagatctcttcagaggaacacttcaacctgttgagaaagctctgaatgatgccaaattagataaagggcaaatccacgacattgttttggtaggtggttctacacgtattccaaaaatccaacaacttctgcaaaattacttcagtggcaaaccattaaatctttccatcaacccagacgaagccgtagcatatggagcagccgtc

SEQ ID NO: 1059 - DNA, 2331 bp, Diabrotica virgifera
  SmartBlast Evalue=0; Info=Heat shock protein 68a n=3 Tax= Tenebrionidae RepID=D6WU59_TRICA
ataacgacaacgacaagtaaacaagtgatatcaaagtagtcaagcgaattatttgacaaagtttttgaacgttttgtgaagtaaaagtattattgtgtgaaattacatcaagaaaatggttaaagttccagcaattggtatcgatttaggcaccacgtattcctgcgtgggtgtctggcagcatggaaaagttgaaatcatcgccaacgaccaaggcaacagaacaacacccagctatgttgctttcacagatacagagcgtctcttgggagatgctgcgaagaatcaggtggcgatgaatcccagcaacacagtttttgatgccaaacgtctcattggtagaaagtttgatgatccaaaaatccagcaagacatccaacactggtcatttaaagtaattaaccactgtggcaagccaaagattcaagttgactgtaaaggtgaacaaaaagtattttctccagaagaaatcagttccatggttcttacgaaaatgaaagaaactgcagaagcgtatctgggaaccactgttaaagatgccgttatcacagttccagcctattttaacgattcacaaagacaagccactaaagatgcaggtgccattgctggtctcaacgttttgagaatcattaatgaaccaacagcagcagccttagcttatggtcttgacaaaaatctgaaaggtgaaaagaacgtactcattttcgacttgggtggaggtacctttgatgtttccattttgacaattgatgagggctcattgtttgaagtaagatccacagctggtgacactcatcttggtggtgaagactttgataacaggttagtcaatcattttgctgatgaattcaagagaaaatacaagaaagatctgaaaaataatccaagagcccttcgacgattaagaacagctgcagaaagagccaagcgtactttatcatccagttccgaagccactatagaaatagacgctcttttcgaaggtatcgacttctacactaaaattagcagagcgagatttgaagaattatgttcagatctcttcagaggaacactacaacctgttgagaaagctctgaatgatgccaagttagacaaaggacaaatccacgacattgtcctggttggtggttctacacgtattcccaaaatccaacagcttctgcaaaattacttcagtggcaaaccattgaatctttccatcaacccagacgaagccgtagcatatggagcagctgtccaagccgcagtattaagtggagaaactgattcgaagatccaagatgtcttactagtagatgtagctccattatcattaggcattgaaactgcaggaggaattatgagcaacataatttcaaggaattcaagaattccatgcaaacagactcagacgtttacaacatatgctgacaaccaaccagctgttactattcaagtatttgaaggtgaaagagcaatgacaaaagataacaatcgtctgggaacctttgatttaactggcattcctcctgcgcctcgtggagttccaaaaattgaagttactttcaatctggatgccaatggtatactcaatgttgctgccaaagatacaagttcaggtaatacccgcaacatcaccataaggaatgataaagggcgactgtcacaacaagaaattgacagaatgttatcagaagccgaaaaatataaggaagaagacgaacgacagaaagagaaaatagcagcaagaaaccaacttgaagggtatgtcttccaactgaaacaagctgtacaggactgcggagacaaattatcatctgaagacaagtcagcaatcgagagagaatgcgaaagctgtctaaaatggttagatagcaacactttagctgacaaagcagaatacgaagacaaacaaaaagaattaacaagtgtatgcagtcctatcatgaccaaattgtaccaaggaagtcaaaataacaatcagcctagtggtggaatgccaggtggttgtggacaacaatacggaggttttgctggaagacaaaatggtcccacagtagaagaagtggattaaatttcttatagtcgatcttatgttcatatattgtgatattagatttatttgtgccagactgtattagcatttaatttattttttattattaattatttatatgggaaataagccacaattaaaatgaaaaaaaataattttattaacgtttcgacgcccaaatcgggtgccgttgtcaaaatacaaaatattactaaaataaactaaagtgttgttgctaagcaaaaaaattcttctaatattattttttattgttaattataaataataat

SEQ ID NO: 1060 - DNA, 2329 bp, Diabrotica virgifera
  SmartBlast Evalue=0; Info=Heat shock protein 68a n=3 Tax= Tenebrionidae RepID=D6WU59_TRICA
atacaacgacaagagtaaacaagtgatatcaaagtagtcgaacgaattattgaaactaagtttttgaaagttttgtgaagtaaaagtattttgtgtgaaattacatcaagaaaatggttaaagttccagcaattggtattgatttgggcaccacgtattcctgcgtgggggtctggcagcatggaaaagtggaaataatcgccaacgaccaaggcaacagaacaacacccagctatgttgctttcacagatacagagcgtctcttaggagacgctgcgaagaatcaagtggcgatgaatcccagcaatacagtatttgatgccaaacgtctcatcggcagaaagtttgacgatccaaaaatccaacaggacatccaacactggccatttaaagttgtcaacgactgtagcaagccaaagattcaagttgactataaaggtgaacgaaaaacatttgctccagaagaaatcagttcgatggttcttatcaaaatgaaagaaactgcagaagcttatttgggaaccagtgttagagacgcagttattacagttccagcctactttaacgattcccaaagacaagctacaaaagatgcaggtgccatcgctggtctcaacgttttgagaatcattaatgaaccaacagcagcagccttggcttatggtcttgacaaaaatctgaaaggtgaaaagaatgtactcatcttcgacttgggtggaggtacctttgatgtttccattttgacgatcgatgagggctcattgtttgaagtaagatccacagctggtgacactcatcttggtggtgaagacttcgataacaggttagtcaatcatttcgctgatgaattcaagagaaaattcaagaaagatctgaaaaataatccaagagcccttcgacgattaagaacagctgcagaaagagccaagcgtactttgtcatccagttccgaagccactatagaaatagacgctcttttcgagggtatcgacttctataccaaaattagcagagcaaggtttgaagaattgtgttcagatctattcaggggtacactacaacctgttgagaaagccctgaatgatgccaaattagacaagggacaaatccacgacattgttctggttggtggttctacacgtattcccaaaatccaacaacttctgcaaaattactttagtggtaaagcactaaatctttccatcaacccagacgaagccgtagcatatggagcagctgtccaagccgcagtattaagtggagaaactgattcgaagatccaagatgttctactggttgatgtagctccattatcattgggtatagaaactgcaggaggagttatgaccaacataattacaagaaattcaagaattccatgcaaacagagtcagatgtttacaacatacgctgacaaccaaccagctgttactattcaagtttttgaaggcgagagagccatgacaaaagataacaatcgtctgggaacatttgatctaactggcattcctcctgcacctcgtggagttccaaagattgaagttactttcgacctggatgccaatggtatactcaacgtttcagccaaagatacaagttcaggtaatacccgtaacatcaccataaagaatgacaaagggcggttgtcacaacaagaaattgacagaatgttatcagaagccgaaaaatataaggaagaagacgaacgacagaaagagaaaatagcagcaagaaaccaatttgaagggtacgtcttccaactgaaacaagctgtacaggactgcggagacaaattatcatctgaagacaagtcagcaatcgagagagaatgcgaaagctgtctaaaatggttagatagcaacactttagctgacaaagcagaatacgaagacaaacaaaaagaattaacaagtgtatgcagtcctatcatgaccaaattgtaccaaggaagtcaaaataacaatcagcctagtggtggaatgccaggtggttgtggacaacaatacggaggttttgctggaagacaaaatggtcccacagtagaagaagtggattaaatttcttatagtcgatcttatgttcatatattgtgatattagatttatttgtgccagactgtattagcatttaatttattttttattattaattatttatatgggaaataagccacaattaaaatgaaaaaaaataattttattaacgtttcgacgcccaaatcgggtgccgttgtcaaaatacaaaatattactaaaataaactaaagtgttgttgctaagcaaaaaaattcttctaatattattttttattgttaattataaataataat

SEQ ID NO: 1061 - DNA, 2331 bp, Diabrotica virgifera
  SmartBlast Evalue=0; Info=Heat shock protein 68a n=3 Tax= Tenebrionidae RepID=D6WU59_TRICA
ataacgacaacgacaagtaaacaagtgatatcaaagtagtcaagcgaattatttgacaaagtttttgaacgttttgtgaagtaaaagtattattgtgtgaaattacatcaagaaaatggttaaagttccagcaattggtatcgatttaggcaccacgtattcctgcgtgggtgtctggcagcatggaaaagttgaaatcatcgccaacgaccaaggcaacagaacaacacccagctatgttgctttcacagatacagagcgtctcttgggagatgctgcgaagaatcaggtggcgatgaatcccagcaacacagtttttgatgccaaacgtctcattggtagaaagtttgatgatccaaaaatccagcaagacatccaacactggtcatttaaagtaattaaccactgtggcaagccaaagattcaagttgactgtaaaggtgaacaaaaagtattttctccagaagaaatcagttccatggttcttacgaaaatgaaagaaactgcagaagcgtatctgggaaccactgttaaagatgccgttatcacagttccagcctattttaacgattcacaaagacaagccactaaagatgcaggtgccattgctggtctcaacgttttgagaatcattaatgaaccaacagcagcagccttagcttatggtcttgacaaaaatctgaaaggtgaaaagaacgtactcattttcgacttgggtggaggtacctttgatgtttccattttgacaattgatgagggctcattgtttgaagtaagatccacagctggtgacactcatcttggtggtgaagactttgataacaggttagtcaatcattttgctgatgaattcaagagaaaatacaagaaagatctgaaaaataatccaagagcccttcgacgattaagaacagctgcagaaagagccaagcgtactttatcatccagttccgaagccactatagaaatagacgctcttttcgaaggtatcgacttctacactaaaattagcagagcgagatttgaagaattatgttcagatctcttcagaggaacactacaacctgttgagaaagctctgaatgatgccaagttagacaaaggacaaatccacgacattgtcctggttggtggttctacacgtattcccaaaatccaacagcttctgcaaaattacttcagtggcaaaccattgaatctttccatcaacccagacgaagccgtagcatatggagcagctgtccaagccgcagtattaagtggggaaactgattcaaagatccaagatgtcttactagttgacgtagctccattatcattaggcattgaaactgcaggaggaattatgagcaacataatttcaagaaattcaagaattccatgcaaacagacgcagacgtttacaacatatgccgacaaccaaccagctgttactattcaagtatttgaaggtgaaagagcaatgacaaaagataacaatcgtctgggaacctttgatttaactggcattcctcctgcgcctcgtggagttccaaaaattgaagttactttcaatctggatgccaatggtatactcaatgttgctgccaaggatacaagttcaggtaatacccgcaacatcaccataaggaatgataaagggcgactgtcacaacaagaaattgacagaatgttatctgaagccgaaaaatataaggaagaagacgaacgccagaaagagaaaatagcagcaagaaaccaacttgaagggtatgtcttccaactgaaacaagctgtacaggactgcggagacaaattatcatctgaagacaagtcagcaatcgagagagaatgcgaaagctgtctaaaatggttagatagcaacactttagctgacaaagcagaatacgaagacaaacaaaaagaattaacaagtgtatgcagtcctatcatgaccaaattgtaccaaggaagtcaaaataacaatcagcctagtggtggaatgccaggtggttgtggacaacaatacggaggttttgctggaagacaaaatggtcccacagtagaagaagtggattaaatttcttatagtcgatcttatgttcatatattgtgatattagatttatttgtgccagactgtattagcatttaatttattttttattattaattatttatatgggaaataagccacaattaaaatgaaaaaaaataattttattaacgtttcgacgcccaaatcgggtgccgttgtcaaaatacaaaatattactaaaataaactaaagtgttgttgctaagcaaaaaaattcttctaatattattttttattgttaattataaataataat

SEQ ID NO: 1062 - DNA, 2329 bp, Diabrotica virgifera
  SmartBlast Evalue=0; Info=Heat shock protein 68a n=3 Tax= Tenebrionidae RepID=D6WU59_TRICA
atacaacgacaagagtaaacaagtgatatcaaagtagtcgaacgaattattgaaactaagtttttgaaagttttgtgaagtaaaagtattttgtgtgaaattacatcaagaaaatggttaaagttccagcaattggtattgatttgggcaccacgtattcctgcgtgggggtctggcagcatggaaaagtggaaataatcgccaacgaccaaggcaacagaacaacacccagctatgttgctttcacagatacagagcgtctcttaggagacgctgcgaagaatcaagtggcgatgaatcccagcaatacagtatttgatgccaaacgtctcatcggcagaaagtttgacgatccaaaaatccaacaggacatccaacactggccatttaaagttgtcaacgactgtagcaagccaaagattcaagttgactataaaggtgaacgaaaaacatttgctccagaagaaatcagttcgatggttcttatcaaaatgaaagaaactgcagaagcttatttgggaaccagtgttagagacgcagttattacagttccagcctactttaacgattcccaaagacaagctacaaaagatgcaggtgccatcgctggtctcaacgttttgagaatcattaatgaaccaacagcagcagccttggcttatggtcttgacaaaaatctgaaaggtgaaaagaatgtactcatcttcgacttgggtggaggtacctttgatgtttccattttgacgatcgatgagggctcattgtttgaagtaagatccacagctggtgacactcatcttggtggtgaagacttcgataacaggttagtcaatcatttcgctgatgaattcaagagaaaattcaagaaagatctgaaaaataatccaagagcccttcgacgattaagaacagctgcagaaagagccaagcgtactttatcatccagttccgaagccactatcgaaatagacgctcttttcgagggtatcgacttctataccaaaattagcagagcaaggtttgaagaattgtgttcagatctcttcagaggtacactacaacctgttgagaaagctctgaatgatgccaaattagacaaaggacaaatccacgacattgttctggttggtggttccacacgcattcccaaaatccaacaacttctgcaaaattactttagtggcaaaccactaaatctttccatcaacccagacgaagccgtagcatatggagcagctgtgcaagccgcagtattaagtggagaaaccgattcgaagatccaagatgttctactggttgatgtagctccattatcattgggtatagaaactgcaggaggagttatgagcaacataatttcaagaaattcaagaattccatgcaaacagagtcagacgtttacaacatacgctgacaaccaaccagctgttactattcaagtttttgaaggcgagagagccatgacaaaagataacaatcgtctgggaacatttgatctaactggcattcctcctgcgcctcgtggagttccaaagattgaagttactttcgacctggatgctaatggtatactcaacgtttccgccaaagatacaagttctggaaatacccgcaacatcaccattaagaatgacaaagggcgattgtcacaacaagaaattgacagaatgttatcagaagccgaaaaatataaggaagaagacgaacgccagaaagagaaaatagcagcaagaaaccaacttgaagggtacgtcttccaactgaaacaagctgtacaggactgcggagacaaattatcatctgaagacaagtcagcaatcgagagagaatgcgaaagctgtctaaaatggttagatagcaacactttagctgacaaagcagaatacgaagacaaacaaaaagaattaacaagtgtatgcagtcctatcatgaccaaattgtaccaaggaagtcaaaataacaatcagcctagtggtggaatgccaggtggttgtggacaacaatacggaggttttgctggaagacaaaatggtcccacagtagaagaagtggattaaatttcttatagtcgatcttatgttcatatattgtgatattagatttatttgtgccagactgtattagcatttaatttattttttattattaattatttatatgggaaataagccacaattaaaatgaaaaaaaataattttattaacgtttcgacgcccaaatcgggtgccgttgtcaaaatacaaaatattactaaaataaactaaagtgttgttgctaagcaaaaaaattcttctaatattattttttattgttaattataaataataat

SEQ ID NO: 1063 - DNA, 2323 bp, Diabrotica virgifera
  SmartBlast Evalue=0; Info=Heat shock protein 68a n=3 Tax= Tenebrionidae RepID=D6WU59_TRICA
acgacaaataaacaagtgatatcaaagtagtcaagcgaattatttgacaaaagtttttgaaagttttgtgaagtaaaagtattattgtgtgaaattacatcaagaaaatggttaaagttccagcaattggtatcgatttgggcaccacgtattcctgcgtgggtgtctggcaacatggaaaagttgaaatcatcgccaacgaccaaggcaacagaacaacacccagctatgtggctttcacagatacagagcgtctcttaggagacgctgcgaagaatcaagtggcgatgaatcccagcaacacagtttttgatgccaaacgtctcattggcagaaagtttgatgatccaaaaatccaacaagacatccaacactggccatttaaagttatcaacgactgtagcaagccaaagattcaagttgattacaaaggtgaacgaaaaacatttgctccagaagaaatcagttcaatggttcttaccaaaatgaaagaaactgcagaagcttatttgggaaccagtgttagagatgcagttattacagttccagcctactttaacgattcccaaagacaagctacaaaagatgcaggtgccatcgctggtctcaacgttttgagaatcattaatgaaccaacagcagcagccttggcttatggtcttgacaaaaatctgaaaggtgaaaagaatgtactcatcttcgacttgggtggaggtacctttgatgtttccattttgacgatcgatgagggctcattgtttgaagtaagatccacagctggtgacactcatcttggtggtgaagacttcgataacaggttagtcaatcatttcgctgatgaattcaagagaaaattcaagaaagatctgaaaaataatccaagagcccttcgacgattaagaacagctgcagaaagagccaagcgtactttgtcatccagttccgaagccactatagaaatagacgctcttttcgagggtatcgacttctataccaaaattagcagagcaaggtttgaagaattgtgttcagatctattcaggggtacactacaacctgttgagaaagccctgaatgatgccaaattagacaagggacaaatccacgacattgttctggttggtggttctacacgtattcccaaaatccaacaacttctgcaaaattactttagtggtaaagcactaaatctttccatcaacccagacgaagccgtagcatatggagcagctgtccaagccgcagtattaagtggagaaactgattcgaagatccaagatgttctactggttgatgtagctccattatcattgggtatagaaactgcaggaggagttatgaccaacataattacaagaaattcaagaattccatgcaaacagagtcagatgtttacaacatacgctgacaaccaaccagctgttactattcaagtttttgaaggcgagagagccatgacaaaagataacaatcgtctgggaacatttgatctaactggcattcctcctgcacctcgtggagttccaaagattgaagttactttcgacctggatgccaatggtatactcaacgtttcagccaaagatacaagttcaggtaatacccgtaacatcaccataaagaatgacaaagggcggttgtcacaacaagaaattgacagaatgttatcagaagccgaaaaatataaggaagaagacgaacgacagaaagagaaaatagcagcaagaaaccaatttgaagggtacgtcttccaactgaaacaagctgtacaggactgcggagacaaattatcatctgaagacaagtcagcaatcgagagagaatgcgaaagctgtctaaaatggttagatagcaacactttagctgacaaagcagaatacgaagacaaacaaaaagaattaacaagtgtatgcagtcctatcatgaccaaattgtaccaaggaagtcaaaataacaatcagcctagtggtggaatgccaggtggttgtggacaacaatacggaggttttgctggaagacaaaatggtcccacagtagaagaagtggattaaatttcttatagtcgatcttatgttcatatattgtgatattagatttatttgtgccagactgtattagcatttaatttattttttattattaattatttatatgggaaataagccacaattaaaatgaaaaaaaataattttattaacgtttcgacgcccaaatcgggtgccgttgtcaaaatacaaaatattactaaaataaactaaagtgttgttgctaagcaaaaaaattcttctaatattattttttattgttaattataaataataat

SEQ ID NO: 1064 - DNA, 2323 bp, Diabrotica virgifera
  SmartBlast Evalue=0; Info=Heat shock protein 68a n=3 Tax= Tenebrionidae RepID=D6WU59_TRICA
acgacaaataaacaagtgatatcaaagtagtcaagcgaattatttgacaaaagtttttgaaagttttgtgaagtaaaagtattattgtgtgaaattacatcaagaaaatggttaaagttccagcaattggtatcgatttgggcaccacgtattcctgcgtgggtgtctggcaacatggaaaagttgaaatcatcgccaacgaccaaggcaacagaacaacacccagctatgtggctttcacagatacagagcgtctcttaggagacgctgcgaagaatcaagtggcgatgaatcccagcaacacagtttttgatgccaaacgtctcattggcagaaagtttgatgatccaaaaatccaacaagacatccaacactggccatttaaagttatcaacgactgtagcaagccaaagattcaagttgattacaaaggtgaacgaaaaacatttgctccagaagaaatcagttcaatggttcttaccaaaatgaaagaaactgcagaagcttatttgggaaccagtgttagagatgcagttattacagttccagcctactttaacgattcccaaagacaagctacaaaagatgcaggtgccatcgctggtctcaacgttttgagaatcattaatgaaccaacagcagcagccttggcttatggtcttgacaaaaatctgaaaggtgaaaagaatgtactcatcttcgacttgggtggaggtacctttgatgtttccattttgacgatcgatgagggctcattgtttgaagtaagatccacagctggtgacactcatcttggtggtgaagacttcgataacaggttagtcaatcatttcgctgatgaattcaagagaaaattcaagaaagatctgaaaaataatccaagagcccttcgacgattaagaacagctgcagaaagagccaagcgtactttatcatccagttccgaagccactatcgaaatagacgctcttttcgagggtatcgacttctataccaaaattagcagagcaaggtttgaagaattgtgttcagatctcttcagaggtacactacaacctgttgagaaagctctgaatgatgccaaattagacaaaggacaaatccacgacattgttctggttggtggttccacacgcattcccaaaatccaacaacttctgcaaaattactttagtggcaaaccactaaatctttccatcaacccagacgaagccgtagcatatggagcagctgtgcaagccgcagtattaagtggagaaaccgattcgaagatccaagatgttctactggttgatgtagctccattatcattgggtatagaaactgcaggaggagttatgagcaacataatttcaagaaattcaagaattccatgcaaacagagtcagacgtttacaacatacgctgacaaccaaccagctgttactattcaagtttttgaaggcgagagagccatgacaaaagataacaatcgtctgggaacatttgatctaactggcattcctcctgcgcctcgtggagttccaaagattgaagttactttcgacctggatgctaatggtatactcaacgtttccgccaaagatacaagttctggaaatacccgcaacatcaccattaagaatgacaaagggcgattgtcacaacaagaaattgacagaatgttatcagaagccgaaaaatataaggaagaagacgaacgccagaaagagaaaatagcagcaagaaaccaacttgaagggtacgtcttccaactgaaacaagctgtacaggactgcggagacaaattatcatctgaagacaagtcagcaatcgagagagaatgcgaaagctgtctaaaatggttagatagcaacactttagctgacaaagcagaatacgaagacaaacaaaaagaattaacaagtgtatgcagtcctatcatgaccaaattgtaccaaggaagtcaaaataacaatcagcctagtggtggaatgccaggtggttgtggacaacaatacggaggttttgctggaagacaaaatggtcccacagtagaagaagtggattaaatttcttatagtcgatcttatgttcatatattgtgatattagatttatttgtgccagactgtattagcatttaatttattttttattattaattatttatatgggaaataagccacaattaaaatgaaaaaaaataattttattaacgtttcgacgcccaaatcgggtgccgttgtcaaaatacaaaatattactaaaataaactaaagtgttgttgctaagcaaaaaaattcttctaatattattttttattgttaattataaataataat

SEQ ID NO: 1065 - DNA, 2167 bp, Diabrotica virgifera
  SmartBlast Evalue=0; Info=Heat shock protein 68a n=3 Tax= Tenebrionidae RepID=D6WU59_TRICA
ataacgacaacgacaagtaaacaagtgatatcaaagtagtcaagcgaattatttgacaaagtttttgaacgttttgtgaagtaaaagtattattgtgtgaaattacatcaagaaaatggttaaagttccagcaattggtatcgatttaggcaccacgtattcctgcgtgggtgtctggcagcatggaaaagttgaaatcatcgccaacgaccaaggcaacagaacaacacccagctatgttgctttcacagatacagagcgtctcttgggagatgctgcgaagaatcaggtggcgatgaatcccagcaacacagtttttgatgccaaacgtctcattggtagaaagtttgatgatccaaaaatccagcaagacatccaacactggtcatttaaagtaattaaccactgtggcaagccaaagattcaagttgactgtaaaggtgaacaaaaagtattttctccagaagaaatcagttccatggttcttacgaaaatgaaagaaactgcagaagcgtatctgggaaccactgttaaagatgccgttatcacagttccagcctattttaacgattcacaaagacaagccactaaagatgcaggtgccattgctggtctcaacgttttgagaatcattaatgaaccaacagcagcagccttagcttatggtcttgacaaaaatctgaaaggtgaaaagaacgtactcattttcgacttgggtggaggtacctttgatgtttccattttgacaattgatgagggctcattgtttgaagtaagatccacagctggtgacactcatcttggtggtgaagactttgataacaggttagtcaatcattttgctgatgaattcaagagaaaatacaagaaagatctgaaaaataatccaagagcccttcgacgattaagaacagctgcagaaagagccaagcgtactttatcatccagttccgaagccactatagaaatagacgctcttttcgaaggtatcgacttctacactaaaattagcagagcgagatttgaagaattatgttcagatctcttcagaggaacactacaacctgttgagaaagctctgaatgatgccaagttagacaaaggacaaatccacgacattgtcctggttggtggttctacacgtattcccaaaatccaacagcttctgcaaaattacttcagtggcaaaccattgaatctttccatcaacccagacgaagccgtagcatatggagcagctgtccaagccgcagtattaagtggagaaactgattcgaagatccaagatgtcttactagtagatgtagctccattatcattaggcattgaaactgcaggaggaattatgagcaacataatttcaaggaattcaagaattccatgcaaacagactcagacgtttacaacatatgctgacaaccaaccagctgttactattcaagtatttgaaggtgaaagagcaatgacaaaagataacaatcgtctgggaacctttgatttaactggcattcctcctgcgcctcgtggagttccaaaaattgaagttactttcaatctggatgccaatggtatactcaatgttgctgccaaagatacaagttcaggtaatacccgcaacatcaccataaggaatgataaagggcgactgtcacaacaagaaattgacagaatgttatcagaagccgaaaaatataaggaagaagacgaacgacagaaagagaaaatagcagcaagaaaccaacttgaagggtatgtcttccaactgaaacaagctgtacaggactgcggagacaaattatcatctgaagacaagtcagcaatcgagagagaatgcgaaagctgtctaaaatggttagatagcaacactttagctgacaaagcagaatacgaagacaaacaaaaagaattaacaagtgtatgcagtcctatcatgaccaaattgtaccaaggaagtcaaaataacaatcagcctagtggtggaatgccaggtggttgtggacaacaatacggaggttttgctggaagacaaaatggtcccacagtagaagaagttgattaatatttaatattgttcttcatattctttgtaaaaaagactgattaattgtttatatttgtaaatagagttaatttgtaaataaatgatttattttgtatattacaaaaa

SEQ ID NO: 1066 - DNA, 2165 bp, Diabrotica virgifera
  SmartBlast Evalue=0; Info=Heat shock protein 68a n=3 Tax= Tenebrionidae RepID=D6WU59_TRICA
atacaacgacaagagtaaacaagtgatatcaaagtagtcgaacgaattattgaaactaagtttttgaaagttttgtgaagtaaaagtattttgtgtgaaattacatcaagaaaatggttaaagttccagcaattggtattgatttgggcaccacgtattcctgcgtgggggtctggcagcatggaaaagtggaaataatcgccaacgaccaaggcaacagaacaacacccagctatgttgctttcacagatacagagcgtctcttaggagacgctgcgaagaatcaagtggcgatgaatcccagcaatacagtatttgatgccaaacgtctcatcggcagaaagtttgacgatccaaaaatccaacaggacatccaacactggccatttaaagttgtcaacgactgtagcaagccaaagattcaagttgactataaaggtgaacgaaaaacatttgctccagaagaaatcagttcgatggttcttatcaaaatgaaagaaactgcagaagcttatttgggaaccagtgttagagacgcagttattacagttccagcctactttaacgattcccaaagacaagctacaaaagatgcaggtgccatcgctggtctcaacgttttgagaatcattaatgaaccaacagcagcagccttggcttatggtcttgacaaaaatctgaaaggtgaaaagaatgtactcatcttcgacttgggtggaggtacctttgatgtttccattttgacgatcgatgagggctcattgtttgaagtaagatccacagctggtgacactcatcttggtggtgaagacttcgataacaggttagtcaatcatttcgctgatgaattcaagagaaaattcaagaaagatctgaaaaataatccaagagcccttcgacgattaagaacagctgcagaaagagccaagcgtactttgtcatccagttccgaagccactatagaaatagacgctcttttcgagggtatcgacttctataccaaaattagcagagcaaggtttgaagaattgtgttcagatctattcaggggtacactacaacctgttgagaaagccctgaatgatgccaaattagacaagggacaaatccacgacattgttctggttggtggttctacacgtattcccaaaatccaacaacttctgcaaaattactttagtggtaaagcactaaatctttccatcaacccagacgaagccgtagcatatggagcagctgtccaagccgcagtattaagtggagaaactgattcgaagatccaagatgttctactggttgatgtagctccattatcattgggtatagaaactgcaggaggagttatgaccaacataattacaagaaattcaagaattccatgcaaacagagtcagatgtttacaacatacgctgacaaccaaccagctgttactattcaagtttttgaaggcgagagagccatgacaaaagataacaatcgtctgggaacatttgatctaactggcattcctcctgcacctcgtggagttccaaagattgaagttactttcgacctggatgccaatggtatactcaacgtttcagccaaagatacaagttcaggtaatacccgtaacatcaccataaagaatgacaaagggcggttgtcacaacaagaaattgacagaatgttatcagaagccgaaaaatataaggaagaagacgaacgacagaaagagaaaatagcagcaagaaaccaatttgaagggtacgtcttccaactgaaacaagctgtacaggactgcggagacaaattatcatctgaagacaagtcagcaatcgagagagaatgcgaaagctgtctaaaatggttagatagcaacactttagctgacaaagcagaatacgaagacaaacaaaaagaattaacaagtgtatgcagtcctatcatgaccaaattgtaccaaggaagtcaaaataacaatcagcctagtggtggaatgccaggtggttgtggacaacaatacggaggttttgctggaagacaaaatggtcccacagtagaagaagttgattaatatttaatattgttcttcatattctttgtaaaaaagactgattaattgtttatatttgtaaatagagttaatttgtaaataaatgatttattttgtatattacaaaaa

SEQ ID NO: 1067 - DNA, 2167 bp, Diabrotica virgifera
  SmartBlast Evalue=0; Info=Heat shock protein 68a n=3 Tax= Tenebrionidae RepID=D6WU59_TRICA
ataacgacaacgacaagtaaacaagtgatatcaaagtagtcaagcgaattatttgacaaagtttttgaacgttttgtgaagtaaaagtattattgtgtgaaattacatcaagaaaatggttaaagttccagcaattggtatcgatttaggcaccacgtattcctgcgtgggtgtctggcagcatggaaaagttgaaatcatcgccaacgaccaaggcaacagaacaacacccagctatgttgctttcacagatacagagcgtctcttgggagatgctgcgaagaatcaggtggcgatgaatcccagcaacacagtttttgatgccaaacgtctcattggtagaaagtttgatgatccaaaaatccagcaagacatccaacactggtcatttaaagtaattaaccactgtggcaagccaaagattcaagttgactgtaaaggtgaacaaaaagtattttctccagaagaaatcagttccatggttcttacgaaaatgaaagaaactgcagaagcgtatctgggaaccactgttaaagatgccgttatcacagttccagcctattttaacgattcacaaagacaagccactaaagatgcaggtgccattgctggtctcaacgttttgagaatcattaatgaaccaacagcagcagccttagcttatggtcttgacaaaaatctgaaaggtgaaaagaacgtactcattttcgacttgggtggaggtacctttgatgtttccattttgacaattgatgagggctcattgtttgaagtaagatccacagctggtgacactcatcttggtggtgaagactttgataacaggttagtcaatcattttgctgatgaattcaagagaaaatacaagaaagatctgaaaaataatccaagagcccttcgacgattaagaacagctgcagaaagagccaagcgtactttatcatccagttccgaagccactatagaaatagacgctcttttcgaaggtatcgacttctacactaaaattagcagagcgagatttgaagaattatgttcagatctcttcagaggaacactacaacctgttgagaaagctctgaatgatgccaagttagacaaaggacaaatccacgacattgtcctggttggtggttctacacgtattcccaaaatccaacagcttctgcaaaattacttcagtggcaaaccattgaatctttccatcaacccagacgaagccgtagcatatggagcagctgtccaagccgcagtattaagtggggaaactgattcaaagatccaagatgtcttactagttgacgtagctccattatcattaggcattgaaactgcaggaggaattatgagcaacataatttcaagaaattcaagaattccatgcaaacagacgcagacgtttacaacatatgccgacaaccaaccagctgttactattcaagtatttgaaggtgaaagagcaatgacaaaagataacaatcgtctgggaacctttgatttaactggcattcctcctgcgcctcgtggagttccaaaaattgaagttactttcaatctggatgccaatggtatactcaatgttgctgccaaggatacaagttcaggtaatacccgcaacatcaccataaggaatgataaagggcgactgtcacaacaagaaattgacagaatgttatctgaagccgaaaaatataaggaagaagacgaacgccagaaagagaaaatagcagcaagaaaccaacttgaagggtatgtcttccaactgaaacaagctgtacaggactgcggagacaaattatcatctgaagacaagtcagcaatcgagagagaatgcgaaagctgtctaaaatggttagatagcaacactttagctgacaaagcagaatacgaagacaaacaaaaagaattaacaagtgtatgcagtcctatcatgaccaaattgtaccaaggaagtcaaaataacaatcagcctagtggtggaatgccaggtggttgtggacaacaatacggaggttttgctggaagacaaaatggtcccacagtagaagaagttgattaatatttaatattgttcttcatattctttgtaaaaaagactgattaattgtttatatttgtaaatagagttaatttgtaaataaatgatttattttgtatattacaaaaa

SEQ ID NO: 1068 - DNA, 2054 bp, Diabrotica virgifera
  SmartBlast Evalue=1E-37; Info=Pol protein n=5 Tax=Drosophila melanogaster RepID=Q6J4U7_DROME
cagctactggcctaattttaaatgtttacttctacaaatgcaataagtcaagaagctttctttgagagaatgtacttttcttgtaatccttgtacatttgtattgataaaacaaatttttaactcgtttttcgtgctctaatattatatcacttaatttttacatttacatggtattctttacatccaggccagaacactatttatttatttagcgtatggcttaagtacatcacagaatatatttagatttatgcattatacgatgcatcacaaacagatgtccagtctttttatatattcgattgacccttcggttgccattacaaagtctatagggtcgcctgtgtatgctctgcgtgggcagtcctgaacaatgtgactgatcgtctgtcttgcagcgccgcagtcacaagaaggcgagggaagtttaccccatctgtagagggagtcggcgcatcttccacagtttgttcgaattcgattaagggctgcccaaatcttacgggacgttcaaattcgccaggttttcctatgatgtccggtagactatggtaatgcggatctgtcttactttcccaatcttctctccatcgggtatttaagtcaaagttggattgctgcagcgcttgagcagattgtagagggggtaacctggatcggagacggtttccaagaatatcggggatgtcgttgtggactagaagctggcgactgtccattattttgttatattctttaaccaatgcatgttcgcggcgtaggttgggtggtgctatattactaagggtaggtagccacattgtaggggtgggcttaattgtgcctgttatcatacgcatagtacggtttagttgggtgtcgaccaggtgggtatgcctgctatttagccacactggagcacagtattctgccaccggatatatcaggccaagagcagaggatcttaatgttgatgctgtggacccccatgtagtgccgcagagtttctgtattatattgttgcgtgttttcaattttgctgctgttttcgtcaggtgttctctgaatgtgagcgttctgtctagagtaaccccaaggtatttcgggtatttattgtgtttcaacagcttgttattaaaatacactcgcaattctctgtttgccagcttgttgttgagatgaaaagctgatacttcagtttttgtagtacttggttgtagtctccatttcttaagtattcataatctcacattcgtgagagtgatttctgtagtttctaaagattggtggcttgttgcaagggttgagtcgtcagcatatccaaactttcaagattcggtttcaggcatgtcagcaatatagaggctgaaaagtaaaggggcaaggacagaaccctgtggaagaccattgttaagtttcatctgtctactcgtctcctttcccattataacctggaaggctctgtttgtcagcatgttgtcaatgaggttaattatctttctgcaggggataatacgggccagtttatatattaatccctgtctccaaacagtatcatatgctgctgttagatctataaatactgttgctgtcttttgtttcttttgaaaactagcttctataaaagttgttaatgacagcacttggtccgtacagcttcgatgagggcggaagccagcttgttcaatggggacattttctagtatcctgtgactaattctgttgaggagaagcttttctaatagtttatataccatgctgagtagagctatggggcggtagttttctggcttatcgtttgatttgccggtttcggaattgcaattatctttgttcgcttaagtgagaaaggaatgttacctgactgaagtatatcattaaagaacattgcaagccactgtttcgtgtatgcaccactgtgtatcaagaactctggatggataccatcaaagccaggtgcaatattcttgctgaatattcggagttcgttttgttcatttgttttaatgcccttaagtctctcacgttggtagtatgtgttcgatctcgtggatctcattggagtcttctgga

SEQ ID NO: 1069 - DNA, 2050 bp, Diabrotica virgifera
  SmartBlast Evalue=2E-33; Info=Pol protein n=5 Tax=Drosophila melanogaster RepID=Q6J4U7_DROME
cagctactggcctaattttaaatgtttacttctacaaatgcaataagtcaagaagctttctttgagagaatgtacttttcttgtaatccttgtacatttgtattgataaaacaaatttttaactcgtttttcgtgctctaatattatatcacttaatttttacatttacatggtattctttacatccaggccagaacactatttatttatttagcgtatggcttaagtacatcacagaatatatttagatttatgcattatacgatgcatcacaaacagatgtccagtctttttatatattcgattgacccttcggttgccattacaaagtctatagggtcgcctgtgtatgctctgcgtgggcagtcctgaacaatgtgactgatcgtctgtcttgcagcgccgcagtcacaagaaggcgagggaagtttaccccatctgtagagggagtcggcgcatcttccacagtttgttcgaattcgattaagggctgcccaaatcttacgggacgttcaaattcgccaggttttcctatgatgtccggtagactatggtaatgcggatctgtcttactttcccaatcttctctccatcgggtatttaagtcaaagttggattgctgcagcgcttgagcagattgtagagggggtaacctggatcggagacggtttccaagaatatcggggatgtcgttgtggactagaagctggcgactgtccattattttgttatattctttaaccaatgcatgttcgcggcgtaggttgggtggtgctatattactaagggtaggtagccacattgtaggggtgggcttaattgtgcctgttatcatacgcatagtacggtttagttgggtgtcgaccaggtgggtgtgtctgcgatttagccacactggtgcacagtattctgccaccggatatgtcaggccaagagcagaggatcttaaagttgatgttgaccccatgtagtgccgcagagtttctgtattatattgttgcgtgttttcaattttgctgctgttttcgtcaggtgttctctgaatgtgagcgttctgtctagagtaaccccaaggtatttcggctatttattgtgtttcaacagcttgttattaaaatacactcgcaattctctgtttgccagcttgttgttgagatgaaaagctgatacttcagtttttgtagtacttggttgtagtctccatttcttaagtattcataatctcacattcgtgagagtgatttctgtagtttctaaagattggtggcttgttgcaagggttgagtcgtcagcatatccaaactttcaagattcggtttcaggcatgtcagcaatatagaggctgaaaagtaaaggggcaaggacagaaccctgtggaagaccattgttaagtttcatctgtctactcgtctcctttcccattataacctggaaggctctgtttgtcagcatgttgtcaatgaggttaattatctttctgcaggggataatacgggccagtttatatattaatccctgtctccaaacagtatcatatgctgctgttagatctataaatactgttgctgtcttttgtttcttttgaaaactagcttctataaaagttgttaatgacagcacttggtccgtacagcttcgatgagggcggaagccagcttgttcaatggggacattttctagtatcctgtgactaattctgttgaggagaagcttttctaatagtttatataccatgctgagtagagctatggggcggtagttttctggcttatcgtttgatttgccggtttcggaattgcaattatctttgttcgcttaagtgagaaaggaatgttacctgactgaagtatatcattaaagaacattgcaagccactgtttcgtgtatgcaccactgtgtatcaagaactctggatggataccatcaaagccaggtgcaatattcttgctgaatattcggagttcgttttgttcatttgttttaatgcccttaagtctctcacgttggtagtatgtgttcgatctcgtggatctcattggagtcttctgga

SEQ ID NO: 1070 - DNA, 1471 bp, Diabrotica virgifera
  SmartBlast Evalue=9E-69; Info=Endonuclease-reverse transcriptase n=1 Tax=Bombyx mori RepID=D5LB38_BOMMO
cccccaaaaaaattaaattacacggtaagtactctatgttacacatataaacctgtgtgctctatccctcaatattatattatcttcttcttcttcttgtagttccttctcctatcggaggttggctatcatcacagctatccgtaccttattggtggctgctctgaaaagatctactgagctgcaactataccactctcttaagtttctcaaccaggaaattcttcttctacctatggatcttttaccatttattttaccttgcattatgagccttaatatctcatatttcgcacctctggtaatgtggcctaaatatttcagctttcttgttttgatgttctttatgatctcacaatccttgtgtagcgttcttaacacttctgcatttgtaactcgttggatccatggtattttccaaatccttctatagcaccacatctcaaatgcttccaacgtctttatattatccacttttagtgtccagctttccattccatacaaagtcgagaacacatagcagcttaaggctcttatcctcagctccagaggaaggtctcgattaacaaacattttcgtcatttttataaatacttgtcttgcaatttcaatgcgtgtcctgatttctctaccttgttcgttgttttcatttacctaggttcccagatatttgtagttattcactctttctacttgtttaccgtcgatatccagccttcctactgatgttgcttagaaataatcataaacttggttttcttaacgttcatttgtagtccatattttatactaagttaatgtaatctatttactaaacattgtagtgcttctagactgtctgcaaaactagcggtgtcgtctgcgaatcttatgttcatcaagatttttctgtttattgatataccctgttcttcctcttatattacttcctaagaaatagctttgctgtacatattgaatatccatggggacaacacgtaaccctgtccaacacctctttcgatttctatagtgcctgtttacattataatcagtaagtcctaattccgcatcgcattagttctcatcccatcaacaccttgataataaattattaaagcaggtgaacttacagtcggaaacatgaaggagtgcccatgggcgatcgcatcaatcacttattttgtagtagctatctttttctataacaaacgtttgttatttatgttctgatgtgtgggttaaccgaatcaattaaaaattagtgtaaacaacgaacagtaatatttattttatttttggttaaaaggcgtgcttattcatctcgtaagagggttgtttattgtttgagggcagcgaaggggcgtctgaactgcctgcctgccgtgacgatagtgctgcagagaccacaacactattatcatcatgtttgcggttttacaatatggctagaaaaggcaataaattactacatctggcgttttaaaagctc

SEQ ID NO: 1071 - DNA, 1354 bp, Diabrotica virgifera
  SmartBlast Evalue=6E-57; Info=Endonuclease-reverse transcriptase n=1 Tax=Bombyx mori RepID=D5LB38_BOMMO
cggaggttggctatcatcacagctatccgtaccttattagcagcagctctgaaaagatctactgtgctgcaactataccactcttatgtttctcagccaggaaattcttcttctacctatggatcttttacccttaattttaccttgtattatgagccttaatatctcatatttcgcacctctggtaatgtggcctaaatatttcagctttcttgttttgatgttctttatgatctcacaatccttgtgtagcgttcttaacacttctgcatttgtaactcgttggatccatggtattttccaaatccttctatagcaccacatctcaaatgcttccaacgtctttatattatccacttttagtgtccagctttccattccatacaaagtcgagaacacatagcagcttaaggctcttatcctcagctccagaggaaggtctcgattaacaaacattttcgtcatttttataaatacttgtcttgcaatttcaatgcgtgtcctgatttctctaccttgttcgttgttttcatttacctaggttcccagatatttgtagttattcactctttctacttgtttaccgtcgatatccagccttcctactgatgttgcttagaaataatcataaacttggttttcttaacgttcatttgtagtccatattttatactaagttaatgtaatctatttactaaacattgtagtgcttctagactgtctgcaaaactagcggtgtcgtctgcgaatcttatgttcatcaagatttttctgtttattgatataccctgttcttcctcttatattacttcctaagaaatagctttgctgtacatattgaatatccatggggacaacacgtaaccctgtccaacacctctttcgatttctatagtgcctgtttacattataatcagtaagtcctaattccgcatcgcattagttctcatcccatcaacaccttgataataaattattaaagcaggtgaacttacagtcggaaacatgaaggagtgcccatgggcgatcgcatcaatcacttattttgtagtagctatctttttctataacaaacgtttgttatttatgttctgatgtgtgggttaaccgaatcaattaaaaattagtgtaaacaacgaacagtaatatttattttatttttggttaaaaggcgtgcttattcatctcgtaagagggttgtttattgtttgagggcagcgaaggggcgtctgaactgcctgcctgccgtgacgatagtgctgcagagaccacaacactattatcatcatgtttgcggttttacaatatggctagaaaaggcaataaattactacatctggcgttttaaaagctc

SEQ ID NO: 1072 - DNA, 5629 bp, Diabrotica virgifera
  SmartBlast Evalue=0; Info=Hu li tai shao n=1 Tax=Tribolium castaneum RepID=D6WCE9_TRICA
aaagtgtatactgtaaatgtttatgtttatatacagtgtgtcatttaaagtagaaacatccctgtaacatttgaaatccttaaacatttcaagagtttttttaataccgtgtgtttacttttaaattagatatagataggaatacatccaatacatggcaacactgcttcctcgtttcccacacctgagtcgcgccaattgattcagtcattcgtcgattctacagtagcaatgcaacttattctcataaaaaatgttgccgattttagcgattcctttagtctcctatccctaatcgaaaactaaacgtatggtaaagtaataaaagaggtaattcgggacaacatttaaagggttcatttaaagtaccatatcataatcatcatcatcagcctgttttaaatccagtgcaggacataagcctctcctgtttgtatccagaggccgtgcctctcctgtacggttttgtgtagtatggatccaatttttcgttatctttcatcatcttccaatcgtgtaggtggtcttcctctctttcggttatctgttcttggtatccattcagttaacttgcgtgttcaccttctatctttcatccttgccatgtggccagtccatctccattttagtctgcaagctctctccacaaaatctgtaactctagttttgtttcgtagatcttcatttgtgatcttgtcttttatttttactcctatcattgaacgattcatttttcttgtgctattcttagttttaaagcattctttttgcagacagagtttctggatcataggtcattactggcagaacagactgatcgaagacttttactctttagattaatcggtacattgctgcctttaaatacgtttttaacagctccatatgctgcccatccatgtgctattcttcttgatacatcttatttggttgttcttgcctattctaatttcgtgtccaagacacattcatcaaaaagttctacttttaagatctattcttcttattatttcaatttttagtcatcatcactatctactttgagctaccgtctttaacaagcatgcaaattggccgtatccatccttgagggtcaagttgtcgtcctcttgcatatatcgctagcctaactcaattcagtttgcctctgtctattaacacttctattatcagtccatatatctcttcatcttatcatttccctctacaaatactacttcaaaagtagtataaagtagtattttgttacttcggcttctccaacgagaagctcttttcatttttgttaattttgctacacatgagttttttcttttccttacttctgttggagtttatcattctttttactttcactccaacagaagctttcttttttgttacattggctttttgaatttttactcgtcactgttttcgtgtaactttattaggtttgtggcatttctataaatattgtataccaatctcgaataacggctatcgatgtgactttcatttaatgctgcactatctagttctatcgagtcaaacgctttgtggaaatctgtagacatagtaccagaggttttttgtattttatggatttttcaaataagttgttttatcgtttgcagatggccgtaatacttaggattagtgataaccaaagaaattaagacaaatattgaaatagcacattgaaacttaaaatttctttgttctcgggatataaggttagaactacgccaaaggatgcttcagtgttacgtgttctctacttttctttatagcttggaagcgtggacactaaaacaagtgcacctgaataagttgaccgcctatgaattctattgttacagaagaatcctacgaatatcatggattcaaagaatgtcaaacttggaagtaactagaaggataagaaatgaagcagaaataataggtttgttctagcaaacagtcaaactagtcagaaaccgtcagcaaacagttggccagtgagagaacataatacagtcaccagtgctatcccctctactcgcgctggtcgactattcgctgatggtttcaaactgttttaaactgatgctagaacaaacctattattaactatcgaagaaaacttgtgtacttcgaatatgtgatgagaaggcaaaaatactcatcattagagggcaaaagtacatcttttattaaatattacttccaaaatcattcaaaatcgattaataattgaaaattttactggaatgcttccaatttaaatagatcacacagtacaagactcaaaaatttactaaatgtctctaaaagttgtcattttattgaaaaaatctgaaacggtttctttttctgagtgaaaataacgttatttcaaagcactatgaaaataaaatgaagtatagccttaaaaataatatataataatctatttgcacattctgattattctaatataacaaaacaattgcatagtcaagataaaaagcttaaaaatttacataaataaaaatatcatgtatactggacaaaagcaaacaatccgacatatgggatactaccgaaaccgacaagaatatgtcattattgacatcagtagatgcaactactcagtctattaaattaacatgatttctcattactaaaaaccgaggtagaggctttaggaagaattaattatccaatgcttattgtacataaacatcttgtggcgtttgacagattgatgacatctgtcactgtcgagaagcacgccaaataccctttcccgccaaaaaataatcatcgcacaccatttatccaactaaatctcagctattaatcacaaaagtcagtttcttgagtcgaattgtttatttttatttaacacatatctctatatagaatataatatattaatccactactatgtcgcactttgaaagttaatattaaaaatctttatggttttcctgtacagataaagctaaaatataatttattgtagtatttttttatcgaatttgacaaatgcagtccaatgtcacagatatagtgcaaaaattttagccgcaccagtttttttttactaaactaaaatgaattaattgctggcagtctcgatggaggcgtttgtattattctggcagaggcagttcctatgcttcacggatctttttttctttcttcttcttaaggaacgaaggagttcttaaacctttcttcttctttttgtcttttttgggtgatccttcggatattgaatggtcttctttgctactttgcgacagtgtgctcatatgggcatcggactggtctccgttaactgtattctcacccctataactattcgcagagacacgctcggctttaaggaagttttctatgggggaactttcaacgtcgcttaatacaacttctggttgactaggtttgggaacggtcttcgtttctatccgtaagatttgaggttcgtctctactttcttcctctgtctcactagtaacagaagttggagacctaatttgcatatcttcaattcttttgttcaaagctgctgacgaaagaccttctgattcactgtagtcagtgtcatattcacccttagctttcttttctacgactttcttgtattcgttgagttcttcgtctgtgatgctatcgaaaggattcttggcgtaaggcgatttgtataccatggcgttgtgttggtgccctctctggataatgccctttgaagcagctcccattagcactacatggtcgcctgtttgagttactgtagcgtcctgcatttttttagcttcctcccacgttacaccttccaaaatgtgggattgaggaccggcagaaattttatctgctcgtctgtaatctttgatctgttgttgtttttgtttgaattcctttggattagtacctgttggtacgaactgaagagccgattcaattttaactggtgtgctgctcgaatggctaggtgatccttcggctacccactttgtgattttcttggggtcgggtgttccggtttccaaaatttccactttttgataggtgttgggcgaattcaaccatctgctgcgatcgttgcctttcctaccaccttcaagttttctccagagtccttgtctatataactcctcctcttccaacaaatatccaagggaggaaactgctgggggtacctcaacgtcgttctttggtttcggtggttcgcccttaactaatggatgcctgtagatgtagcctgtcctgaatcctgcgttgtccaacatcctcatcaaagcttcgaattctacaccgcctacacgccactttctttctactttgccctccaaaatagagggttggtccggtcggggagtactttctggtgctttgtgcgctgcgtcgtatatttttttccttacttcatcatttatcaaaactaaattatcaatgcctacaggaagaagtttgagctgtgattcagaggctaaaacggtatttctggcattgaagaaggcttcttcaatggtcgttccacaacataatgctccttggttggtcagtaggaggactttattgttcggtcctaggttccttgcgattttgtccttttcttctggatctagatgaccgcctaagtacatgtgtgtacttacttcacctatgacaacagactcctggctcaaaggcatcagtccttgttttaacgaagatacagctactacggaaggagtgtgaacgtggatgatgcatttgatgtctggtctagcggaatgtactgctgcgtggagtgaatatgcggtaatgttgacggagaagttggttgtgccttgttcgaggaccgcgccctgcatgtctactttaatcagactggaagctgtcacttcgtggaagagcattccgtaagggttgaccaagaattgttcgtcatcctggttcaacctggcagttatgagtgtacttgagccgtaggcccagccgtacaagtcgatcaacctgtagaggcaggccaatttacatctaagaatcttttctcccttgccatatcccatcgactcgattcctctaatgtcgttaacgggaatcacacagctcgaactcttaaaaacgtttccgccttgtctgttgacgcctaccatgtccgaaatttgttggagaagcccgcttggtcctgatccatctttcagctgtgagtctaagatcctttccagttcttctttgaatagtttactgttcattatcatctctactcgtttccttcgttccatttctctcacatcggcgtctatgtctactggtctcattttggccctgtcatcgtcttccaagtcggaaatgccgtttgtttggggcggttgctccgcctgactcgtatccgtcatattatgagatcgtgataatgattaacccaaaataatagccaaccgctacaaatggttctccgggtcttgatccaccaataattcgataggtaaaacttaatcactgatgcttgaggaggatacgcctcatgtggtcgagttatatcacaaataagatttagtcaacaacaacggttagttcccttaggttactttatacaaaaaaaacactcatttacagaaaagggacataaaagtcattcaatccgcgtacccacagaagttttctccatacaccactgtgcactcttcaagcg

SEQ ID NO: 1073 - DNA, 5496 bp, Diabrotica virgifera
  SmartBlast Evalue=0; Info=Hu li tai shao n=1 Tax=Tribolium castaneum RepID=D6WCE9_TRICA
aaaaacatgagtcacctctcaacatccaaacgtactaatattttttacagatgcgccctggtctataagtcattcgtcgattctaccctgtcaatgtaactcattctcagaaacaatgttgccgattttagtgattcctttagtctcctatctctaatcgaaaactaaacgtatggtatcaagtaataaaagaggtaattcgggccaacatttaaagggttcatttaaagtaccatatcatactcatcatcatcagcctgttttaaattcactgcaggacataagcctctcctctttgtatccagaggccgtgcctctcctgtacgattttgtgcagtatggatccaatttttcgatatctttcgcagatcatcttccagtcgtgtaggtgttctcctctctttcggttatttgttcttggtctctattcagttaacttgcgtgttcaccttctatctttcatccttgccatgtggccagtccatctccattttagtctgcaagctctctccacaaaatctgtaactctagttttgtttcgtagatcttcatttgtgatcttgtcttttatttttactcctatcattgaacgattcatttttcttgtgctattcttagttttaaagcattctttttgcagacagagtttctggatcataggtcattactggcagaacagactgatcgaagacttttactctttagattaatcggtacattgctgcctttaaatacgtttttaacagctccatatgctgcccatccatgtgctattcttcttgatacatcttatttggttgttcttgcctattctaatttcgtgtccaagacacattcatcaaaaagttctacttttaagatctattcttcttattatttcaatttttagtcatcatcactatctactttgagctaccgtctttaacaagcatgcaaattggccgtatccatccttgagggtcaagttgtcgtcctcttgcatatatcgctagcctaactcaattcagtttgcctctgtctattaacacttctattatcagtccatatatctcttcatcttatcatttccctctacaaatactacttcaaaagtagtataaagtagtattttgttacttcggcttctccaacgagaagctcttttcatttttgttaattttgctacacatgagttttttcttttccttacttctgttggagtttatcattctttttactttcactccaacagaagctttcttttttgttacattggctttttgaatttttactcgtcactgttttcgtgtaactttattaggtttgtggcatttctataaatattgtataccaatctcgaataacggctatcgatgtgactttcatttaatgctgcactatctagttctatcgagtcaaacgctttgtggaaatctgtagacatagtaccagaggttttttgtattttatggatttttcaaataagttgttttatcgtttgcagatggccgtaatacttaggattagtgataaccaaagaaattaagacaaatattgaaatagcacattgaaacttaaaatttctttgttctcgggatataaggttagaactacgccaaaggatgcttcagtgttacgtgttctctacttttctttatagcttggaagcgtggacactaaaacaagtgcacctgaataagttgaccgcctatgaattctattgttacagaagaatcctacgaatatcatggattcaaagaatgtcaaacttggaagtaactagaaggataagaaatgaagcagaaataataggtttgttctagcaaacagtcaaactagtcagaaaccgtcagcaaacagttggccagtgagagaacataatacagtcaccagtgctatcccctctactcgcgctggtcgactattcgctgatggtttcaaactgttttaaactgatgctagaacaaacctattattaactatcgaagaaaacttgtgtacttcgaatatgtgatgagaaggcaaaaatactcatcattagagggcaaaagtacatcttttattaaatattacttccaaaatcattcaaaatcgattaataattgaaaattttactggaatgcttccaatttaaatagatcacacagtacaagactcaaaaatttactaaatgtctctaaaagttgtcattttattgaaaaaatctgaaacggtttctttttctgagtgaaaataacgttatttcaaagcactatgaaaataaaatgaagtatagccttaaaaataatatataataatctatttgcacattctgattattctaatataacaaaacaattgcatagtcaagataaaaagcttaaaaatttacataaataaaaatatcatgtatactggacaaaagcaaacaatccgacatatgggatactaccgaaaccgacaagaatatgtcattattgacatcagtagatgcaactactcagtctattaaattaacatgatttctcattactaaaaaccgaggtagaggctttaggaagaattaattatccaatgcttattgtacataaacatcttgtggcgtttgacagattgatgacatctgtcactgtcgagaagcacgccaaataccctttcccgccaaaaaataatcatcgcacaccatttatccaactaaatctcagctattaatcacaaaagtcagtttcttgagtcgaattgtttatttttatttaacacatatctctatatagaatataatatattaatccactactatgtcgcactttgaaagttaatattaaaaatctttatggttttcctgtacagataaagctaaaatataatttattgtagtatttttttatcgaatttgacaaatgcagtccaatgtcacagatatagtgcaaaaattttagccgcaccagtttttttttactaaactaaaatgaattaattgctggcagtctcgatggaggcgtttgtattattctggcagaggcagttcctatgcttcacggatctttttttctttcttcttcttaaggaacgaaggagttcttaaacctttcttcttctttttgtcttttttgggtgatccttcggatattgaatggtcttctttgctactttgcgacagtgtgctcatatgggcatcggactggtctccgttaactgtattctcacccctataactattcgcagagacacgctcggctttaaggaagttttctatgggggaactttcaacgtcgcttaatacaacttctggttgactaggtttgggaacggtcttcgtttctatccgtaagatttgaggttcgtctctactttcttcctctgtctcactagtaacagaagttggagacctaatttgcatatcttcaattcttttgttcaaagctgctgacgaaagaccttctgattcactgtagtcagtgtcatattcacccttagctttcttttctacgactttcttgtattcgttgagttcttcgtctgtgatgctatcgaaaggattcttggcgtaaggcgatttgtataccatggcgttgtgttggtgccctctctggataatgccctttgaagcagctcccattagcactacatggtcgcctgtttgagttactgtagcgtcctgcatttttttagcttcctcccacgttacaccttccaaaatgtgggattgaggaccggcagaaattttatctgctcgtctgtaatctttgatctgttgttgtttttgtttgaattcctttggattagtacctgttggtacgaactgaagagccgattcaattttaactggtgtgctgctcgaatggctaggtgatccttcggctacccactttgtgattttcttggggtcgggtgttccggtttccaaaatttccactttttgataggtgttgggcgaattcaaccatctgctgcgatcgttgcctttcctaccaccttcaagttttctccagagtccttgtctatataactcctcctcttccaacaaatatccaagggaggaaactgctgggggtacctcaacgtcgttctttggtttcggtggttcgcccttaactaatggatgcctgtagatgtagcctgtcctgaatcctgcgttgtccaacatcctcatcaaagcttcgaattctacaccgcctacacgccactttctttctactttgccctccaaaatagagggttggtccggtcggggagtactttctggtgctttgtgcgctgcgtcgtatatttttttccttacttcatcatttatcaaaactaaattatcaatgcctacaggaagaagtttgagctgtgattcagaggctaaaacggtatttctggcattgaagaaggcttcttcaatggtcgttccacaacataatgctccttggttggtcagtaggaggactttattgttcggtcctaggttccttgcgattttgtccttttcttctggatctagatgaccgcctaagtacatgtgtgtacttacttcacctatgacaacagactcctggctcaaaggcatcagtccttgttttaacgaagatacagctactacggaaggagtgtgaacgtggatgatgcatttgatgtctggtctagcggaatgtactgctgcgtggagtgaatatgcggtaatgttgacggagaagttggttgtgccttgttcgaggaccgcgccctgcatgtctactttaatcagactggaagctgtcacttcgtggaagagcattccgtaagggttgaccaagaattgttcgtcatcctggttcaacctggcagttatgagtgtacttgagccgtaggcccagccgtacaagtcgatcaacctgtagaggcaggccaatttacatctaagaatcttttctcccttgccatatcccatcgactcgattcctctaatgtcgttaacgggaatcacacagctcgaactcttaaaaacgtttccgccttgtctgttgacgcctaccatgtccgaaatttgttggagaagcccgcttggtcctgatccatctttcagctgtgagtctaagatcctttccagttcttctttgaatagtttactgttcattatcatctctactcgtttccttcgttccatttctctcacatcggcgtctatgtctactggtctcattttggccctgtcatcgtcttccaagtcggaaatgccgtttgtttggggcggttgctccgcctgactcgtatccgtcatattatgagatcgtgataatgattaacccaaaataatagccaaccgctacaaatggttctccgggtcttgatccaccaataattcgataggtaaaacttaatcactgatgcttgaggaggatacgcctcatgtggtcgagttatatcacaaataagatttagtcaacaacaacggttagttcccttaggttactttatacaaaaaaaacactcatttacagaaaagggacataaaagtcattcaatccgcgtacccacagaagttttctccatacaccactgtgcactcttcaagcg

SEQ ID NO: 1074 - DNA, 3479 bp, Diabrotica virgifera
  SmartBlast Evalue=2E-44; Info=Pol-like protein n=1 Tax= Biomphalaria glabrata RepID=A3FMR3_BIOGL
cccccaaaaaaattaaattacacggtaagtactctatgttacacatataaacctgtgtgctctatccctcaatattatattatcttcttcttcttcttgtagttccttctcctatcggaggttggctatcatcacagctatccgtaccttattggtggctgctctgaaaagatctactgagctgcaactataccactctcttaagtttctcaaccaggaaattcttcttctacctatggatcttttccccttaattttgctctgcattatgagccttaatatctcatatttcgcacctctagtaatgtggcccaaattatattatgttcgaaactaaataaatatatatgtaatgacttgcatcagtgatttctactctgtagaacttttaagaccactcattgaatgatataggattgaatgcatcagttgtaacccttctataagacccttcaatcaatttccagttgttggtgataaaatatcataattctctactagcctgatgacttgttatccagcgattatattaagacatggtgcactagcttctggtgcagctttctataagactattgcaggattcacctgttcacatgagagatcttacttacttagtagcgttacaatccttcgtgggttttagctgactctacaacatgcctccactctcctctgtcttgagcaacccccattcaattctccacgcccatagctttcaggtctcctgctatattttctcgctaccggagtcgagggcgtccgtgtgttcttcttccagttgggacttcctcccataccatccctactgttctttggtcagaatgtcttttgaggtgtctagccccattgtatttatttagcgtatggcttaagtacatcacagaatatatttagatttatgcattatacgatgcatcacaaacagatgtccagtctttttatatattcgattgacccttcggttgccattacaaagtctatagggtcgcctgtgtatgctctgcgtgggcagtcctgaacaatgtgactgatcgtctgtcttgcagcgccgcagtcacaagaaggcgagggaagtttaccccatctgtagagggagtcggcgcatcttccacagtttgttcgaattcgattaagggctgcccaaatcttacgggacgttcaaattcgccaggttttcctatgatgtccggtagactatggtaatgcggatctgtcttactttcccaatcttctctccatcgggtatttaagtcaaagttggattgctgcagcgcttgagcagattgtagagggggtaacctggatcggagacggtttccaagaatatcggggatgtcgttgtggactagaagctggcgactgtccattattttgttatattctttaaccaatgcatgttcgcggcgtaggttgggtggtgctatattactaagggtaggtagccacattgtaggggtgggcttaattgtgcctgttatcatacgcatagtacggtttagttgggtgtcgaccaggtgggtatgcctgctatttagccacactggagcacagtattctgccaccggatatatcaggccaagagcagaggatcttaatgttgatgctgtggacccccatgtagtgccgcagagtttctgtattatattgttgcgtgttttcaattttgctgctgttttcgtcaggtgttctctgaatgtgagcgttctgtctagagtaaccccaaggtatttcgggtatttattgtgtttcaacagcttgttattaaaatacactcgcaattctctgtttgccagcttgttgttgagatgaaaagctgatacttcagtttttgtagtacttggttgtagtctccatttcttaagtattcataatctcacattcgtgagagtgatttctgtagtttctaaagattggtggcttgttgcaagggttgagtcgtcagcatatccaaactttcaagattcggtttcaggcatgtcagcaatatagaggctgaaaagtaaaggggcaaggacagaaccctgtggaagaccattgttaagtttcatctgtctactcgtctcctttcccattataacctggaaggctctgtttgtcagcatgttgtcaatgaggttaattatctttctgcaggggataatacgggccagtttatatattaatccctgtctccaaacagtatcatatgctgctgttagatctataaatactgttgctgtcttttgtttcttttgaaaactagcttctataaaagttgttaatgacagcacttggtccgtacagcttcgatgagggcggaagccagcttgttcaatggggacattttctagtatcctgtgactaattctgttgaggagaagcttttctaatagtttatataccatgctgagtagagctatggggcggtagttttctggcttatcgtttgatttgccggtttcggaattgcaattatctttgttcgcttaagtgagaaaggaatgttacctgactgaagtatatcattaaagaacattgcaagccactgtttcgtgtatgcaccactgtgtatcaagaactctggatggataccatcaaagccaggtgctttacctgatttcatttctttcagcgcatgtgtgatttcagaaataagtattcttgctgaatattcggagttcgttctgttcatttgttttaatgcccttaagtctcttttcacgttggtagtatgtgttcgatctcgtggagctctggatagagatactatatgggaggcaaccttgttaggagacattttagactctctggattccagctggttagctcctccaatcttccgcaacaaggaccacgcctgccggcttgattttttgaagtcaaggttttcgacagtctttatccatttttggcgtctagctgtatcgatgttgtgtaaaagctcatcggctatttctcggtcaccactttcgagaaacttcgtgtataagtcttcacatgtttcagtccatccaggcacatattctttgcgataccccctagggatggttttcttggcagtgcttattactgcgcccacaaacctctcataatgtttgctggttggagggacccagctcaagatccggtctagttgttcagagaacttcttccagtttgcttttctaagattccacctgggtcgaggatatgatctaattattggaattgatattccgatggtgataagcaccggacgatgttgagtatgtgggaagtctgcaaggacacttctcgcagttgttagtggtctgtcattggtatcttttgagacaaaacataggtctgggttatattcttttctccatgcagctgatttaaatgttcctctgtctttggcatcaaaaactagatatgtgttttgctcttcggaccattctactagtgcctccccattttcatcattcgtggtgtacttccacatttcgtggtggctgttgaagtcgccgatgtatata

SEQ ID NO: 1075 - DNA, 3475 bp, Diabrotica virgifera
  SmartBlast Evalue=4E-38; Info=Pol-like protein n=1 Tax= Biomphalaria glabrata RepID=A3FMR3_BIOGL
cccccaaaaaaattaaattacacggtaagtactctatgttacacatataaacctgtgtgctctatccctcaatattatattatcttcttcttcttcttgtagttccttctcctatcggaggttggctatcatcacagctatccgtaccttattggtggctgctctgaaaagatctactgagctgcaactataccactctcttaagtttctcaaccaggaaattcttcttctacctatggatcttttccccttaattttgctctgcattatgagccttaatatctcatatttcgcacctctagtaatgtggcccaaattatattatgttcgaaactaaataaatatatatgtaatgacttgcatcagtgatttctactctgtagaacttttaagaccactcattgaatgatataggattgaatgcatcagttgtaacccttctataagacccttcaatcaatttccagttgttggtgataaaatatcataattctctactagcctgatgacttgttatccagcgattatattaagacatggtgcactagcttctggtgcagctttctataagactattgcaggattcacctgttcacatgagagatcttacttacttagtagcgttacaatccttcgtgggttttagctgactctacaacatgcctccactctcctctgtcttgagcaacccccattcaattctccacgcccatagctttcaggtctcctgctatattttctcgctaccggagtcgagggcgtccgtgtgttcttcttccagttgggacttcctcccataccatccctactgttctttggtcagaatgtcttttgaggtgtctagccccattgtatttatttagcgtatggcttaagtacatcacagaatatatttagatttatgcattatacgatgcatcacaaacagatgtccagtctttttatatattcgattgacccttcggttgccattacaaagtctatagggtcgcctgtgtatgctctgcgtgggcagtcctgaacaatgtgactgatcgtctgtcttgcagcgccgcagtcacaagaaggcgagggaagtttaccccatctgtagagggagtcggcgcatcttccacagtttgttcgaattcgattaagggctgcccaaatcttacgggacgttcaaattcgccaggttttcctatgatgtccggtagactatggtaatgcggatctgtcttactttcccaatcttctctccatcgggtatttaagtcaaagttggattgctgcagcgcttgagcagattgtagagggggtaacctggatcggagacggtttccaagaatatcggggatgtcgttgtggactagaagctggcgactgtccattattttgttatattctttaaccaatgcatgttcgcggcgtaggttgggtggtgctatattactaagggtaggtagccacattgtaggggtgggcttaattgtgcctgttatcatacgcatagtacggtttagttgggtgtcgaccaggtgggtgtgtctgcgatttagccacactggtgcacagtattctgccaccggatatgtcaggccaagagcagaggatcttaaagttgatgttgaccccatgtagtgccgcagagtttctgtattatattgttgcgtgttttcaattttgctgctgttttcgtcaggtgttctctgaatgtgagcgttctgtctagagtaaccccaaggtatttcggctatttattgtgtttcaacagcttgttattaaaatacactcgcaattctctgtttgccagcttgttgttgagatgaaaagctgatacttcagtttttgtagtacttggttgtagtctccatttcttaagtattcataatctcacattcgtgagagtgatttctgtagtttctaaagattggtggcttgttgcaagggttgagtcgtcagcatatccaaactttcaagattcggtttcaggcatgtcagcaatatagaggctgaaaagtaaaggggcaaggacagaaccctgtggaagaccattgttaagtttcatctgtctactcgtctcctttcccattataacctggaaggctctgtttgtcagcatgttgtcaatgaggttaattatctttctgcaggggataatacgggccagtttatatattaatccctgtctccaaacagtatcatatgctgctgttagatctataaatactgttgctgtcttttgtttcttttgaaaactagcttctataaaagttgttaatgacagcacttggtccgtacagcttcgatgagggcggaagccagcttgttcaatggggacattttctagtatcctgtgactaattctgttgaggagaagcttttctaatagtttatataccatgctgagtagagctatggggcggtagttttctggcttatcgtttgatttgccggtttcggaattgcaattatctttgttcgcttaagtgagaaaggaatgttacctgactgaagtatatcattaaagaacattgcaagccactgtttcgtgtatgcaccactgtgtatcaagaactctggatggataccatcaaagccaggtgctttacctgatttcatttctttcagcgcatgtgtgatttcagaaataagtattcttgctgaatattcggagttcgttctgttcatttgttttaatgcccttaagtctcttttcacgttggtagtatgtgttcgatctcgtggagctctggatagagatactatatgggaggcaaccttgttaggagacattttagactctctggattccagctggttagctcctccaatcttccgcaacaaggaccacgcctgccggcttgattttttgaagtcaaggttttcgacagtctttatccatttttggcgtctagctgtatcgatgttgtgtaaaagctcatcggctatttctcggtcaccactttcgagaaacttcgtgtataagtcttcacatgtttcagtccatccaggcacatattctttgcgataccccctagggatggttttcttggcagtgcttattactgcgcccacaaacctctcataatgtttgctggttggagggacccagctcaagatccggtctagttgttcagagaacttcttccagtttgcttttctaagattccacctgggtcgaggatatgatctaattattggaattgatattccgatggtgataagcaccggacgatgttgagtatgtgggaagtctgcaaggacacttctcgcagttgttagtggtctgtcattggtatcttttgagacaaaacataggtctgggttatattcttttctccatgcagctgatttaaatgttcctctgtctttggcatcaaaaactagatatgtgttttgctcttcggaccattctactagtgcctccccattttcatcattcgtggtgtacttccacatttcgtggtggctgttgaagtcgccgatgtatata

SEQ ID NO: 1076 - DNA, 2883 bp, Diabrotica virgifera
  SmartBlast Evalue=0; Info=Hu li tai shao n=1 Tax=Tribolium castaneum RepID=D6WCE9_TRICA
gagcttttaaaacgccagatgtagtaatttattgccttttctagccatattgtaaaaccgcaaacatgatgataatagtgttgtggtctctgcagcactatcgtcacggcaggcaggcagttcagacgccccttcgctgccctcaaacaataaacaaccctcttacgagatgaataagcacgccttttaaccaaaaataaaataaatattactgttcgttgtttacactaatttttaattgattcggttaacccacacatcagaacataaataacaaacgtttgttatagaaaaagatagctactacaaaataagtgattgatgcgatcgcccatgggcactccttcatgtttccgactgtaagttcacctgctttaataatttattatcaaggtgttgatgggatgagaactaatgcgatgcggaattaggacttactgattataatgtaaacaggcactatagaaatcgaaagaggtgttggacagggttacgtgttgtccccatggatattcaatatgtacagcaaagctatttcttaggaagtaatataagaggaagaacagggtatatcaataaacagaaaaatcttgatgaacataagattcgcagacgacaccgctagttttgcagacagtctagaagcactacaatgtttagtaaatagattacattaacttagtataaaatatggactacaaatgaacgttaagaaaaccaagtttatgattatttctaagcaacatcagtaggaaggctggatatcgacggtaaacaagtagaaagagtgaataactacaaatatctgggaacctaggtaaatgaaaacaacgaacaaggtagagaaatcaggacacgcattgaaattgcaagacaagtatttataaaaatgacgaaaatgtttgttaatcgagaccttcctctggagctgaggataagagccttaagctgctatgtgttctcgactttgtatggaatggaaagctggacactaaaagtggataatataaagacgttggaaacatttgagatgtggtgctatagaagtgattagtgattagaaacgccctgtattttgctcactttgattaactttaaaagcagtcctaaaagctaagtgggaatgtacctaaaagtttaattatctatctatcttatcaatgacaagtgttactggcgttatttatttattttcgaacttaatgaattctacctttgtgattttcttggggtcgggtgttccggtttccaaaatttccactttttgataggtgttgggcgaattcaaccatctgctgcgatcgttgcctttcctaccaccttcaagttttctccagagtccttgtctatataactcctcctcttccaacaaatatccaagggaggaaactgctgggggtacctcaacgtcgttctttggtttcggtggttcgcccttaactaatggatgcctgtagatgtagcctgtcctgaatcctgcgttgtccaacatcctcatcaaagcttcgaattctacaccgcctacacgccactttctttctactttgccctccaaaatagagggttggtccggtcggggagtactttctggtgctttgtgcgctgcgtcgtatatttttttccttacttcatcatttatcaaaactaaattatcaatgcctacaggaagaagtttgagctgtgattcagaggctaaaacggtatttctggcattgaagaaggcttcttcaatggtcgttccacaacataatgctccttggttggtcagtaggaggactttattgttcggtcctaggttccttgcgattttgtccttttcttctggatctagatgaccgcctaagtacatgtgtgtacttacttcacctatgacaacagactcctggctcaaaggcatcagtccttgttttaacgaagatacagctactacggaaggagtgtgaacgtggatgatgcatttgatgtctggtctagcggaatgtactgctgcgtggagtgaatatgcggtaatgttgacggagaagttggttgtgccttgttcgaggaccgcgccctgcatgtctactttaatcagactggaagctgtcacttcgtggaagagcattccgtaagggttgaccaagaattgttcgtcatcctggttcaacctggcagttatgagtgtacttgagccgtaggcccagccgtacaagtcgatcaacctgtagaggcaggccaatttacatctaagaatcttttctcccttgccatatcccatcgactcgattcctctaatgtcgttaacgggaatcacacagctcgaactcttaaaaacgtttccgccttgtctgttgacgcctaccatgtccgaaatttgttggagaagcccgcttggtcctgatccatctttcagctgtgagtctaagatcctttccagttcttctttgaatagtttactgttcattatcatctctactcgtttccttcgttccatttctctcacatcggcgtctatgtctactggtctcattttggccctgtcatcgtcttccaagtcggaaatgccgtttgtttggggcggttgctccgcctgactcgtatccgtcatattatgagatcgtgataatgattaacccaaaataatagccaaccgctacaaatggttctccgggtcttgatccaccaataattcgataggtaaaacttaatcactgatgcttgaggaggatacgcctcatgtggtcgagttatatcacaaataagatttagtcaacaacaacggttagttcccttaggttactttatacaaaaaaaacactcatttacagaaaagggacataaaagtcattcaatccgcgtacccacagaagttttctccatacaccactgtgcactcttcaagcg

SEQ ID NO: 1077 - DNA, 2830 bp, Diabrotica virgifera
  SmartBlast Evalue=1E-44; Info=Pol-like protein n=1 Tax= Biomphalaria glabrata RepID=A3FMR3_BIOGL
cagctactggcctaattttaaatgtttacttctacaaatgcaataagtcaagaagctttctttgagagaatgtacttttcttgtaatccttgtacatttgtattgataaaacaaatttttaactcgtttttcgtgctctaatattatatcacttaatttttacatttacatggtattctttacatccaggccagaacactatttatttatttagcgtatggcttaagtacatcacagaatatatttagatttatgcattatacgatgcatcacaaacagatgtccagtctttttatatattcgattgacccttcggttgccattacaaagtctatagggtcgcctgtgtatgctctgcgtgggcagtcctgaacaatgtgactgatcgtctgtcttgcagcgccgcagtcacaagaaggcgagggaagtttaccccatctgtagagggagtcggcgcatcttccacagtttgttcgaattcgattaagggctgcccaaatcttacgggacgttcaaattcgccaggttttcctatgatgtccggtagactatggtaatgcggatctgtcttactttcccaatcttctctccatcgggtatttaagtcaaagttggattgctgcagcgcttgagcagattgtagagggggtaacctggatcggagacggtttccaagaatatcggggatgtcgttgtggactagaagctggcgactgtccattattttgttatattctttaaccaatgcatgttcgcggcgtaggttgggtggtgctatattactaagggtaggtagccacattgtaggggtgggcttaattgtgcctgttatcatacgcatagtacggtttagttgggtgtcgaccaggtgggtatgcctgctatttagccacactggagcacagtattctgccaccggatatatcaggccaagagcagaggatcttaatgttgatgctgtggacccccatgtagtgccgcagagtttctgtattatattgttgcgtgttttcaattttgctgctgttttcgtcaggtgttctctgaatgtgagcgttctgtctagagtaaccccaaggtatttcgggtatttattgtgtttcaacagcttgttattaaaatacactcgcaattctctgtttgccagcttgttgttgagatgaaaagctgatacttcagtttttgtagtacttggttgtagtctccatttcttaagtattcataatctcacattcgtgagagtgatttctgtagtttctaaagattggtggcttgttgcaagggttgagtcgtcagcatatccaaactttcaagattcggtttcaggcatgtcagcaatatagaggctgaaaagtaaaggggcaaggacagaaccctgtggaagaccattgttaagtttcatctgtctactcgtctcctttcccattataacctggaaggctctgtttgtcagcatgttgtcaatgaggttaattatctttctgcaggggataatacgggccagtttatatattaatccctgtctccaaacagtatcatatgctgctgttagatctataaatactgttgctgtcttttgtttcttttgaaaactagcttctataaaagttgttaatgacagcacttggtccgtacagcttcgatgagggcggaagccagcttgttcaatggggacattttctagtatcctgtgactaattctgttgaggagaagcttttctaatagtttatataccatgctgagtagagctatggggcggtagttttctggcttatcgtttgatttgccggtttcggaattgcaattatctttgttcgcttaagtgagaaaggaatgttacctgactgaagtatatcattaaagaacattgcaagccactgtttcgtgtatgcaccactgtgtatcaagaactctggatggataccatcaaagccaggtgctttacctgatttcatttctttcagcgcatgtgtgatttcagaaataagtattcttgctgaatattcggagttcgttctgttcatttgttttaatgcccttaagtctcttttcacgttggtagtatgtgttcgatctcgtggagctctggatagagatactatatgggaggcaaccttgttaggagacattttagactctctggattccagctggttagctcctccaatcttccgcaacaaggaccacgcctgccggcttgattttttgaagtcaaggttttcgacagtctttatccatttttggcgtctagctgtatcgatgttgtgtaaaagctcatcggctatttctcggtcaccactttcgagaaacttcgtgtataagtcttcacatgtttcagtccatccaggcacatattctttgcgataccccctagggatggttttcttggcagtgcttattactgcgcccacaaacctctcataatgtttgctggttggagggacccagctcaagatccggtctagttgttcagagaacttcttccagtttgcttttctaagattccacctgggtcgaggatatgatctaattattggaattgatattccgatggtgataagcaccggacgatgttgagtatgtgggaagtctgcaaggacacttctcgcagttgttagtggtctgtcattggtatcttttgagacaaaacataggtctgggttatattcttttctccatgcagctgatttaaatgttcctctgtctttggcatcaaaaactagatatgtgttttgctcttcggaccattctactagtgcctccccattttcatcattcgtggtgtacttccacatttcgtggtggctgttgaagtcgccgatgtatata

SEQ ID NO: 1078 - DNA, 2826 bp, Diabrotica virgifera
  SmartBlast Evalue=3E-38; Info=Pol-like protein n=1 Tax= Biomphalaria glabrata RepID=A3FMR3_BIOGL
cagctactggcctaattttaaatgtttacttctacaaatgcaataagtcaagaagctttctttgagagaatgtacttttcttgtaatccttgtacatttgtattgataaaacaaatttttaactcgtttttcgtgctctaatattatatcacttaatttttacatttacatggtattctttacatccaggccagaacactatttatttatttagcgtatggcttaagtacatcacagaatatatttagatttatgcattatacgatgcatcacaaacagatgtccagtctttttatatattcgattgacccttcggttgccattacaaagtctatagggtcgcctgtgtatgctctgcgtgggcagtcctgaacaatgtgactgatcgtctgtcttgcagcgccgcagtcacaagaaggcgagggaagtttaccccatctgtagagggagtcggcgcatcttccacagtttgttcgaattcgattaagggctgcccaaatcttacgggacgttcaaattcgccaggttttcctatgatgtccggtagactatggtaatgcggatctgtcttactttcccaatcttctctccatcgggtatttaagtcaaagttggattgctgcagcgcttgagcagattgtagagggggtaacctggatcggagacggtttccaagaatatcggggatgtcgttgtggactagaagctggcgactgtccattattttgttatattctttaaccaatgcatgttcgcggcgtaggttgggtggtgctatattactaagggtaggtagccacattgtaggggtgggcttaattgtgcctgttatcatacgcatagtacggtttagttgggtgtcgaccaggtgggtgtgtctgcgatttagccacactggtgcacagtattctgccaccggatatgtcaggccaagagcagaggatcttaaagttgatgttgaccccatgtagtgccgcagagtttctgtattatattgttgcgtgttttcaattttgctgctgttttcgtcaggtgttctctgaatgtgagcgttctgtctagagtaaccccaaggtatttcggctatttattgtgtttcaacagcttgttattaaaatacactcgcaattctctgtttgccagcttgttgttgagatgaaaagctgatacttcagtttttgtagtacttggttgtagtctccatttcttaagtattcataatctcacattcgtgagagtgatttctgtagtttctaaagattggtggcttgttgcaagggttgagtcgtcagcatatccaaactttcaagattcggtttcaggcatgtcagcaatatagaggctgaaaagtaaaggggcaaggacagaaccctgtggaagaccattgttaagtttcatctgtctactcgtctcctttcccattataacctggaaggctctgtttgtcagcatgttgtcaatgaggttaattatctttctgcaggggataatacgggccagtttatatattaatccctgtctccaaacagtatcatatgctgctgttagatctataaatactgttgctgtcttttgtttcttttgaaaactagcttctataaaagttgttaatgacagcacttggtccgtacagcttcgatgagggcggaagccagcttgttcaatggggacattttctagtatcctgtgactaattctgttgaggagaagcttttctaatagtttatataccatgctgagtagagctatggggcggtagttttctggcttatcgtttgatttgccggtttcggaattgcaattatctttgttcgcttaagtgagaaaggaatgttacctgactgaagtatatcattaaagaacattgcaagccactgtttcgtgtatgcaccactgtgtatcaagaactctggatggataccatcaaagccaggtgctttacctgatttcatttctttcagcgcatgtgtgatttcagaaataagtattcttgctgaatattcggagttcgttctgttcatttgttttaatgcccttaagtctcttttcacgttggtagtatgtgttcgatctcgtggagctctggatagagatactatatgggaggcaaccttgttaggagacattttagactctctggattccagctggttagctcctccaatcttccgcaacaaggaccacgcctgccggcttgattttttgaagtcaaggttttcgacagtctttatccatttttggcgtctagctgtatcgatgttgtgtaaaagctcatcggctatttctcggtcaccactttcgagaaacttcgtgtataagtcttcacatgtttcagtccatccaggcacatattctttgcgataccccctagggatggttttcttggcagtgcttattactgcgcccacaaacctctcataatgtttgctggttggagggacccagctcaagatccggtctagttgttcagagaacttcttccagtttgcttttctaagattccacctgggtcgaggatatgatctaattattggaattgatattccgatggtgataagcaccggacgatgttgagtatgtgggaagtctgcaaggacacttctcgcagttgttagtggtctgtcattggtatcttttgagacaaaacataggtctgggttatattcttttctccatgcagctgatttaaatgttcctctgtctttggcatcaaaaactagatatgtgttttgctcttcggaccattctactagtgcctccccattttcatcattcgtggtgtacttccacatttcgtggtggctgttgaagtcgccgatgtatata

SEQ ID NO: 1079 - DNA, 2703 bp, Diabrotica virgifera
  SmartBlast Evalue=2E-37; Info=Pol protein n=5 Tax=Drosophila melanogaster RepID=Q6J4U7_DROME
cccccaaaaaaattaaattacacggtaagtactctatgttacacatataaacctgtgtgctctatccctcaatattatattatcttcttcttcttcttgtagttccttctcctatcggaggttggctatcatcacagctatccgtaccttattggtggctgctctgaaaagatctactgagctgcaactataccactctcttaagtttctcaaccaggaaattcttcttctacctatggatcttttccccttaattttgctctgcattatgagccttaatatctcatatttcgcacctctagtaatgtggcccaaattatattatgttcgaaactaaataaatatatatgtaatgacttgcatcagtgatttctactctgtagaacttttaagaccactcattgaatgatataggattgaatgcatcagttgtaacccttctataagacccttcaatcaatttccagttgttggtgataaaatatcataattctctactagcctgatgacttgttatccagcgattatattaagacatggtgcactagcttctggtgcagctttctataagactattgcaggattcacctgttcacatgagagatcttacttacttagtagcgttacaatccttcgtgggttttagctgactctacaacatgcctccactctcctctgtcttgagcaacccccattcaattctccacgcccatagctttcaggtctcctgctatattttctcgctaccggagtcgagggcgtccgtgtgttcttcttccagttgggacttcctcccataccatccctactgttctttggtcagaatgtcttttgaggtgtctagccccattgtatttatttagcgtatggcttaagtacatcacagaatatatttagatttatgcattatacgatgcatcacaaacagatgtccagtctttttatatattcgattgacccttcggttgccattacaaagtctatagggtcgcctgtgtatgctctgcgtgggcagtcctgaacaatgtgactgatcgtctgtcttgcagcgccgcagtcacaagaaggcgagggaagtttaccccatctgtagagggagtcggcgcatcttccacagtttgttcgaattcgattaagggctgcccaaatcttacgggacgttcaaattcgccaggttttcctatgatgtccggtagactatggtaatgcggatctgtcttactttcccaatcttctctccatcgggtatttaagtcaaagttggattgctgcagcgcttgagcagattgtagagggggtaacctggatcggagacggtttccaagaatatcggggatgtcgttgtggactagaagctggcgactgtccattattttgttatattctttaaccaatgcatgttcgcggcgtaggttgggtggtgctatattactaagggtaggtagccacattgtaggggtgggcttaattgtgcctgttatcatacgcatagtacggtttagttgggtgtcgaccaggtgggtatgcctgctatttagccacactggagcacagtattctgccaccggatatatcaggccaagagcagaggatcttaatgttgatgctgtggacccccatgtagtgccgcagagtttctgtattatattgttgcgtgttttcaattttgctgctgttttcgtcaggtgttctctgaatgtgagcgttctgtctagagtaaccccaaggtatttcgggtatttattgtgtttcaacagcttgttattaaaatacactcgcaattctctgtttgccagcttgttgttgagatgaaaagctgatacttcagtttttgtagtacttggttgtagtctccatttcttaagtattcataatctcacattcgtgagagtgatttctgtagtttctaaagattggtggcttgttgcaagggttgagtcgtcagcatatccaaactttcaagattcggtttcaggcatgtcagcaatatagaggctgaaaagtaaaggggcaaggacagaaccctgtggaagaccattgttaagtttcatctgtctactcgtctcctttcccattataacctggaaggctctgtttgtcagcatgttgtcaatgaggttaattatctttctgcaggggataatacgggccagtttatatattaatccctgtctccaaacagtatcatatgctgctgttagatctataaatactgttgctgtcttttgtttcttttgaaaactagcttctataaaagttgttaatgacagcacttggtccgtacagcttcgatgagggcggaagccagcttgttcaatggggacattttctagtatcctgtgactaattctgttgaggagaagcttttctaatagtttatataccatgctgagtagagctatggggcggtagttttctggcttatcgtttgatttgccggtttcggaattgcaattatctttgttcgcttaagtgagaaaggaatgttacctgactgaagtatatcattaaagaacattgcaagccactgtttcgtgtatgcaccactgtgtatcaagaactctggatggataccatcaaagccaggtgcaatattcttgctgaatattcggagttcgttttgttcatttgttttaatgcccttaagtctctcacgttggtagtatgtgttcgatctcgtggatctcattggagtcttctgga

SEQ ID NO: 1080 - DNA, 2699 bp, Diabrotica virgifera
  SmartBlast Evalue=2E-33; Info=Pol protein n=5 Tax=Drosophila melanogaster RepID=Q6J4U7_DROME
cccccaaaaaaattaaattacacggtaagtactctatgttacacatataaacctgtgtgctctatccctcaatattatattatcttcttcttcttcttgtagttccttctcctatcggaggttggctatcatcacagctatccgtaccttattggtggctgctctgaaaagatctactgagctgcaactataccactctcttaagtttctcaaccaggaaattcttcttctacctatggatcttttccccttaattttgctctgcattatgagccttaatatctcatatttcgcacctctagtaatgtggcccaaattatattatgttcgaaactaaataaatatatatgtaatgacttgcatcagtgatttctactctgtagaacttttaagaccactcattgaatgatataggattgaatgcatcagttgtaacccttctataagacccttcaatcaatttccagttgttggtgataaaatatcataattctctactagcctgatgacttgttatccagcgattatattaagacatggtgcactagcttctggtgcagctttctataagactattgcaggattcacctgttcacatgagagatcttacttacttagtagcgttacaatccttcgtgggttttagctgactctacaacatgcctccactctcctctgtcttgagcaacccccattcaattctccacgcccatagctttcaggtctcctgctatattttctcgctaccggagtcgagggcgtccgtgtgttcttcttccagttgggacttcctcccataccatccctactgttctttggtcagaatgtcttttgaggtgtctagccccattgtatttatttagcgtatggcttaagtacatcacagaatatatttagatttatgcattatacgatgcatcacaaacagatgtccagtctttttatatattcgattgacccttcggttgccattacaaagtctatagggtcgcctgtgtatgctctgcgtgggcagtcctgaacaatgtgactgatcgtctgtcttgcagcgccgcagtcacaagaaggcgagggaagtttaccccatctgtagagggagtcggcgcatcttccacagtttgttcgaattcgattaagggctgcccaaatcttacgggacgttcaaattcgccaggttttcctatgatgtccggtagactatggtaatgcggatctgtcttactttcccaatcttctctccatcgggtatttaagtcaaagttggattgctgcagcgcttgagcagattgtagagggggtaacctggatcggagacggtttccaagaatatcggggatgtcgttgtggactagaagctggcgactgtccattattttgttatattctttaaccaatgcatgttcgcggcgtaggttgggtggtgctatattactaagggtaggtagccacattgtaggggtgggcttaattgtgcctgttatcatacgcatagtacggtttagttgggtgtcgaccaggtgggtgtgtctgcgatttagccacactggtgcacagtattctgccaccggatatgtcaggccaagagcagaggatcttaaagttgatgttgaccccatgtagtgccgcagagtttctgtattatattgttgcgtgttttcaattttgctgctgttttcgtcaggtgttctctgaatgtgagcgttctgtctagagtaaccccaaggtatttcggctatttattgtgtttcaacagcttgttattaaaatacactcgcaattctctgtttgccagcttgttgttgagatgaaaagctgatacttcagtttttgtagtacttggttgtagtctccatttcttaagtattcataatctcacattcgtgagagtgatttctgtagtttctaaagattggtggcttgttgcaagggttgagtcgtcagcatatccaaactttcaagattcggtttcaggcatgtcagcaatatagaggctgaaaagtaaaggggcaaggacagaaccctgtggaagaccattgttaagtttcatctgtctactcgtctcctttcccattataacctggaaggctctgtttgtcagcatgttgtcaatgaggttaattatctttctgcaggggataatacgggccagtttatatattaatccctgtctccaaacagtatcatatgctgctgttagatctataaatactgttgctgtcttttgtttcttttgaaaactagcttctataaaagttgttaatgacagcacttggtccgtacagcttcgatgagggcggaagccagcttgttcaatggggacattttctagtatcctgtgactaattctgttgaggagaagcttttctaatagtttatataccatgctgagtagagctatggggcggtagttttctggcttatcgtttgatttgccggtttcggaattgcaattatctttgttcgcttaagtgagaaaggaatgttacctgactgaagtatatcattaaagaacattgcaagccactgtttcgtgtatgcaccactgtgtatcaagaactctggatggataccatcaaagccaggtgcaatattcttgctgaatattcggagttcgttttgttcatttgttttaatgcccttaagtctctcacgttggtagtatgtgttcgatctcgtggatctcattggagtcttctgga

SEQ ID NO: 1081 - DNA, 1455 bp, Diabrotica virgifera
atatatcatatgtatctgaattgccgatataaatgagtcaaattaaataaattattagaagaattattttactaagcaacaacattgttgtttatgttagtagtatcttgtattttgacatcgaaacgttaataaaaatacttattttgtgacgaattcggtgaatttcttttctttgaatgatattttgtagcgactggcaacaaagtctatatttatttgtgggaattccccttttatgactaacaatcagcacaacgtttttcggcactttagaacgttgctattctttttttttcctcatcgacacatcgttgggaagttctgatagcagctacaggcaaaagaaggattcaagacacgcggtggagtgcaagaggcgatgccgtaaatgtgacatcattacaaagacattctcgtcactttggactttggaaatactgacagaggcaggtgaaagcttaaacattaggacagatgcaggtgctttactagtttcgatgcagtcattttcctttctttgttttttgggcctagggcagccggtgcaacatgaagtgaatgatgcacaaaaatatttacaaacaaggggacttgacataagattgtgcgctcagtaaaatgctttgcagatgctattgacagagaaaagataggaattggcaaatagtgatgtttgttatgcaaaaatatgtatgaagaacttggaatttccataaaacctcggaggcgcataacaggaaagcatatttttgatgacggaactagagatgctaacttgtcttgtgaaaatgagttgagaagaaagctgtcttcttcgttagatatagttattgtagaaattcctgagcgttttcaacagctacagaatttaactgataagttaaaaaaaatttatctaactaaatttatctaacgtcggctatattattagatccagacaacactgaatgtagaaatgtagactacgcatctgacgaaattgacgagcagggtttcaagctataaaaacttcgactgcggactttcgttgctgctacaacagtcaacgaaatttactaatgcagattcacttgaattatttaaatttattgttaaatccaagctggaagatactatgtccaatattttaataatattccaaatatttttcacagtaagcaatgccagctgtgagaggagtttttcaaaattgaagttgattaaatagttatttatgatataagtgttaaaagtacacgtttaaggcacgcatgtgaaagtttgcagaatgagcgaagcgagttctgcaattcacatgagtgccttaaaaatgtactttttaacacgcatatcatacaatattttttctacaaacgtaattacaggacaatatctacaaaaacttttacttgaacttgactgacattccatttttatatttttttgacattacatcaaaattgcatatacggt

SEQ ID NO: 1082 - DNA, 838 bp, Diabrotica virgifera
  SmartBlast Evalue=7E-35; Info=Glutamate [NMDA] receptor- associated protein 1 n=1 Tax=Harpegnathos saltator RepID=E2B6P5_ 9HYME
attgatagcttacactaacttatatataactgatacaaatcctcaatattatctcgcagcacgcccaacaatgagtaagatatacaaaaaaatgttaataatatcgaggtacagattaagcgcagcaaaaatgtactcttcgggagaaagactgatcttcccaactcctccaattatcagttgcgtaccaattaccaagtatattgaaaagacaacaacaataaacgctgctatcagtaaccagagtttgtcattttgatagaagatggcggtgatgccgaaactgataatcaccagagatagagccatgagaattccagataaaacactaaaatctattctagattggaaggcaaacacagctatggccactacatcgatgtcataatatgaagaaattgtacccaagaggaagctttcagctattgtaaatataaataagaatataagattggccgggtactgccttcttaggttcccacaacatgctaaagcaataatcgtaactggaataagtaccaatgcaatcagtataagcagtggcgtagcgtagtgggggcggcaggggcggcccgccccgggcggcaaaatttaacaataaatattagaaatgttttgtaaatatttgaattagtttatatttttatcgcaactacaaattcggactgattgaaaggagcacggaatttttcattagatacttattttttaatgttgttctgaagctattttcttgtggcatttttacaaagtaaaattcttctactttaaaatatatcatatgtatctgaattgccgatataaatgagtcaaattaaataaattattagaagaatta

SEQ ID NO: 1083 - DNA, 302 bp, Diabrotica virgifera
caatgaattctgttttacttactgttgattgtacaatagatttttattgagagcacacgttctttttcatgtaattgccttaatagttatttattatataagtgttcaaagtacacgtttaaggcacgcttgtgaaagtttcacatgagtgccttaaaaatgtactttttaacacgcatatcatacaatattttttctacaaacgtaattacaggacaatatctacaaaaacttttacttgaacttgactgacattccatttttatatttttttgacattacatcaaaattgcatatacggt

SEQ ID NO: 1084 - DNA, 3384 bp, Diabrotica virgifera
  SmartBlast Evalue=1E-56; Info=Nmda receptor glutamate-binding chain (Fragment) n=1 Tax=Aedes aegypti RepID=Q16QI8_AEDAE
atatatcatatgtatctgaattgccgatataaatgagtcaaattaaataaattattagaagaattattttactaagcaacaacattgttgtttatgttagtagtatcttgtattttgacatcgaaacgttaataaaaatacttattttgtgacgaattcggtgaatttcttttctttgaatgatattttgtagcgactggcaacaaagtctatatttatttgtgggaattccccttttatgactaacaatcagcacaacgtttttcggcactttagaacgttgctattctttttttttcctcatcgacacatcgttgggaagttctgatagcagctacaggcaaaagaaggattcaagacacgcggtggagtgcaagaggcgatgccgtaaatgtgacatcattacaaagacattctcgtcactttggactttggaaatactgacagaggcaggtgaaagcttaaacattaggacagatgcaggtgctttactagtttcgatgcagtcattttcctttctttgttttttgggcctagggcagccggtgcaacatgaagtgaatgatgcacaaaaatatttacaaacaaggggacttgacataagattgtgcgctcagtaaaatgctttgcagatgctattgacagagaaaagataggaattggcaaatagtgatgtttgttatgcaaaaatatgtatgaagaacttggaatttccataaaacctcggaggcgcataacaggaaagcatatttttgatgacggaactagagatgctaacttgtcttgtgaaaatgagttgagaagaaagctgtcttcttcgttagatatagttattgtagaaattcctgagcgttttcaacagctacagaatttaactgataagttaaaaaaaatttatctaactaaatttatctaacgtcggctatattattagatccagacaacactgaatgtagaaatgtagactacgcatctgacgaaattgacgagcagggtttcaagctataaaaacttcgactgcggactttcgttgctgctacaacagtcaacgaaatttactaatgcagattcacttgaattatttaaatttattgttaaatccaagctggaagatactatgtccaatattttaataatattccaaatatttttcacagtaagcaatgccagctgtgagaggagtttttcaaaattgaagttgattaaatagttatttatgatataagtgttaaaagtacacgtttaaggcacgcatgtgaaagtttgcagaatgagcgaagcgagttctgcaattcacatgagtgccttaaaaatgtactttttaacacgcatatcatacaatattttttctacaaacgtaattacaggacaatatctacaaaaacttttacttgacattccatttttatattttttgacattacatcaaaattgcctatacggtcaatacgaactgcagtgccataaaatttttaaagcactagtgccttaaagttgcatttttaacgctcgtatggagtgctaaaaattgcatttttaacacggttgtagaaaaaattatttaagatcgacaatgaatactctaagactaactaatttggctattttgtttattgagcaagaggtgtgtgatgcgatagacattgacggtgcaataaaagactttgctcttaaaaaagtagacgtataaatttttaattgaagacggaattttgtttttaattctaacaaatatgtactcatatgtatcgttctagttctaatcaaaaattgattttattttttaatattgtcgattgtcaaggtgtacctacctacctaatcttaagtgataggtaatacctaagttatatcaatgtatctaattggttaaagtaaaagaatttttgtataaataaacgtgattgtaaaacttagataaacttttttatttaaaatccaacctgtgtaatgcaaaataatgatgactgttttcgccgaaaagttctctataattaatgtatagagtacataataaattaaaatacccaaataagagggcggcaaaattgtcttccgccccgggcggctgacactcacgctacgccactgagtataagtaaagaattgcatgaaacgaataatttggttttcaaccggacggtgctcctctgcattatactttacttcttgttaattaatatttagaccaaaattttccactgtattggattgagaggacaggcagcatcgaatggactcctggatcaccagatttgtttcttctggattttttgttgggacacctaaaaagtaaaatctgtagaacaccacccgtatccttagaagataaacgtcaactaattgtaaacgaatgcctacgaatcattacgaaaatgcttcagaatatggaagaacgtttcaaacaaacttttatcattgtatggacgccggaggtcttgaatctaaccagtttttattactaggaaaactaaataaaaacattgtcttatctaaattttcttgatagcttacagtaacttatatctaactgatacaaaaccttaatattatcgcgcagcacgaccaacaatgagtaagatatacaaaaaaatgttaataatatccaggtataggttaagtgcagcaaagatgtactcttcaggagagagactaatcttcccagctcctccaattatcagttgcgtatcaactaccaagtatattgaaaagaaaataacaatgaacgctgctatcagtaaccggaatttgtcattttgatagaagatggcggtgatgccgaaactgagaatcaccagagatagagccacgagaattccagagcaaacactaaaatctattctagattgaaaggcaaacacagtaagtccaaggcatatgatgacggttgcacctgcagctatggccactacatcgatgtcataatatgaagaaattgtacccaagaggaagctttcagctattgtaaatataaataagaatataagattggccgggtactgtctcctcagttgtccacaacatgccaaagcaatgatcgtaactagaatcagtaccaaagcaatcaatagaagtacaggatggcgttgaacatacagtttggttggttcgtggaatataaaccagctgatgactccagttgttattgctacttggagtgaaagtatggcataaacctttcgaatgaatcctcttcgtattgaagtgtcattgaattcaaaaccttttactgtctgtgcttcaatgtcgtgactatcctgtttagtttccatttttacactgtaatatggcctttatcaacaacttatagtctatatcacataaaatattttagcaaacgtataaaaatcattggcagtccgatatagtacttgcaaatttctc

SEQ ID NO: 1085 - DNA, 3378 bp, Diabrotica virgifera
  SmartBlast Evalue=1E-56; Info=Nmda receptor glutamate-binding chain (Fragment) n=1 Tax=Aedes aegypti RepID=Q16QI8_AEDAE
atatatcatatgtatctgaattgccgatataaatgagtcaaattaaataaattattagaagaattattttactaagcaacaacattgttgtttatgttagtagtatcttgtattttgacatcgaaacgttaataaaaatacttattttgtgacgaattcggtgaatttcttttctttgaatgatattttgtagcgactggcaacaaagtctatatttatttgtgggaattccccttttatgactaacaatcagcacaacgtttttcggcactttagaacgttgctattctttttttttcctcatcgacacatcgttgggaagttctgatagcagctacaggcaaaagaaggattcaagacacgcggtggagtgcaagaggcgatgccgtaaatgtgacatcattacaaagacattctcgtcactttggactttggaaatactgacagaggcaggtgaaagcttaaacattaggacagatgcaggtgctttactagtttcgatgcagtcattttcctttctttgttttttgggcctagggcagccggtgcaacatgaagtgaatgatgcacaaaaatatttacaaacaaggggacttgacataagattgtgcgctcagtaaaatgctttgcagatgctattgacagagaaaagataggaattggcaaatagtgatgtttgttatgcaaaaatatgtatgaagaacttggaatttccataaaacctcggaggcgcataacaggaaagcatatttttgatgacggaactagagatgctaacttgtcttgtgaaaatgagttgagaagaaagctgtcttcttcgttagatatagttattgtagaaattcctgagcgttttcaacagctacagaatttaactgataagttaaaaaaaatttatctaactaaatttatctaacgtcggctatattattagatccagacaacactgaatgtagaaatgtagactacgcatctgacgaaattgacgagcagggtttcaagctataaaaacttcgactgcggactttcgttgctgctacaacagtcaacgaaatttactaatgcagattcacttgaattatttaaatttattgttaaatccaagctggaagatactatgtccaatattttaataatattccaaatatttttcacagtaagcaatgccagctgtgagaggagtttttcaaaattgaagttgattaaatagttatttatgatataagtgttaaaagtacacgtttaaggcacgcatgtgaaagtttgcagaatgagcgaagcgagttctgcaattcacatgagtgccttaaaaatgtactttttaacacgcatatcatacaatattttttctacaaacgtaattacaggacaatatctacaaaaacttttacttgacattccatttttatattttttgacattacatcaaaattgcctatacggtcaatacgaactgcagtgccataaaatttttaaagcactagtgccttaaagttgcatttttaacgctcgtatggagtgctaaaaattgcatttttaacacggttgtagaaaaaattatttaagatcgacaatgaatactctaagactaactaatttggctattttgtttattgagcaagaggtgtgtgatgcgatagacattgacggtgcaataaaagactttgctcttaaaaaagtagacgtataaatttttaattgaagacggaattttgtttttaattctaacaaatatgtactcatatgtatcgttctagttctaatcaaaaattgattttattttttaatattgtcgattgtcaaggtgtacctacctacctaatcttaagtgataggtaatacctaagttatatcaatgtatctaattggttaaagtaaaagaatttttgtataaataaacgtgattgtaaaacttagataaacttttttatttaaaatccaacctgtgtaatgcaaaataatgatgactgttttcgccgaaaagttctctataattaatgtatagagtacataataaattaaaatacccaaataagagggcggcaaaattgtcttccgccccgggcggctgacactcacgctacgccactgagtataagtaaagaattgcatgaaacgaataatttggttttcaaccggacggtgctcctctgcattatactttacttcttgttaattaatatttagaccaaaattttccactgtattggattgagaggacaggcagcatcgaatggactcctggatcaccagatttgtttcttctggattttttgttgggacacctaaaaagtaaaatctgtagaacaccacccgtatccttagaagataaacgtcaactaattgtaaacgaatgcctacgaatcattacgaaaatgcttcagaatatggaagaacgtttcaaacaaacttttatcattgtatggacgccggaggtcttgaatctaaccagtttttattactaggaaaactaaataaaaacattgtcttatctaaattttcttgatagcttacagtaacttatatctaactgatacaaaaccttaatattatcgcgcagcacgaccaacaatgagtaagatatacaaaaaaatgttaataatatccaggtataggttaagtgcagcaaagatgtactcttcaggagagagactaatcttcccagctcctccaattatcagttgcgtatcaactaccaagtatattgaaaagaaaataacaatgaacgctgctatcagtaaccggaatttgtcattttgatagaagatggcggtgatgccgaaactgagaatcaccagagatagagccacgagaattccagagcaaacactaaaatctattctagattgaaaggcaaacacagtaagtccaaggcatatgatgacggttgcacctgcagctatggccactacatcgatgtcataatatgaagaaattgtacccaagaggaagctttcagctattgtaaatataaataagaatataagattggccgggtactgtctcctcagttgtccacaacatgccaaagcaatgatcgtaactagaatcagtaccaaagcaatcaatagaagtacaggatggcgttgaacatacagtttggttggttcgtggaatataaaccagctgatgactccagttgttattgctacttggagtgaaagtatggcataaacctttcggatgaatcctcttcgtattgaagcgtcattaaattcaaaaccttttactgtctgtgcttcaatgtcgtgactatctagtttagtctccatttttacactttaacaaggcctttttaaggttaacttataatctaaatcacaaagaatattgtataaaacgtagaaaaatcattgctagttcgacatatttgcaaat

SEQ ID NO: 1086 - DNA, 2443 bp, Diabrotica virgifera
  SmartBlast Evalue=1E-15; Info=Transposase n=1 Tax=Oryzias latipes RepID=A6BLM9_ORYLA
atatatcatatgtatctgaattgccgatataaatgagtcaaattaaataaattattagaagaattattttactaagcaacaacattgttgtttatgttagtagtatcttgtattttgacatcgaaacgttaataaaaatacttattttgtgacgaattcggtgaatttcttttctttgaatgatattttgtagcgactggcaacaaagtctatatttatttgtgggaattccccttttatgactaacaatcagcacaacgtttttcggcactttagaacgttgctattctttttttttcctcatcgacacatcgttgggaagttctgatagcagctacaggcaaaagaaggattcaagacacgcggtggagtgcaagaggcgatgccgtaaatgtgacatcattacaaagacattctcgtcactttggactttggaaatactgacagaggcaggtgaaagcttaaacattaggacagatgcaggtgctttactagtttcgatgcagtcattttcctttctttgttttttgggcctagggcagccggtgcaacatgaagtgaatgatgcacaaaaatatttacaaacaaggggacttgacataagattgtgcgctcagtaaaatgctttgcagatgctattgacagagaaaagataggaattggcaaatagtgatgtttgttatgcaaaaatatgtatgaagaacttggaatttccataaaacctcggaggcgcataacaggaaagcatatttttgatgacggaactagagatgctaacttgtcttgtgaaaatgagttgagaagaaagctgtcttcttcgttagatatagttattgtagaaattcctgagcgttttcaacagctacagaatttaactgataagttaaaaaaaatttatctaactaaatttatctaacgtcggctatattattagatccagacaacactgaatgtagaaatgtagactacgcatctgacgaaattgacgagcagggtttcaagctataaaaacttcgactgcggactttcgttgctgctacaacagtcaacgaaatttactaatgcagattcacttgaattatttaaatttattgttaaatccaagctggaagatactctgcccaatattttaataatattccgaatattgttcacagttgctataagcaatgccagctgtaagaggagtttttcaaaattgaaattgattaaaaaatatttaacatcgacaatgagtactctaagactaactaatttggctattttgtctattgagcaagaggtgtgtgatgcgatagacattgacggtgcaataaaagactttgctcttaaaaaaagtagacgtataaatttttaattgaagacggaagttttgtttttaattctaacaaatactcatattacttttcaataaagttaaaaatataacattatatagtatcgtttctagttctaattaaaaattgattttatttaattttgtcgatcgtcaaggtgtacctaatcttaagtgataggtactaagctatatcaatgtatctaattggttaaagtaaaagaatttttgtaaataaacgtgattgtaaaacttagataaacttttctcaccgaaaagttctctacaattaatgtatgtaatgtatagtatacaataaattaaaatacctaaataagagggcggcaaaattgtcttccgccctgggcggccgacactcacgctacgccactgatcataattgggagtacttattgatgccacaaagggaactggcttgttaataccaaaaagcgtcatttgacatgttcgggttgttatcactagtaaatagcgcaagtaattctgatactatttgctgtgtattttaagattttaagacttttccttgcaatataaactgcaataaattatagcgctgttaatttctcactatgtgattcaggtattctaacttatcttctcataatttcgctgtttatacaaactttgtttacacacagattttaaacaattttgtagaaaaatagtagtcaaagatgtctaacatcttcatagtttaagcgttgcttaagctactgcttaagcggtcagttctgcttatctccccacggtcacctgcgatgcgaatacaatagcagtttacccagttaaattaaaattagaagaaacaagaatttattttgttttctattagatatatgtaatagcacatcctgttcaaaaatgtcatatttgtatttatttcaccaacaaaatgcgttatgcataatctgttttctcagaaaactgtaatatcgcaaccttaaaaatatttcaatagatggagcgaaacgatatgtcacaattaaaaatcaaagctcatggtccggtaaaagtagtaatatcattcgaatttgtgacaagagtttcttgtctctagtttcctgtgaaaaaaatattaaagaa

SEQ ID NO: 1087 - DNA, 2231 bp, Diabrotica virgifera
  SmartBlast Evalue=9E-57; Info=Nmda receptor glutamate-binding chain (Fragment) n=1 Tax=Aedes aegypti RepID=Q16QI8_AEDAE
caatgaattctgttttacttactgttgattgtacaatagatttttattgagagcacacgttctttttcatgtaattgccttaatagttatttattatataagtgttcaaagtacacgtttaaggcacgcttgtgaaagtttcacatgagtgccttaaaaatgtactttttaacacgcatatcatacaatattttttctacaaacgtaattacaggacaatatctacaaaaacttttacttgacattccatttttatattttttgacattacatcaaaattgcctatacggtcaatacgaactgcagtgccataaaatttttaaagcactagtgccttaaagttgcatttttaacgctcgtatggagtgctaaaaattgcatttttaacacggttgtagaaaaaattatttaagatcgacaatgaatactctaagactaactaatttggctattttgtttattgagcaagaggtgtgtgatgcgatagacattgacggtgcaataaaagactttgctcttaaaaaagtagacgtataaatttttaattgaagacggaattttgtttttaattctaacaaatatgtactcatatgtatcgttctagttctaatcaaaaattgattttattttttaatattgtcgattgtcaaggtgtacctacctacctaatcttaagtgataggtaatacctaagttatatcaatgtatctaattggttaaagtaaaagaatttttgtataaataaacgtgattgtaaaacttagataaacttttttatttaaaatccaacctgtgtaatgcaaaataatgatgactgttttcgccgaaaagttctctataattaatgtatagagtacataataaattaaaatacccaaataagagggcggcaaaattgtcttccgccccgggcggctgacactcacgctacgccactgagtataagtaaagaattgcatgaaacgaataatttggttttcaaccggacggtgctcctctgcattatactttacttcttgttaattaatatttagaccaaaattttccactgtattggattgagaggacaggcagcatcgaatggactcctggatcaccagatttgtttcttctggattttttgttgggacacctaaaaagtaaaatctgtagaacaccacccgtatccttagaagataaacgtcaactaattgtaaacgaatgcctacgaatcattacgaaaatgcttcagaatatggaagaacgtttcaaacaaacttttatcattgtatggacgccggaggtcttgaatctaaccagtttttattactaggaaaactaaataaaaacattgtcttatctaaattttcttgatagcttacagtaacttatatctaactgatacaaaaccttaatattatcgcgcagcacgaccaacaatgagtaagatatacaaaaaaatgttaataatatccaggtataggttaagtgcagcaaagatgtactcttcaggagagagactaatcttcccagctcctccaattatcagttgcgtatcaactaccaagtatattgaaaagaaaataacaatgaacgctgctatcagtaaccggaatttgtcattttgatagaagatggcggtgatgccgaaactgagaatcaccagagatagagccacgagaattccagagcaaacactaaaatctattctagattgaaaggcaaacacagtaagtccaaggcatatgatgacggttgcacctgcagctatggccactacatcgatgtcataatatgaagaaattgtacccaagaggaagctttcagctattgtaaatataaataagaatataagattggccgggtactgtctcctcagttgtccacaacatgccaaagcaatgatcgtaactagaatcagtaccaaagcaatcaatagaagtacaggatggcgttgaacatacagtttggttggttcgtggaatataaaccagctgatgactccagttgttattgctacttggagtgaaagtatggcataaacctttcgaatgaatcctcttcgtattgaagtgtcattgaattcaaaaccttttactgtctgtgcttcaatgtcgtgactatcctgtttagtttccatttttacactgtaatatggcctttatcaacaacttatagtctatatcacataaaatattttagcaaacgtataaaaatcattggcagtccgatatagtacttgcaaatttctc

SEQ ID NO: 1088 - DNA, 2225 bp, Diabrotica virgifera
  SmartBlast Evalue=9E-57; Info=Nmda receptor glutamate-binding chain (Fragment) n=1 Tax=Aedes aegypti RepID=Q16QI8_AEDAE
caatgaattctgttttacttactgttgattgtacaatagatttttattgagagcacacgttctttttcatgtaattgccttaatagttatttattatataagtgttcaaagtacacgtttaaggcacgcttgtgaaagtttcacatgagtgccttaaaaatgtactttttaacacgcatatcatacaatattttttctacaaacgtaattacaggacaatatctacaaaaacttttacttgacattccatttttatattttttgacattacatcaaaattgcctatacggtcaatacgaactgcagtgccataaaatttttaaagcactagtgccttaaagttgcatttttaacgctcgtatggagtgctaaaaattgcatttttaacacggttgtagaaaaaattatttaagatcgacaatgaatactctaagactaactaatttggctattttgtttattgagcaagaggtgtgtgatgcgatagacattgacggtgcaataaaagactttgctcttaaaaaagtagacgtataaatttttaattgaagacggaattttgtttttaattctaacaaatatgtactcatatgtatcgttctagttctaatcaaaaattgattttattttttaatattgtcgattgtcaaggtgtacctacctacctaatcttaagtgataggtaatacctaagttatatcaatgtatctaattggttaaagtaaaagaatttttgtataaataaacgtgattgtaaaacttagataaacttttttatttaaaatccaacctgtgtaatgcaaaataatgatgactgttttcgccgaaaagttctctataattaatgtatagagtacataataaattaaaatacccaaataagagggcggcaaaattgtcttccgccccgggcggctgacactcacgctacgccactgagtataagtaaagaattgcatgaaacgaataatttggttttcaaccggacggtgctcctctgcattatactttacttcttgttaattaatatttagaccaaaattttccactgtattggattgagaggacaggcagcatcgaatggactcctggatcaccagatttgtttcttctggattttttgttgggacacctaaaaagtaaaatctgtagaacaccacccgtatccttagaagataaacgtcaactaattgtaaacgaatgcctacgaatcattacgaaaatgcttcagaatatggaagaacgtttcaaacaaacttttatcattgtatggacgccggaggtcttgaatctaaccagtttttattactaggaaaactaaataaaaacattgtcttatctaaattttcttgatagcttacagtaacttatatctaactgatacaaaaccttaatattatcgcgcagcacgaccaacaatgagtaagatatacaaaaaaatgttaataatatccaggtataggttaagtgcagcaaagatgtactcttcaggagagagactaatcttcccagctcctccaattatcagttgcgtatcaactaccaagtatattgaaaagaaaataacaatgaacgctgctatcagtaaccggaatttgtcattttgatagaagatggcggtgatgccgaaactgagaatcaccagagatagagccacgagaattccagagcaaacactaaaatctattctagattgaaaggcaaacacagtaagtccaaggcatatgatgacggttgcacctgcagctatggccactacatcgatgtcataatatgaagaaattgtacccaagaggaagctttcagctattgtaaatataaataagaatataagattggccgggtactgtctcctcagttgtccacaacatgccaaagcaatgatcgtaactagaatcagtaccaaagcaatcaatagaagtacaggatggcgttgaacatacagtttggttggttcgtggaatataaaccagctgatgactccagttgttattgctacttggagtgaaagtatggcataaacctttcggatgaatcctcttcgtattgaagcgtcattaaattcaaaaccttttactgtctgtgcttcaatgtcgtgactatctagtttagtctccatttttacactttaacaaggcctttttaaggttaacttataatctaaatcacaaagaatattgtataaaacgtagaaaaatcattgctagttcgacatatttgcaaat

SEQ ID NO: 1089 - DNA, 1822 bp, Diabrotica virgifera
  SmartBlast Evalue=9E-57; Info=Nmda receptor glutamate-binding chain (Fragment) n=1 Tax=Aedes aegypti RepID=Q16QI8_AEDAE
attgatagcttacactaacttatatataactgatacaaatcctcaatattatctcgcagcacgcccaacaatgagtaagatatacaaaaaaatgttaataatatcgaggtacagattaagcgcagcaaaaatgtactcttcgggagaaagactgatcttcccaactcctccaattatcagttgcgtaccaattaccaagtatattgaaaagacaacaacaataaacgctgctatcagtaaccagagtttgtcattttgatagaagatggcggtgatgccgaaactgataatcaccagagatagagccatgagaattccagataaaacactaaaatctattctagattggaaggcaaacacagctatggccactacatcgatgtcataatatgaagaaattgtacccaagaggaagctttcagctattgtaaatataaataagaatataagattggccgggtactgccttcttaggttcccacaacatgctaaagcaataatcgtaactggaataagtaccaatgcaatcagtataagtaaagaattgcatgaaacgaataatttggttttcaaccggacggtgctcctctgcattatactttacttcttgttcgttaatatttagaccaaaattttccactgtattggattgagaggacaggcagcatcgaatggactcctggattaccagatttgtttcttctggattttttgttgggacacctaaaaagtaaaatctgtagaacaccacccgtaaccttagaagataaacgtcaactaattgtaaacgaatgcctacgaatcattacgaaaatgcttcagaatatggaagaacgtttcaaacaaacctttatcattgtatggacgccagaggtcttgaatctaaccagtttttattactaggaaaactaaataaaaacattgtcttatctaaattttcttgatagcttacagtaacttatatctaactgatacaaaaccttaatattatcgcgcagcacgaccaacaatgagtaagatatacaaaaaaatgttaataacatccaggtataggttaagtgcagcaaatatgtactcttcaggagagagactgatcttcccagctcctccaattatcagttgcgtatcaactaccaagtatattgaaaagaaaataacaatgaacgctgctatcagtaaccggaatttgtcattttgatagaagatggcggtgatgccgaaactgagaatcaccagagatagagccacgagaattccagagcaaacactaaaatctattctagattgaaaggcaaacacagtaagtccaaggcatatgatgacggttgcacctgcagctatggccactacatcgatgtcataatatgaagaaattgtacccaagaggaagctttcagctattgtaaatataaataagaatataagattggccgggtactgtctcctcagttgtccacaacatgccaaagcaatgatcgtaactagaatcagtaccaaagcaatcaatagaagtacaggatggcgttgaacatacagtttggttggttcgtggaatataaaccagctgatgactccagttgttattgctacttggagtgaaagtatggcataaacctttcgaatgaatcctcttcgtattgaagtgtcattgaattcaaaaccttttactgtctgtgcttcaatgtcgtgactatcctgtttagtttccatttttacactgtaatatggcctttatcaacaacttatagtctatatcacataaaatattttagcaaacgtataaaaatcattggcagtccgatatagtacttgcaaatttctc

SEQ ID NO: 1090 - DNA, 1816 bp, Diabrotica virgifera
  SmartBlast Evalue=9E-57; Info=Nmda receptor glutamate-binding chain (Fragment) n=1 Tax=Aedes aegypti RepID=Q16QI8_AEDAE
attgatagcttacactaacttatatataactgatacaaatcctcaatattatctcgcagcacgcccaacaatgagtaagatatacaaaaaaatgttaataatatcgaggtacagattaagcgcagcaaaaatgtactcttcgggagaaagactgatcttcccaactcctccaattatcagttgcgtaccaattaccaagtatattgaaaagacaacaacaataaacgctgctatcagtaaccagagtttgtcattttgatagaagatggcggtgatgccgaaactgataatcaccagagatagagccatgagaattccagataaaacactaaaatctattctagattggaaggcaaacacagctatggccactacatcgatgtcataatatgaagaaattgtacccaagaggaagctttcagctattgtaaatataaataagaatataagattggccgggtactgccttcttaggttcccacaacatgctaaagcaataatcgtaactggaataagtaccaatgcaatcagtataagtaaagaattgcatgaaacgaataatttggttttcaaccggacggtgctcctctgcattatactttacttcttgttcgttaatatttagaccaaaattttccactgtattggattgagaggacaggcagcatcgaatggactcctggattaccagatttgtttcttctggattttttgttgggacacctaaaaagtaaaatctgtagaacaccacccgtaaccttagaagataaacgtcaactaattgtaaacgaatgcctacgaatcattacgaaaatgcttcagaatatggaagaacgtttcaaacaaacctttatcattgtatggacgccagaggtcttgaatctaaccagtttttattactaggaaaactaaataaaaacattgtcttatctaaattttcttgatagcttacagtaacttatatctaactgatacaaaaccttaatattatcgcgcagcacgaccaacaatgagtaagatatacaaaaaaatgttaataacatccaggtataggttaagtgcagcaaatatgtactcttcaggagagagactgatcttcccagctcctccaattatcagttgcgtatcaactaccaagtatattgaaaagaaaataacaatgaacgctgctatcagtaaccggaatttgtcattttgatagaagatggcggtgatgccgaaactgagaatcaccagagatagagccacgagaattccagagcaaacactaaaatctattctagattgaaaggcaaacacagtaagtccaaggcatatgatgacggttgcacctgcagctatggccactacatcgatgtcataatatgaagaaattgtacccaagaggaagctttcagctattgtaaatataaataagaatataagattggccgggtactgtctcctcagttgtccacaacatgccaaagcaatgatcgtaactagaatcagtaccaaagcaatcaatagaagtacaggatggcgttgaacatacagtttggttggttcgtggaatataaaccagctgatgactccagttgttattgctacttggagtgaaagtatggcataaacctttcggatgaatcctcttcgtattgaagcgtcattaaattcaaaaccttttactgtctgtgcttcaatgtcgtgactatctagtttagtctccatttttacactttaacaaggcctttttaaggttaacttataatctaaatcacaaagaatattgtataaaacgtagaaaaatcattgctagttcgacatatttgcaaat

SEQ ID NO: 1091 - DNA, 1785 bp, Diabrotica virgifera
  SmartBlast Evalue=9E-57; Info=Nmda receptor glutamate-binding chain (Fragment) n=1 Tax=Aedes aegypti RepID=Q16QI8_AEDAE
attgatagcttacactaacttatatataactgatacaaatcctcaatattatctcgcagcacgcccaacaatgagtaagatatacaaaaaaatgttaataatatcgaggtacagattaagcgcagcaaaaatgtactcttcgggagaaagactgatcttcccaactcctccaattatcagttgcgtaccaattaccaagtatattgaaaagacaacaacaataaacgctgctatcagtaaccagagtttgtcattttgatagaagatggcggtgatgccgaaactgataatcaccagagatagagccatgagaattccagataaaacactaaaatctattctagattggaaggcaaacacagctatggccactacatcgatgtcataatatgaagaaattgtacccaagaggaagctttcagctattgtaaatataaataagaatataagattggccgggtactgccttcttaggttcccacaacatgctaaagcaataatcgtaactggaataagtaccaatgcaatcagtataagtagacggtgctcttcttcattatactttacttcttgttcgttaatatttagaccaaaaatttccactgtattggattgagaggacaggcagcatcgaatggactcctggatcaccagatttgtttcttctggattttttgttgggacacctaaaaagtaaaatctgtagaacaccacccgtatccttagaagataaacgtcaactaattgtaaacgaatgcctacgaatcattacgaaaatgcttcagaatatggaagaacgtttcaaacaaacctttatcattgtatggacgccagaggtcttgaatctaaccagtttttattactaggaaaactaaataaaaacattgtcttatctaaattttcttgatagcttacagtaacttatatctaactgatacaaaaccttaatattatcgcgcagcacgaccaacaatgagtaagatatacaaaaaaatgttaataacatccaggtataggttaagtgcagcaaatatgtactcttcaggagagagactgatcttcccagctcctccaattatcagttgcgtatcaactaccaagtatattgaaaagaaaataacaatgaacgctgctatcagtaaccggaatttgtcattttgatagaagatggcggtgatgccgaaactgagaatcaccagagatagagccacgagaattccagagcaaacactaaaatctattctagattgaaaggcaaacacagtaagtccaaggcatatgatgacggttgcacctgcagctatggccactacatcgatgtcataatatgaagaaattgtacccaagaggaagctttcagctattgtaaatataaataagaatataagattggccgggtactgtctcctcagttgtccacaacatgccaaagcaatgatcgtaactagaatcagtaccaaagcaatcaatagaagtacaggatggcgttgaacatacagtttggttggttcgtggaatataaaccagctgatgactccagttgttattgctacttggagtgaaagtatggcataaacctttcgaatgaatcctcttcgtattgaagtgtcattgaattcaaaaccttttactgtctgtgcttcaatgtcgtgactatcctgtttagtttccatttttacactgtaatatggcctttatcaacaacttatagtctatatcacataaaatattttagcaaacgtataaaaatcattggcagtccgatatagtacttgcaaatttctc

SEQ ID NO: 1092 - DNA, 1779 bp, Diabrotica virgifera
  SmartBlast Evalue=9E-57; Info=Nmda receptor glutamate-binding chain (Fragment) n=1 Tax=Aedes aegypti RepID=Q16QI8_AEDAE
attgatagcttacactaacttatatataactgatacaaatcctcaatattatctcgcagcacgcccaacaatgagtaagatatacaaaaaaatgttaataatatcgaggtacagattaagcgcagcaaaaatgtactcttcgggagaaagactgatcttcccaactcctccaattatcagttgcgtaccaattaccaagtatattgaaaagacaacaacaataaacgctgctatcagtaaccagagtttgtcattttgatagaagatggcggtgatgccgaaactgataatcaccagagatagagccatgagaattccagataaaacactaaaatctattctagattggaaggcaaacacagctatggccactacatcgatgtcataatatgaagaaattgtacccaagaggaagctttcagctattgtaaatataaataagaatataagattggccgggtactgccttcttaggttcccacaacatgctaaagcaataatcgtaactggaataagtaccaatgcaatcagtataagtagacggtgctcttcttcattatactttacttcttgttcgttaatatttagaccaaaaatttccactgtattggattgagaggacaggcagcatcgaatggactcctggatcaccagatttgtttcttctggattttttgttgggacacctaaaaagtaaaatctgtagaacaccacccgtatccttagaagataaacgtcaactaattgtaaacgaatgcctacgaatcattacgaaaatgcttcagaatatggaagaacgtttcaaacaaacctttatcattgtatggacgccagaggtcttgaatctaaccagtttttattactaggaaaactaaataaaaacattgtcttatctaaattttcttgatagcttacagtaacttatatctaactgatacaaaaccttaatattatcgcgcagcacgaccaacaatgagtaagatatacaaaaaaatgttaataacatccaggtataggttaagtgcagcaaatatgtactcttcaggagagagactgatcttcccagctcctccaattatcagttgcgtatcaactaccaagtatattgaaaagaaaataacaatgaacgctgctatcagtaaccggaatttgtcattttgatagaagatggcggtgatgccgaaactgagaatcaccagagatagagccacgagaattccagagcaaacactaaaatctattctagattgaaaggcaaacacagtaagtccaaggcatatgatgacggttgcacctgcagctatggccactacatcgatgtcataatatgaagaaattgtacccaagaggaagctttcagctattgtaaatataaataagaatataagattggccgggtactgtctcctcagttgtccacaacatgccaaagcaatgatcgtaactagaatcagtaccaaagcaatcaatagaagtacaggatggcgttgaacatacagtttggttggttcgtggaatataaaccagctgatgactccagttgttattgctacttggagtgaaagtatggcataaacctttcggatgaatcctcttcgtattgaagcgtcattaaattcaaaaccttttactgtctgtgcttcaatgtcgtgactatctagtttagtctccatttttacactttaacaaggcctttttaaggttaacttataatctaaatcacaaagaatattgtataaaacgtagaaaaatcattgctagttcgacatatttgcaaat

SEQ ID NO: 1093 - DNA, 1283 bp, Diabrotica virgifera
ggtggttgtgcacgccaccatatttttgtaagtactttcgaaaatgtatttaagtaagtaatacaccctgttaaaatttatatttttacaatattttgcgtgattttggttgtctcatcattctaaatctctgacagaacgtgatttgcaatttgcaaaagcttcaatttgggtgaaacttctgatgcaaattatgaaccattcaaagcttccgatagcgtataagtgtgtagagtccttttcatgagcacctttcagtgcgtcacaaatgatagaaaaaaggtaagaccgtgataataccaaagatcttatacacatagattaggccaactccgaaaaatagcgtaacgcggagcagttcgggtcggtggtctatctatctctctctaccggcgcttagctttctctctctagcatatgatggccgctgcctctgtgtccgtgtcgttccattactcccacctcttggtagatacgctcacactcgtacgacagacaaagatagctagaccaccgtacttgatattggcgttacaccccaatgcattaagcggcatatacctagcctggtctacagtctcagaattatcacaaataataagtagaaacatcttttcacgtttgtcatgtttccaagtactatctgtgacggatatatgtgacaagagaagattaaacgtctatgtcaaatgccaaatggtgtcaaaagtcgaagtatatcctctacctaaatgtaccatattttacttaagaaaaattgtaaattataaatttcagtatcctttttgttagtatattgtatcccgacttcaatagtgccataaccctaaaaaatctgttttttttttgcctaacatgttccattaggcgttactttcattgtggaacaatgtcatataatttagttatcttagaatctgcatagtgcgcctatatcgttattaccatttcaggttttgtctctgtcagcattagcaaaagcgccacaaggtagcttgcgttatgctgtggtcgagagtggatgtgtcataagtactgttaatttttaaatattaccctaacatttgtgttactgcatttgttagctaagaaatttactcaagtaaaacttctctggtgccataccctgtgacatgacaggttgatacgccttaatccttgaattttgaatataggtgcccttgacaatagcgccttattataattcaacggtgaatttcagggtgtcaactaaaaataaatattggcattagattgacacataatcaacacgagtgcagaat

SEQ ID NO: 1094 - DNA, 752 bp, Diabrotica virgifera
ggtggttgtgcacgccaccatatttttgtaagtactttcgaaaatgtatttaagtaagtaatacaccctgttaaaatttatatttttacaatattttgcgtgattttggttgtctcatcattctaaatctctgacagaacgtgatttgcaatttgcaaaagcttcaatttgggtgaaacttctgatgcaaattatgaaccattcaaagcttccgatagcgtataagtgtgtagagtccttttcatgagcacctttcagtgcgtcacaaatgatagaaaaaaggtaagaccgtgataataccaaagatcttatacacatagattaggccaactccgaaaaatagcgtaacgcggagcagttcgggtcggtggtctatctatctctctctaccggcgcttagctttctctctctagcatatgatggccgctgcctctgtgtccgtgtcgttccattactcccacctcttggtagatacgctcacagtcgtacgacagacaaagatagctagaccaccgtacttgatatcgacgtgacaccccgatgcattgtttagcatatccctagccagatctatccttgacatctctggttatcataccagagaggtctcttacaagcatatacagtgatgactaatcggcaatatagcgctaataactggcaaaacagcacaaaagatggaaaacgcactaagttgtgagataaaaagaaatgaaactagtcgagctgggatattgagcgatattaaccc

SEQ ID NO: 1095 - DNA, 344 bp, Diabrotica virgifera
attctattcttcttcttctattgtttcttctatctcttttcgacgaattccctattcaattcttctcgcaatcgcaaagcagttagcaggttccgaaattaaaactggaatgacgagatgacttcaaaaattttggactaattacgatgctgtgccacctacatatacctttttttggactgaggtggaacgctcttagctaactagggaagatgtccctagtactgttggactcggacaggagaggagaacacgctagggcccacagaccagagtaggtccatgcgtcccgcgtgccccccataaccagccgcctaccaactaaaaccaccccctcttccgac

SEQ ID NO: 1096 - DNA, 5413 bp, Diabrotica virgifera
  SmartBlast Evalue=1E-105; Info=Nipsnap n=2 Tax=Culicini RepID= Q17Q08_AEDAE
cctcatcctagtgaagtgagagataaccttttaatgacatcaaaaatataaaaatttagtaactacaaaaaatggccaatcttttcaaatttttcaataagttgcctccaaattttagatcagtttcaacaactactaccaaaaatgatgcctggttatctaagatttttgttagaaaaattgaacctacaaaggaatcacacagtagaatgttaagcgataaggaaattatctactctttgcagacacacaactatagacccgattctaaagtagcgtatttacaaaatgtaaaaaataaagtggactatataaaagcacaagattctttatcaaaagaagttgaactagtaggttcatggaccgtaaatgtaggagaccaagatcaagctctacatttatggaagttcacaggaggttttgatatgattgatcggtataacgattttacaggaaaaaaccaggaattccaacgtctaaatgaagaacaaggaaaactggttagatcccgccacttgcaatatcttctagcatttagttactggccccaaattctaatgcgacaacccaaaaacatttatgaaattcgtagctacgctctaaaacctggaactatgatcgagtggggtaataactgggctagggcaatcaactacaggcaaaataatgatgaagcatttgctggattcttttcacaaattggtagactatataatgttcaccatatttggtgttattctagtttgaacggcagaaaagaaactagggaaagtgcctggaggtccccaggttgggatgaatgtgtcgcttatacagtaccgttgatcagagaaatgcattgtaggattatggtaccaactgaattctcccctactctttaaatgtgaacaagctcttcaaaaccttattttttaattgtatgaatattattatctataacgccgcgaaatagttggtatttcagttagcgatataatttaaacgaaaagtctataaataactacaacagtatacttagtttttttcacaacgtaaatgtacattctctgatttgttaatacatagttctttttgcatttgacattaaaaataacttaagtgagtgtgtgaactttactaccatattcttttgctgatattaaaatggaaatctgtcatataaaatatctttattttaaaaatattatactcagtttgtataaatactcactctttaaaattttttagaacatttgctaacttctaaaaaatactgtccgaagaaaatttcagaattacttactaaatttgtttaccaaatgtggcaacggtatttttccaaaaacgacaaaatagtattacctaaattcttcttttggctgagatgccatgcatgtttaaaaaatcttccatcattcatctgtctgtcagctgaaaacttatgtatcctctccgcccgttcacacggcatacaccttacgatagtttattcaaaactatattttaatcgaatcgagacagcctgttaagacatgatgcacgatacgataatttaccactgtttcttgtactgcactacttgagaaaactaaacaactaattaaaaatttccctagctatttggtgttcgactaggtcgacaaaattcgaatcatgtgaacgagggtatctacagtcggaaagtgaaggaatacccatgaacgagcatataaagcacgctgtgttttcctgtcaccgtgtcacaaagaaaattgtccagtgcaagtacatgtaacaataattattacatgtacttgcgctggtcaattttttgtgtgacacggtgacgggaggatacagcgtgttttagtatgctcattcatgggtgtcctttcatttttcctactgtatatacagtttaaaacaaataaaataaaatataattccgtcttctgcaaaggaaaaacaatattaaactttattacagttatccgatcataatagcaacattaaaataataccataaacaatatatataaaataacaatctcgctacgttaaatcaacgtagcctggagacaccgcatttcactgcaatgcagtcattcattcctcgctactaccgcctactgcgataacggccgtggcaagacccacgtcactactgtggcgtccgcctaggcatagttccacctcaatatacggtgcatctttgccaagccagctaatgctagttcaatacgctagcagcagctgtcgagccattgctagttcaattcgttagcaacgactgattttctcatccttctgctcgccttaaatatgctctcgctgccactactccttcgatttcccccagcggtgctctgcaccaacacggatgctcctccggtcgtctctggtaaatcagctcatcgcttgccgttgggaccatatcgttacaaagtgattgatcagactcatgctccacaagaccaacgctaggaaatgtgaagaacatagattatttagtttggagagcaattaaattactcttactataaactataattcgctcgcgcatatatacaccaaattggaagaacacctaagtgaaactcaatttggattcagaacaggtctcggaacgagggaagcacttttcagtttgcaagttctaatacaaagagccagggacgtgtatgcatgttttattgatttctagaaggtatttgacaaagtaccacatgagaaactaatcccaaccatcaagactcgatggcaacaacagaagactgatctcaacaacaataaaaagcaacagcgtgatttgaaaatgaactgtccgagatcttcacagaggttagacagcattgcatactgccaccaacctctttgacatctttagagaaaccttggatgaatcagaagaaggtattgcaataaatggcccacttataaacagtattatatatgcagatgatacagtattgctggcagatagtgcacagcggctccaaatgatgatggttgtagaaacatggaaccaataaggcctaaaactaagttgtaagaagacaaaaataatgatccttaataaaaacactaataaaataagctattttggctggaattgggctgcaatattagggatagctgggatcatagctacgaaataaaaacacaggtgttttgtaacggccttcggaagattctatgtaagttgaagttctgaatccttaatcaaagaatacatatctaccacatcatcaagattaagtatcaatatacacatcagaattcttagatgttacgtcttagtatcctcctatacaaagaatacctacctacctagtggtagatatgtattctttgtcctatacggagtagaaaactggagttttgcagtagatatcataaaacgattagagacatgtgaaatatgatgctaccgtcatgataagtgtctcatataaacacaaaacaactaacgtaactcttctccagaggctaagaaaagataaagctattattaacaccgtaaagcacagaaattggcttatttcggccacactatgcgtaatagtaaataccgacttctacagttgattatacaaggcaagattgatggcaactggtctaacactgcatgattgacggcaactggattgatggtctaacatcaaatgatttatttcgagctatagaatttcgagttatagaatcgaataagataagtcaatgtggtcgctaacatcactatatcataggtaccggtagaagaaggagaagatggtccacaagcgttggaggttacaacgtatagttgaggtatctcgaaatacactttttgaattaagatgatcacacagaatataaagaaaacagcaaaagagcaactacaaaaaaagagcttgactttatttactattattatacttaaagtttaaattcttcaattttgtacaccctgtacgtgatttcaattaataaccgtcataatttattattattgaattacaacttgtatataaaatcaaaacacatttaacagtcgctaatttattacaatcgtaacatattaaaaaataatattaatagaaatattttgcatgtaacatacattttttaacgatttactatataggcaactatgttaaaaaccgaaaacaagataatccgacagtataataaaacgaacaatagtgcttcactaagcgaaactgttgaaacttcaaaacactcatatggtaatgatgaaaagaagaagacgatatagtagaaatcactaattgaatcaaattccttaatttgtctattttatatattgtatatctatttatttctcggtctagattttggatgtgcgcaatggtacacatttgttaagttatgtggattcaagaaactaagattattgacagcgacaaatgtcaacaggctgacgtttgacgttgacgtttttatctatcaagacgtgtctcagacatagatcatagagaataatacatagattcgataagatacgaaaactagcttaacgcgaagcagttcatcggcagcagttatctttctctctctaattgcgcttagctttctctttctagcatatgatggccgctgcctctgtgtccgtgtcgttccattactcccacctcttggtagatacgctcacactcgtacgacagacaaagatagctagaccaccgtacttgatattggcgttacaccccaatgcattaagcggcatatacctagcctggtctacagtctcagaattatcacaaataataagtagaaacatcttttcacgtttgtcatgtttccaagtactatctgtgacggatatatgtgacaagagaagattaaacgtctatgtcaaatgccaaatggtgtcaaaagtcgaagtatatcctctacctaaatgtaccatattttacttaagaaaaattgtaaattataaatttcagtatcctttttgttagtatattgtatcccgacttcaatagtgccataaccctaaaaaatctgttttttttttgcctaacatgttccattaggcgttactttcattgtggaacaatgtcatataatttagttatcttagaatctgcatagtgcgcctatatcgttattaccatttcaggttttgtctctgtcagcattagcaaaagcgccacaaggtagcttgcgttatgctgtggtcgagagtggatgtgtcataagtactgttaatttttaaatattaccctaacatttgtgttactgcatttgttagctaagaaatttactcaagtaaaacttctctggtgccataccctgtgacatgacaggttgatacgccttaatccttgaattttgaatataggtgcccttgacaatagcgccttattataattcaacggtgaatttcagggtgtcaactaaaaataaatattggcattagattgacacataatcaacacgagtgcagaat

SEQ ID NO: 1097 - DNA, 4882 bp, Diabrotica virgifera
  SmartBlast Evalue=1E-105; Info=Nipsnap n=2 Tax=Culicini RepID= Q17Q08_AEDAE
cctcatcctagtgaagtgagagataaccttttaatgacatcaaaaatataaaaatttagtaactacaaaaaatggccaatcttttcaaatttttcaataagttgcctccaaattttagatcagtttcaacaactactaccaaaaatgatgcctggttatctaagatttttgttagaaaaattgaacctacaaaggaatcacacagtagaatgttaagcgataaggaaattatctactctttgcagacacacaactatagacccgattctaaagtagcgtatttacaaaatgtaaaaaataaagtggactatataaaagcacaagattctttatcaaaagaagttgaactagtaggttcatggaccgtaaatgtaggagaccaagatcaagctctacatttatggaagttcacaggaggttttgatatgattgatcggtataacgattttacaggaaaaaaccaggaattccaacgtctaaatgaagaacaaggaaaactggttagatcccgccacttgcaatatcttctagcatttagttactggccccaaattctaatgcgacaacccaaaaacatttatgaaattcgtagctacgctctaaaacctggaactatgatcgagtggggtaataactgggctagggcaatcaactacaggcaaaataatgatgaagcatttgctggattcttttcacaaattggtagactatataatgttcaccatatttggtgttattctagtttgaacggcagaaaagaaactagggaaagtgcctggaggtccccaggttgggatgaatgtgtcgcttatacagtaccgttgatcagagaaatgcattgtaggattatggtaccaactgaattctcccctactctttaaatgtgaacaagctcttcaaaaccttattttttaattgtatgaatattattatctataacgccgcgaaatagttggtatttcagttagcgatataatttaaacgaaaagtctataaataactacaacagtatacttagtttttttcacaacgtaaatgtacattctctgatttgttaatacatagttctttttgcatttgacattaaaaataacttaagtgagtgtgtgaactttactaccatattcttttgctgatattaaaatggaaatctgtcatataaaatatctttattttaaaaatattatactcagtttgtataaatactcactctttaaaattttttagaacatttgctaacttctaaaaaatactgtccgaagaaaatttcagaattacttactaaatttgtttaccaaatgtggcaacggtatttttccaaaaacgacaaaatagtattacctaaattcttcttttggctgagatgccatgcatgtttaaaaaatcttccatcattcatctgtctgtcagctgaaaacttatgtatcctctccgcccgttcacacggcatacaccttacgatagtttattcaaaactatattttaatcgaatcgagacagcctgttaagacatgatgcacgatacgataatttaccactgtttcttgtactgcactacttgagaaaactaaacaactaattaaaaatttccctagctatttggtgttcgactaggtcgacaaaattcgaatcatgtgaacgagggtatctacagtcggaaagtgaaggaatacccatgaacgagcatataaagcacgctgtgttttcctgtcaccgtgtcacaaagaaaattgtccagtgcaagtacatgtaacaataattattacatgtacttgcgctggtcaattttttgtgtgacacggtgacgggaggatacagcgtgttttagtatgctcattcatgggtgtcctttcatttttcctactgtatatacagtttaaaacaaataaaataaaatataattccgtcttctgcaaaggaaaaacaatattaaactttattacagttatccgatcataatagcaacattaaaataataccataaacaatatatataaaataacaatctcgctacgttaaatcaacgtagcctggagacaccgcatttcactgcaatgcagtcattcattcctcgctactaccgcctactgcgataacggccgtggcaagacccacgtcactactgtggcgtccgcctaggcatagttccacctcaatatacggtgcatctttgccaagccagctaatgctagttcaatacgctagcagcagctgtcgagccattgctagttcaattcgttagcaacgactgattttctcatccttctgctcgccttaaatatgctctcgctgccactactccttcgatttcccccagcggtgctctgcaccaacacggatgctcctccggtcgtctctggtaaatcagctcatcgcttgccgttgggaccatatcgttacaaagtgattgatcagactcatgctccacaagaccaacgctaggaaatgtgaagaacatagattatttagtttggagagcaattaaattactcttactataaactataattcgctcgcgcatatatacaccaaattggaagaacacctaagtgaaactcaatttggattcagaacaggtctcggaacgagggaagcacttttcagtttgcaagttctaatacaaagagccagggacgtgtatgcatgttttattgatttctagaaggtatttgacaaagtaccacatgagaaactaatcccaaccatcaagactcgatggcaacaacagaagactgatctcaacaacaataaaaagcaacagcgtgatttgaaaatgaactgtccgagatcttcacagaggttagacagcattgcatactgccaccaacctctttgacatctttagagaaaccttggatgaatcagaagaaggtattgcaataaatggcccacttataaacagtattatatatgcagatgatacagtattgctggcagatagtgcacagcggctccaaatgatgatggttgtagaaacatggaaccaataaggcctaaaactaagttgtaagaagacaaaaataatgatccttaataaaaacactaataaaataagctattttggctggaattgggctgcaatattagggatagctgggatcatagctacgaaataaaaacacaggtgttttgtaacggccttcggaagattctatgtaagttgaagttctgaatccttaatcaaagaatacatatctaccacatcatcaagattaagtatcaatatacacatcagaattcttagatgttacgtcttagtatcctcctatacaaagaatacctacctacctagtggtagatatgtattctttgtcctatacggagtagaaaactggagttttgcagtagatatcataaaacgattagagacatgtgaaatatgatgctaccgtcatgataagtgtctcatataaacacaaaacaactaacgtaactcttctccagaggctaagaaaagataaagctattattaacaccgtaaagcacagaaattggcttatttcggccacactatgcgtaatagtaaataccgacttctacagttgattatacaaggcaagattgatggcaactggtctaacactgcatgattgacggcaactggattgatggtctaacatcaaatgatttatttcgagctatagaatttcgagttatagaatcgaataagataagtcaatgtggtcgctaacatcactatatcataggtaccggtagaagaaggagaagatggtccacaagcgttggaggttacaacgtatagttgaggtatctcgaaatacactttttgaattaagatgatcacacagaatataaagaaaacagcaaaagagcaactacaaaaaaagagcttgactttatttactattattatacttaaagtttaaattcttcaattttgtacaccctgtacgtgatttcaattaataaccgtcataatttattattattgaattacaacttgtatataaaatcaaaacacatttaacagtcgctaatttattacaatcgtaacatattaaaaaataatattaatagaaatattttgcatgtaacatacattttttaacgatttactatataggcaactatgttaaaaaccgaaaacaagataatccgacagtataataaaacgaacaatagtgcttcactaagcgaaactgttgaaacttcaaaacactcatatggtaatgatgaaaagaagaagacgatatagtagaaatcactaattgaatcaaattccttaatttgtctattttatatattgtatatctatttatttctcggtctagattttggatgtgcgcaatggtacacatttgttaagttatgtggattcaagaaactaagattattgacagcgacaaatgtcaacaggctgacgtttgacgttgacgtttttatctatcaagacgtgtctcagacatagatcatagagaataatacatagattcgataagatacgaaaactagcttaacgcgaagcagttcatcggcagcagttatctttctctctctaattgcgcttagctttctctttctagcatatgatggccgctgcctctgtgtccgtgtcgttccattactcccacctcttggtagatacgctcacagtcgtacgacagacaaagatagctagaccaccgtacttgatatcgacgtgacaccccgatgcattgtttagcatatccctagccagatctatccttgacatctctggttatcataccagagaggtctcttacaagcatatacagtgatgactaatcggcaatatagcgctaataactggcaaaacagcacaaaagatggaaaacgcactaagttgtgagataaaaagaaatgaaactagtcgagctgggatattgagcgatattaaccc

SEQ ID NO: 1098 - DNA, 4450 bp, Diabrotica virgifera
  SmartBlast Evalue=2E-35; Info=Endonuclease-reverse transcriptase n=1 Tax=Bombyx mori RepID=D5LB38_BOMMO
aacttatttttgtacagagtgtgcaaaatttacaattgaaatcagaattattgattttgtgacaaaatatatttgaactgtaaaatatttcgcttgtgcctcattttagaaaatataatatatacctatgtagatttttcaggtgactctgaaatataaatcaggtaatgatgctcaaccgacaatcagcagactaaaatttagattttttttaaattaaaattatatttaataacaatgctcgtatgtggttgagaacaaccccatagaacatatgtaatgcaattcagatatctgggcatagatacattaagcatctacgacccaggtaaaggacctgaggagtcaacaaagcatctgcaatagggcttttcatcgattgtcatttgttttgagcttctgtcatatgtcgtataatctgtgtaatattaatatacacggattatacgacatatgacagaagctcgaaacaaatgactgctaatgaaaagccctatgtaaggatgtctgcgggagatagtctagtcaaatccgtatatgcgcacagatagtaaaattagaatctacgcgacttgtatacgaccgatcatgacatatggcacagaagtgtgcgaagacaccaacaaaacgaaatatatgctaaggtttgccgaaatgaaaaccctaagaacaatagtggggaaaacaagaagagaccgggtgagaaatacaagcattagagagcaatgcaaaattcaagattttgtaagatggggaaggcagcgcaagaggatgtggtacaactatgtaagacgaatggatgataatagactcccaaaaattgccctagaaaacaacccgccctgttcaagaccccccggaagaccacctaaaagatggaggggtagttggcaatctacctcgcaacaatctacctcgctacctcgcaaattaaccagaggcagcttcagaattaaacaggtcgaaagatctccaagaagtaaaagaataataatgcacatatctagaaacattttagaaaatgcaatacgaagaacaaaaaatacaatgccgtcttttcaaccatcatagcgaaagcgtagaagacgagactgtggaattcaggacatatttaacgtatgtttgccgaaggatgctgaagatggcttacaaactcaagttgacgaatatcgcgaccaaggtggctgaacgacgtgtgaagatagaccaagatctttgcccatccagctagtgctagttcaacacgctagcaccagctgtcgagccattgctagttcaacacgctagcaacgactgttctcctggctcgccttaaatatgctctcgctgccactactccttcgatttcccccagcggtgctctgcaccaacacggatgctcctccggtcgtctctggtaaatcagctcatcgcttgccgttgggaccatatcgttacaaagtgattgatcagactcatgctccacaagaccaacgctaggaaatgtgaagaacatagattatttagtttggagagcaattaaattactcttactataaactataattcgctcgcgcatatatacaccaaattggaagaacacctaagtgaaactcaatttggattcagaacaggtctcggaacgagggaagcacttttcagtttgcaagttctaatacaaagagccagggacgtgtatgcatgttttattgatttctagaaggtatttgacaaagtaccacatgagaaactaatcccaaccatcaagactcgatggcaacaacagaagactgatctcaacaacaataaaaagcaacagcgtgatttgaaaatgaactgtccgagatcttcacagaggttagacagcattgcatactgccaccaacctctttgacatctttagagaaaccttggatgaatcagaagaaggtattgcaataaatggcccacttataaacagtattatatatgcagatgatacagtattgctggcagatagtgcacagcggctccaaatgatgatggttgtagaaacatggaaccaataaggcctaaaactaagttgtaagaagacaaaaataatgatccttaataaaaacactaataaaataagctattttggctggaattgggctgcaatattagggatagctgggatcatagctacgaaataaaaacacaggtgttttgtaacggccttcggaagattctatgtaagttgaagttctgaatccttaatcaaagaatacatatctaccacatcatcaagattaagtatcaatatacacatcagaattcttagatgttacgtcttagtatcctcctatacaaagaatacctacctacctagtggtagatatgtattctttgtcctatacggagtagaaaactggagttttgcagtagatatcataaaacgattagagacatgtgaaatatgatgctaccgtcatgataagtgtctcatataaacacaaaacaactaacgtaactcttctccagaggctaagaaaagataaagctattattaacaccgtaaagcacagaaattggcttatttcggccacactatgcgtaatagtaaataccgacttctacagttgattatacaaggcaagattgatggcaactggtctaacactgcatgattgacggcaactggattgatggtctaacatcaaatgatttatttcgagctatagaatttcgagttatagaatcgaataagataagtcaatgtggtcgctaacatcactatatcataggtaccggtagaagaaggagaagatggtccacaagcgttggaggttacaacgtatagttgaggtatctcgaaatacactttttgaattaagatgatcacacagaatataaagaaaacagcaaaagagcaactacaaaaaaagagcttgactttatttactattattatacttaaagtttaaattcttcaattttgtacaccctgtacgtgatttcaattaataaccgtcataatttattattattgaattacaacttgtatataaaatcaaaacacatttaacagtcgctaatttattacaatcgtaacatattaaaaaataatattaatagaaatattttgcatgtaacatacattttttaacgatttactatataggcaactatgttaaaaaccgaaaacaagataatccgacagtataataaaacgaacaatagtgcttcactaagcgaaactgttgaaacttcaaaacactcatatggtaatgatgaaaagaagaagacgatatagtagaaatcactaattgaatcaaattccttaatttgtctattttatatattgtatatctatttatttctcggtctagattttggatgtgcgcaatggtacacatttgttaagttatgtggattcaagaaactaagattattgacagcgacaaatgtcaacaggctgacgtttgacgttgacgtttttatctatcaagacgtgtctcagacatagatcatagagaataatacatagattcgataagatacgaaaactagcttaacgcgaagcagttcatcggcagcagttatctttctctctctaattgcgcttagctttctctttctagcatatgatggccgctgcctctgtgtccgtgtcgttccattactcccacctcttggtagatacgctcacactcgtacgacagacaaagatagctagaccaccgtacttgatattggcgttacaccccaatgcattaagcggcatatacctagcctggtctacagtctcagaattatcacaaataataagtagaaacatcttttcacgtttgtcatgtttccaagtactatctgtgacggatatatgtgacaagagaagattaaacgtctatgtcaaatgccaaatggtgtcaaaagtcgaagtatatcctctacctaaatgtaccatattttacttaagaaaaattgtaaattataaatttcagtatcctttttgttagtatattgtatcccgacttcaatagtgccataaccctaaaaaatctgttttttttttgcctaacatgttccattaggcgttactttcattgtggaacaatgtcatataatttagttatcttagaatctgcatagtgcgcctatatcgttattaccatttcaggttttgtctctgtcagcattagcaaaagcgccacaaggtagcttgcgttatgctgtggtcgagagtggatgtgtcataagtactgttaatttttaaatattaccctaacatttgtgttactgcatttgttagctaagaaatttactcaagtaaaacttctctggtgccataccctgtgacatgacaggttgatacgccttaatccttgaattttgaatataggtgcccttgacaatagcgccttattataattcaacggtgaatttcagggtgtcaactaaaaataaatattggcattagattgacacataatcaacacgagtgcagaat

SEQ ID NO: 1099 - DNA, 4430 bp, Diabrotica virgifera
  SmartBlast Evalue=2E-35; Info=Endonuclease-reverse transcriptase n=1 Tax=Bombyx mori RepID=D5LB38_BOMMO
aacttatttttgtacagagtgtgcaaaatttacaattgaaatcagaattattgattttgtgacaaaatatatttgaactgtaaaatatttcgcttgtgcctcattttagaaaatataatatatacctatgtagatttttcaggtgactctgaaatataaatcaggtaatgatgctcaaccgacaatcagcagactaaaatttagattttttttaaattaaaattatatttaataacaatgctcgtatgtggttgagaacaaccccatagaacatatgtaatgcaattcagatatctgggcatagatacattaagcatctacgacccaggtaaaggacctgaggagtcaacaaagcatctgcaatagggcttttcatcgattgtcatttgttttgagcttctgtcatatgtcgtataatctgtgtaatattaatatacacggattatacgacatatgacagaagctcgaaacaaatgactgctaatgaaaagccctatgtaaggatgtctgcgggagatagtctagtcaaatccgtatatgcgcacagatagtaaaattagaatctacgcgacttgtatacgaccgatcatgacatatggcacagaagtgtgcgaagacaccaacaaaacgaaatatatgctaaggtttgccgaaatgaaaaccctaagaacaatagtggggaaaacaagaagagaccgggtgagaaatacaagcattagagagcaatgcaaaattcaagattttgtaagatggggaaggcagcgcaagaggatgtggtacaactatgtaagacgaatggatgataatagactcccaaaaattgccctagaaaacaacccgccctgttcaagaccccccggaagaccacctaaaagatggaggggtagttggcaatctacctcgcaggaaattaaccagaggcagcttcagaattaaacaggtcgaaagatctccaagaagtaaaagaataataatgcacatatctagaaacattttagaaaatgcaatacgaagaacaaaaaatacaatgccgtcttttcaaccatcatagcgaaagcgtagaagacgagactgtggaattcaggacatatttaacgtatgtttgccgaaggatgctgaagatggcttacaaactcaagttgacgaatatcgcgaccaaggtggctgaacgacgtgtgaagatagaccaagatctttgcccatccagctagtgctagttcaacacgctagcaccagctgtcgagccattgctagttcaacacgctagcaacgactgttctcctggctcgccttaaatatgctctcgctgccactactccttcgatttcccccagcggtgctctgcaccaacacggatgctcctccggtcgtctctggtaaatcagctcatcgcttgccgttgggaccatatcgttacaaagtgattgatcagactcatgctccacaagaccaacgctaggaaatgtgaagaacatagattatttagtttggagagcaattaaattactcttactataaactataattcgctcgcgcatatatacaccaaattggaagaacacctaagtgaaactcaatttggattcagaacaggtctcggaacgagggaagcacttttcagtttgcaagttctaatacaaagagccagggacgtgtatgcatgttttattgatttctagaaggtatttgacaaagtaccacatgagaaactaatcccaaccatcaagactcgatggcaacaacagaagactgatctcaacaacaataaaaagcaacagcgtgatttgaaaatgaactgtccgagatcttcacagaggttagacagcattgcatactgccaccaacctctttgacatctttagagaaaccttggatgaatcagaagaaggtattgcaataaatggcccacttataaacagtattatatatgcagatgatacagtattgctggcagatagtgcacagcggctccaaatgatgatggttgtagaaacatggaaccaataaggcctaaaactaagttgtaagaagacaaaaataatgatccttaataaaaacactaataaaataagctattttggctggaattgggctgcaatattagggatagctgggatcatagctacgaaataaaaacacaggtgttttgtaacggccttcggaagattctatgtaagttgaagttctgaatccttaatcaaagaatacatatctaccacatcatcaagattaagtatcaatatacacatcagaattcttagatgttacgtcttagtatcctcctatacaaagaatacctacctacctagtggtagatatgtattctttgtcctatacggagtagaaaactggagttttgcagtagatatcataaaacgattagagacatgtgaaatatgatgctaccgtcatgataagtgtctcatataaacacaaaacaactaacgtaactcttctccagaggctaagaaaagataaagctattattaacaccgtaaagcacagaaattggcttatttcggccacactatgcgtaatagtaaataccgacttctacagttgattatacaaggcaagattgatggcaactggtctaacactgcatgattgacggcaactggattgatggtctaacatcaaatgatttatttcgagctatagaatttcgagttatagaatcgaataagataagtcaatgtggtcgctaacatcactatatcataggtaccggtagaagaaggagaagatggtccacaagcgttggaggttacaacgtatagttgaggtatctcgaaatacactttttgaattaagatgatcacacagaatataaagaaaacagcaaaagagcaactacaaaaaaagagcttgactttatttactattattatacttaaagtttaaattcttcaattttgtacaccctgtacgtgatttcaattaataaccgtcataatttattattattgaattacaacttgtatataaaatcaaaacacatttaacagtcgctaatttattacaatcgtaacatattaaaaaataatattaatagaaatattttgcatgtaacatacattttttaacgatttactatataggcaactatgttaaaaaccgaaaacaagataatccgacagtataataaaacgaacaatagtgcttcactaagcgaaactgttgaaacttcaaaacactcatatggtaatgatgaaaagaagaagacgatatagtagaaatcactaattgaatcaaattccttaatttgtctattttatatattgtatatctatttatttctcggtctagattttggatgtgcgcaatggtacacatttgttaagttatgtggattcaagaaactaagattattgacagcgacaaatgtcaacaggctgacgtttgacgttgacgtttttatctatcaagacgtgtctcagacatagatcatagagaataatacatagattcgataagatacgaaaactagcttaacgcgaagcagttcatcggcagcagttatctttctctctctaattgcgcttagctttctctttctagcatatgatggccgctgcctctgtgtccgtgtcgttccattactcccacctcttggtagatacgctcacactcgtacgacagacaaagatagctagaccaccgtacttgatattggcgttacaccccaatgcattaagcggcatatacctagcctggtctacagtctcagaattatcacaaataataagtagaaacatcttttcacgtttgtcatgtttccaagtactatctgtgacggatatatgtgacaagagaagattaaacgtctatgtcaaatgccaaatggtgtcaaaagtcgaagtatatcctctacctaaatgtaccatattttacttaagaaaaattgtaaattataaatttcagtatcctttttgttagtatattgtatcccgacttcaatagtgccataaccctaaaaaatctgttttttttttgcctaacatgttccattaggcgttactttcattgtggaacaatgtcatataatttagttatcttagaatctgcatagtgcgcctatatcgttattaccatttcaggttttgtctctgtcagcattagcaaaagcgccacaaggtagcttgcgttatgctgtggtcgagagtggatgtgtcataagtactgttaatttttaaatattaccctaacatttgtgttactgcatttgttagctaagaaatttactcaagtaaaacttctctggtgccataccctgtgacatgacaggttgatacgccttaatccttgaattttgaatataggtgcccttgacaatagcgccttattataattcaacggtgaatttcagggtgtcaactaaaaataaatattggcattagattgacacataatcaacacgagtgcagaat

SEQ ID NO: 1100 - DNA, 3919 bp, Diabrotica virgifera
  SmartBlast Evalue=2E-35; Info=Endonuclease-reverse transcriptase n=1 Tax=Bombyx mori RepID=D5LB38_BOMMO
aacttatttttgtacagagtgtgcaaaatttacaattgaaatcagaattattgattttgtgacaaaatatatttgaactgtaaaatatttcgcttgtgcctcattttagaaaatataatatatacctatgtagatttttcaggtgactctgaaatataaatcaggtaatgatgctcaaccgacaatcagcagactaaaatttagattttttttaaattaaaattatatttaataacaatgctcgtatgtggttgagaacaaccccatagaacatatgtaatgcaattcagatatctgggcatagatacattaagcatctacgacccaggtaaaggacctgaggagtcaacaaagcatctgcaatagggcttttcatcgattgtcatttgttttgagcttctgtcatatgtcgtataatctgtgtaatattaatatacacggattatacgacatatgacagaagctcgaaacaaatgactgctaatgaaaagccctatgtaaggatgtctgcgggagatagtctagtcaaatccgtatatgcgcacagatagtaaaattagaatctacgcgacttgtatacgaccgatcatgacatatggcacagaagtgtgcgaagacaccaacaaaacgaaatatatgctaaggtttgccgaaatgaaaaccctaagaacaatagtggggaaaacaagaagagaccgggtgagaaatacaagcattagagagcaatgcaaaattcaagattttgtaagatggggaaggcagcgcaagaggatgtggtacaactatgtaagacgaatggatgataatagactcccaaaaattgccctagaaaacaacccgccctgttcaagaccccccggaagaccacctaaaagatggaggggtagttggcaatctacctcgcaacaatctacctcgctacctcgcaaattaaccagaggcagcttcagaattaaacaggtcgaaagatctccaagaagtaaaagaataataatgcacatatctagaaacattttagaaaatgcaatacgaagaacaaaaaatacaatgccgtcttttcaaccatcatagcgaaagcgtagaagacgagactgtggaattcaggacatatttaacgtatgtttgccgaaggatgctgaagatggcttacaaactcaagttgacgaatatcgcgaccaaggtggctgaacgacgtgtgaagatagaccaagatctttgcccatccagctagtgctagttcaacacgctagcaccagctgtcgagccattgctagttcaacacgctagcaacgactgttctcctggctcgccttaaatatgctctcgctgccactactccttcgatttcccccagcggtgctctgcaccaacacggatgctcctccggtcgtctctggtaaatcagctcatcgcttgccgttgggaccatatcgttacaaagtgattgatcagactcatgctccacaagaccaacgctaggaaatgtgaagaacatagattatttagtttggagagcaattaaattactcttactataaactataattcgctcgcgcatatatacaccaaattggaagaacacctaagtgaaactcaatttggattcagaacaggtctcggaacgagggaagcacttttcagtttgcaagttctaatacaaagagccagggacgtgtatgcatgttttattgatttctagaaggtatttgacaaagtaccacatgagaaactaatcccaaccatcaagactcgatggcaacaacagaagactgatctcaacaacaataaaaagcaacagcgtgatttgaaaatgaactgtccgagatcttcacagaggttagacagcattgcatactgccaccaacctctttgacatctttagagaaaccttggatgaatcagaagaaggtattgcaataaatggcccacttataaacagtattatatatgcagatgatacagtattgctggcagatagtgcacagcggctccaaatgatgatggttgtagaaacatggaaccaataaggcctaaaactaagttgtaagaagacaaaaataatgatccttaataaaaacactaataaaataagctattttggctggaattgggctgcaatattagggatagctgggatcatagctacgaaataaaaacacaggtgttttgtaacggccttcggaagattctatgtaagttgaagttctgaatccttaatcaaagaatacatatctaccacatcatcaagattaagtatcaatatacacatcagaattcttagatgttacgtcttagtatcctcctatacaaagaatacctacctacctagtggtagatatgtattctttgtcctatacggagtagaaaactggagttttgcagtagatatcataaaacgattagagacatgtgaaatatgatgctaccgtcatgataagtgtctcatataaacacaaaacaactaacgtaactcttctccagaggctaagaaaagataaagctattattaacaccgtaaagcacagaaattggcttatttcggccacactatgcgtaatagtaaataccgacttctacagttgattatacaaggcaagattgatggcaactggtctaacactgcatgattgacggcaactggattgatggtctaacatcaaatgatttatttcgagctatagaatttcgagttatagaatcgaataagataagtcaatgtggtcgctaacatcactatatcataggtaccggtagaagaaggagaagatggtccacaagcgttggaggttacaacgtatagttgaggtatctcgaaatacactttttgaattaagatgatcacacagaatataaagaaaacagcaaaagagcaactacaaaaaaagagcttgactttatttactattattatacttaaagtttaaattcttcaattttgtacaccctgtacgtgatttcaattaataaccgtcataatttattattattgaattacaacttgtatataaaatcaaaacacatttaacagtcgctaatttattacaatcgtaacatattaaaaaataatattaatagaaatattttgcatgtaacatacattttttaacgatttactatataggcaactatgttaaaaaccgaaaacaagataatccgacagtataataaaacgaacaatagtgcttcactaagcgaaactgttgaaacttcaaaacactcatatggtaatgatgaaaagaagaagacgatatagtagaaatcactaattgaatcaaattccttaatttgtctattttatatattgtatatctatttatttctcggtctagattttggatgtgcgcaatggtacacatttgttaagttatgtggattcaagaaactaagattattgacagcgacaaatgtcaacaggctgacgtttgacgttgacgtttttatctatcaagacgtgtctcagacatagatcatagagaataatacatagattcgataagatacgaaaactagcttaacgcgaagcagttcatcggcagcagttatctttctctctctaattgcgcttagctttctctttctagcatatgatggccgctgcctctgtgtccgtgtcgttccattactcccacctcttggtagatacgctcacagtcgtacgacagacaaagatagctagaccaccgtacttgatatcgacgtgacaccccgatgcattgtttagcatatccctagccagatctatccttgacatctctggttatcataccagagaggtctcttacaagcatatacagtgatgactaatcggcaatatagcgctaataactggcaaaacagcacaaaagatggaaaacgcactaagttgtgagataaaaagaaatgaaactagtcgagctgggatattgagcgatattaaccc

SEQ ID NO: 1101 - DNA, 3899 bp, Diabrotica virgifera
  SmartBlast Evalue=2E-35; Info=Endonuclease-reverse transcriptase n=1 Tax=Bombyx mori RepID=D5LB38_BOMMO
aacttatttttgtacagagtgtgcaaaatttacaattgaaatcagaattattgattttgtgacaaaatatatttgaactgtaaaatatttcgcttgtgcctcattttagaaaatataatatatacctatgtagatttttcaggtgactctgaaatataaatcaggtaatgatgctcaaccgacaatcagcagactaaaatttagattttttttaaattaaaattatatttaataacaatgctcgtatgtggttgagaacaaccccatagaacatatgtaatgcaattcagatatctgggcatagatacattaagcatctacgacccaggtaaaggacctgaggagtcaacaaagcatctgcaatagggcttttcatcgattgtcatttgttttgagcttctgtcatatgtcgtataatctgtgtaatattaatatacacggattatacgacatatgacagaagctcgaaacaaatgactgctaatgaaaagccctatgtaaggatgtctgcgggagatagtctagtcaaatccgtatatgcgcacagatagtaaaattagaatctacgcgacttgtatacgaccgatcatgacatatggcacagaagtgtgcgaagacaccaacaaaacgaaatatatgctaaggtttgccgaaatgaaaaccctaagaacaatagtggggaaaacaagaagagaccgggtgagaaatacaagcattagagagcaatgcaaaattcaagattttgtaagatggggaaggcagcgcaagaggatgtggtacaactatgtaagacgaatggatgataatagactcccaaaaattgccctagaaaacaacccgccctgttcaagaccccccggaagaccacctaaaagatggaggggtagttggcaatctacctcgcaggaaattaaccagaggcagcttcagaattaaacaggtcgaaagatctccaagaagtaaaagaataataatgcacatatctagaaacattttagaaaatgcaatacgaagaacaaaaaatacaatgccgtcttttcaaccatcatagcgaaagcgtagaagacgagactgtggaattcaggacatatttaacgtatgtttgccgaaggatgctgaagatggcttacaaactcaagttgacgaatatcgcgaccaaggtggctgaacgacgtgtgaagatagaccaagatctttgcccatccagctagtgctagttcaacacgctagcaccagctgtcgagccattgctagttcaacacgctagcaacgactgttctcctggctcgccttaaatatgctctcgctgccactactccttcgatttcccccagcggtgctctgcaccaacacggatgctcctccggtcgtctctggtaaatcagctcatcgcttgccgttgggaccatatcgttacaaagtgattgatcagactcatgctccacaagaccaacgctaggaaatgtgaagaacatagattatttagtttggagagcaattaaattactcttactataaactataattcgctcgcgcatatatacaccaaattggaagaacacctaagtgaaactcaatttggattcagaacaggtctcggaacgagggaagcacttttcagtttgcaagttctaatacaaagagccagggacgtgtatgcatgttttattgatttctagaaggtatttgacaaagtaccacatgagaaactaatcccaaccatcaagactcgatggcaacaacagaagactgatctcaacaacaataaaaagcaacagcgtgatttgaaaatgaactgtccgagatcttcacagaggttagacagcattgcatactgccaccaacctctttgacatctttagagaaaccttggatgaatcagaagaaggtattgcaataaatggcccacttataaacagtattatatatgcagatgatacagtattgctggcagatagtgcacagcggctccaaatgatgatggttgtagaaacatggaaccaataaggcctaaaactaagttgtaagaagacaaaaataatgatccttaataaaaacactaataaaataagctattttggctggaattgggctgcaatattagggatagctgggatcatagctacgaaataaaaacacaggtgttttgtaacggccttcggaagattctatgtaagttgaagttctgaatccttaatcaaagaatacatatctaccacatcatcaagattaagtatcaatatacacatcagaattcttagatgttacgtcttagtatcctcctatacaaagaatacctacctacctagtggtagatatgtattctttgtcctatacggagtagaaaactggagttttgcagtagatatcataaaacgattagagacatgtgaaatatgatgctaccgtcatgataagtgtctcatataaacacaaaacaactaacgtaactcttctccagaggctaagaaaagataaagctattattaacaccgtaaagcacagaaattggcttatttcggccacactatgcgtaatagtaaataccgacttctacagttgattatacaaggcaagattgatggcaactggtctaacactgcatgattgacggcaactggattgatggtctaacatcaaatgatttatttcgagctatagaatttcgagttatagaatcgaataagataagtcaatgtggtcgctaacatcactatatcataggtaccggtagaagaaggagaagatggtccacaagcgttggaggttacaacgtatagttgaggtatctcgaaatacactttttgaattaagatgatcacacagaatataaagaaaacagcaaaagagcaactacaaaaaaagagcttgactttatttactattattatacttaaagtttaaattcttcaattttgtacaccctgtacgtgatttcaattaataaccgtcataatttattattattgaattacaacttgtatataaaatcaaaacacatttaacagtcgctaatttattacaatcgtaacatattaaaaaataatattaatagaaatattttgcatgtaacatacattttttaacgatttactatataggcaactatgttaaaaaccgaaaacaagataatccgacagtataataaaacgaacaatagtgcttcactaagcgaaactgttgaaacttcaaaacactcatatggtaatgatgaaaagaagaagacgatatagtagaaatcactaattgaatcaaattccttaatttgtctattttatatattgtatatctatttatttctcggtctagattttggatgtgcgcaatggtacacatttgttaagttatgtggattcaagaaactaagattattgacagcgacaaatgtcaacaggctgacgtttgacgttgacgtttttatctatcaagacgtgtctcagacatagatcatagagaataatacatagattcgataagatacgaaaactagcttaacgcgaagcagttcatcggcagcagttatctttctctctctaattgcgcttagctttctctttctagcatatgatggccgctgcctctgtgtccgtgtcgttccattactcccacctcttggtagatacgctcacagtcgtacgacagacaaagatagctagaccaccgtacttgatatcgacgtgacaccccgatgcattgtttagcatatccctagccagatctatccttgacatctctggttatcataccagagaggtctcttacaagcatatacagtgatgactaatcggcaatatagcgctaataactggcaaaacagcacaaaagatggaaaacgcactaagttgtgagataaaaagaaatgaaactagtcgagctgggatattgagcgatattaaccc

SEQ ID NO: 1102 - DNA, 2715 bp, Diabrotica virgifera
  SmartBlast Evalue=1E-105; Info=Nipsnap n=2 Tax=Culicini RepID= Q17Q08_AEDAE
cctcatcctagtgaagtgagagataaccttttaatgacatcaaaaatataaaaatttagtaactacaaaaaatggccaatcttttcaaatttttcaataagttgcctccaaattttagatcagtttcaacaactactaccaaaaatgatgcctggttatctaagatttttgttagaaaaattgaacctacaaaggaatcacacagtagaatgttaagcgataaggaaattatctactctttgcagacacacaactatagacccgattctaaagtagcgtatttacaaaatgtaaaaaataaagtggactatataaaagcacaagattctttatcaaaagaagttgaactagtaggttcatggaccgtaaatgtaggagaccaagatcaagctctacatttatggaagttcacaggaggttttgatatgattgatcggtataacgattttacaggaaaaaaccaggaattccaacgtctaaatgaagaacaaggaaaactggttagatcccgccacttgcaatatcttctagcatttagttactggccccaaattctaatgcgacaacccaaaaacatttatgaaattcgtagctacgctctaaaacctggaactatgatcgagtggggtaataactgggctagggcaatcaactacaggcaaaataatgatgaagcatttgctggattcttttcacaaattggtagactatataatgttcaccatatttggtgttattctagtttgaacggcagaaaagaaactagggaaagtgcctggaggtccccaggttgggatgaatgtgtcgcttatacagtaccgttgatcagagaaatgcattgtaggattatggtaccaactgaattctcccctactctttaaatgtgaacaagctcttcaaaaccttattttttaattgtatgaatattattatctataacgccgcgaaatagttggtatttcagttagcgatataatttaaacgaaaagtctataaataactacaacagtatacttagtttttttcacaacgtaaatgtacattctctgatttgttaatacatagttctttttgcatttgacattaaaaataacttaagtgagtgtgtgaactttactaccatattcttttgctgatattaaaatggaaatctgtcatataaaatatctttattttaaaaatattatactcagtttgtataaatactcactctttaaaattttttagaacatttgctaacttctaaaaaatactgtccgaagaaaatttcagaattacttactaaatttgtttaccaaatgtggcaacggtatttttccaaaaacgacaaaatagtattacctaaattcttcttttggctgagatgccatgcatgtttaaaaaatcttccatcattcatctgtctgtcagctgaaaacttatgtatcctctccgcccgttcacacggcatacaccttacgatagtttattcaaaactatattttaatcgaatcgagacagcctgttaagacatgatgcacgatacgataatttaccactgtttcttgtactgcactacttgagaaaactaaacaactaattaaaaatttccctagctatttggtgttcgactaggtcgacaaaattcgaatcatgtgaacgagggtatctacagtcggaaagtgaaggaatacccatgaacgagcatataaagcacgctgtgttttcctgtcaccgtgtcacaaagaaaattgtccagtgcaagtacatgtaacaataattattacatgtacttgcgctggtcaattttttgtctgacacggtggcaggagtgtacagcgtgttttgtatgttcgttcatgggtgttctttcggttttcctactgtagatacaagcgccactgacgttcgatttaaatttttttatcgcatcacggcatacggtttgccagtgacaaaataaaatttaaatttggacgtacggcgtaaaattttcgagggtgatatacaatcgaattgtctgaacgccctaatttaaaacgtatgtgccactgagcaattagacatttctatcgatttgaacaaaaatccgaatgcgtaccgttcggacgggctgttacagttgaatgttacgctatcatcaaaaagtttttacattttaagcctctcttaccctctttctttttctctctagtgttagtccttgaaaagtgtaatgttctctccataatatatgtttcttggcgagtcgtccacgatttcttaatcccttgttttaatggagtttttgaatttgctcttttgaattgactagtctcttgccctaacggagtttttgaaccagcttagccaggtcttgttgaaattgttattctggtacaactatcaatttaaaaacatttatgtagtgatgcttttcgtgtgagcattcttctcatgaagcgataaacgtattatagattcgtcgtttgtgtagagaataaaaatattcatactattattaatcgtgtgaaagggtttgtaaaagttgtataccggtattttaatgctatcataatgctatcctaactccaggttgcttttattttgtttataaatatatgtatatgtatatagtttttttttataaaattttgtagtagtgcacaaactacattctatgtgtagaaatcagtgtatgaaaactatttaataattttaaaatccaaatgattgtggtattgttattttttcttt

SEQ ID NO: 1103 - DNA, 2517 bp, Diabrotica virgifera
  SmartBlast Evalue=1E-105; Info=Nipsnap n=2 Tax=Culicini RepID= Q17Q08_AEDAE
cctcatcctagtgaagtgagagataaccttttaatgacatcaaaaatataaaaatttagtaactacaaaaaatggccaatcttttcaaatttttcaataagttgcctccaaattttagatcagtttcaacaactactaccaaaaatgatgcctggttatctaagatttttgttagaaaaattgaacctacaaaggaatcacacagtagaatgttaagcgataaggaaattatctactctttgcagacacacaactatagacccgattctaaagtagcgtatttacaaaatgtaaaaaataaagtggactatataaaagcacaagattctttatcaaaagaagttgaactagtaggttcatggaccgtaaatgtaggagaccaagatcaagctctacatttatggaagttcacaggaggttttgatatgattgatcggtataacgattttacaggaaaaaaccaggaattccaacgtctaaatgaagaacaaggaaaactggttagatcccgccacttgcaatatcttctagcatttagttactggccccaaattctaatgcgacaacccaaaaacatttatgaaattcgtagctacgctctaaaacctggaactatgatcgagtggggtaataactgggctagggcaatcaactacaggcaaaataatgatgaagcatttgctggattcttttcacaaattggtagactatataatgttcaccatatttggtgttattctagtttgaacggcagaaaagaaactagggaaagtgcctggaggtccccaggttgggatgaatgtgtcgcttatacagtaccgttgatcagagaaatgcattgtaggattatggtaccaactgaattctcccctactctttaaatgtgaacaagctcttcaaaaccttattttttaattgtatgaatattattatctataacgccgcgaaatagttggtatttcagttagcgatataatttaaacgaaaagtctataaataactacaacagtatacttagtttttttcacaacgtaaatgtacattctctgatttgttaatacatagttctttttgcatttgacattaaaaataacttaagtgagtgtgtgaactttactaccatattcttttgctgatattaaaatggaaatctgtcatataaaatatctttattttaaaaatattatactcagtttgtataaatactcactctttaaaattttttagaacatttgctaacttctaaaaaatactgtccgaagaaaatttcagaattacttactaaatttgtttaccaaatgtggcaacggtatttttccaaaaacgacaaaatagtattacctaaattcttcttttggctgagatgccatgcatgtttaaaaaatcttccatcattcatctgtctgtcagctgaaaacttatgtatcctctccgcccgttcacacggcatacaccttacgatagtttattcaaaactatattttaatcgaatcgagacagcctgttaagacatgatgcacgatacgataatttaccactgtttcttgtactgcactacttgagaaaactaaacaactaattaaaaatttccctagctatttggtgttcgactaggtcgacaaaattcgaatcatgtgaacgagggtgttctttcggttttcctactgtagatacaagcgccactgacgttcgatttaaatttttttatcgcatcacggcatacggtttgccagtgacaaaataaaatttaaatttggacgtacggcgtaaaattttcgagggtgatatacaatcgaattgtctgaacgccctaatttaaaacgtatgtgccactgagcaattagacatttctatcgatttgaacaaaaatccgaatgcgtaccgttcggacgggctgttacagttgaatgttacgctatcatcaaaaagtttttacattttaagcctctcttaccctctttctttttctctctagtgttagtccttgaaaagtgtaatgttctctccataatatatgtttcttggcgagtcgtccacgatttcttaatcccttgttttaatggagtttttgaatttgctcttttgaattgactagtctcttgccctaacggagtttttgaaccagcttagccaggtcttgttgaaattgttattctggtacaactatcaatttaaaaacatttatgtagtgatgcttttcgtgtgagcattcttctcatgaagcgataaacgtattatagattcgtcgtttgtgtagagaataaaaatattcatactattattaatcgtgtgaaagggtttgtaaaagttgtataccggtattttaatgctatcataatgctatcctaactccaggttgcttttattttgtttataaatatatgtatatgtatatagtttttttttataaaattttgtagtagtgcacaaactacattctatgtgtagaaatcagtgtatgaaaactatttaataattttaaaatccaaatgattgtggtattgttattttttcttt

SEQ ID NO: 1104 - DNA, 2207 bp, Diabrotica virgifera
  SmartBlast Evalue=1E-105; Info=Nipsnap n=2 Tax=Culicini RepID= Q17Q08_AEDAE
cctcatcctagtgaagtgagagataaccttttaatgacatcaaaaatataaaaatttagtaactacaaaaaatggccaatcttttcaaatttttcaataagttgcctccaaattttagatcagtttcaacaactactaccaaaaatgatgcctggttatctaagatttttgttagaaaaattgaacctacaaaggaatcacacagtagaatgttaagcgataaggaaattatctactctttgcagacacacaactatagacccgattctaaagtagcgtatttacaaaatgtaaaaaataaagtggactatataaaagcacaagattctttatcaaaagaagttgaactagtaggttcatggaccgtaaatgtaggagaccaagatcaagctctacatttatggaagttcacaggaggttttgatatgattgatcggtataacgattttacaggaaaaaaccaggaattccaacgtctaaatgaagaacaaggaaaactggttagatcccgccacttgcaatatcttctagcatttagttactggccccaaattctaatgcgacaacccaaaaacatttatgaaattcgtagctacgctctaaaacctggaactatgatcgagtggggtaataactgggctagggcaatcaactacaggcaaaataatgatgaagcatttgctggattcttttcacaaattggtagactatataatgttcaccatatttggtgttattctagtttgaacggcagaaaagaaactagggaaagtgcctggaggtccccaggttgggatgaatgtgtcgcttatacagtaccgttgatcagagaaatgcattgtaggattatggtaccaactgaattctcccctactctttaaatgtgaacaagctcttcaaaaccttattttttaattgtatgaatattattatctataacgccgcgaaatagttggtatttcagttagcgatataatttaaacgaaaagtctataaataactacaacagtatacttagtttttttcacaacgtaaatgtacattctctgatttgttaatacatagttctttttgcatttgacattaaaaataacttaagtgagtgtgtgaactttactaccatattcttttgctgatattaaaatggaaatctgtcatataaaatatctttattttaaaaatattatactcagtttgtataaatactcactctttaaaattttttagaacatttgctaacttctaaaaaatactgtccgaagaaaatttcagaattacttactaaatttgtttaccaaatgtggcaacggtatttttccaaaaacgacaaaatagtattacctaaattcttcttttggctgagatgccatgcatgtttaaaaaatcttccatcattcatctgtctgtcagctgaaaacttatgtatcctctccgcccgttcacacggcatacaccttacgatagtttattcaaaactatattttaatcgaatcgagacagcctgttaagacatgatgcacgatacgataatttaccactgtttcttgtactgcactacttgagaaaactaaacaactaattaaaaatttccctagctatttggtgttcgactaggtcgacaaaattcgaatcatgtgaacgagggtatctacagtcggaaagtgaaggaatacccatgaacgagcatataaagcacgctgtgttttcctgtcaccgtgtcacaaagaaaattgtccagtgcaagtacatgtaacaataattattacatgtacttgcgctggtcaattttttgtgtgacacggtgacgggaggatacagcgtgttttagtatgctcattcatgggtgtcctttcatttttcctactgtatatacagtttaaaacaaataaaataaaatataattccgtcttctgcaaaggaaaaacaatattaaactttattacagttatccgatcataatagcaacattaaaataataccataaacaatatatatagaataacaatctcgctacgttaaatcaacgtagccttttttttggactgaggtggaacgctcttagctaactagggaagatgtccctagtactgttggactcggacaggagaggagaacacgctagggcccacagaccagagtaggtccatgcgtcccgcgtgccccccataaccagccgcctaccaactaaaaccaccccctcttccgac

SEQ ID NO: 1105 - DNA, 3273 bp, Diabrotica virgifera
  SmartBlast Evalue=2E-60; Info=Charged multivesicular body protein 4b n=2 Tax=Formicidae RepID=E2C316_9HYME
aatttttgagaattagtaattggtttcgtatttttttcttaacaaaagggcaaaatgagcttttttggaaaattgttcggggggaaaaaggaagagatagcccctagtcctggggaggctattcaaaaactcagagagactgaagaaatgttaataaaaaaacaggattttttagaaaagaagatagaagaatttaccatggtagcaaagaaaaatgcgtcgaaaaataaaagagttgcactccaagccctcaaaaagaagaaacgattggaaaagacccaactacaaatagatggaacccttacaactattgaaatgcagagggaagccctcgaaggagctagcacaaatactgctgtattagattctatgaaaaatgctgcagatgcccttaagaaagctcataagaatttgaatgtagatgatgttcacgatatcatggatgacatagccgaacaacacgacatagccaacgaaatcacaaacgctattagcaatcctgtcggattcaccgacgatctggatgacgatgaattagaaaaagaattagaagagctcgaacaagaaggattggaagaagacctgctccaagtgccaggtccaactcaactgccggctgtgcctgctgatgcagttgctactaaaccaatcaaaccagcagctaaaaaagttgaagatgatgacgatatgaaagaattggaagcctgggcctcgtaaaattcctgaaatctggatatttgtaaacgaaatcacccatctaagatgaaaacattataaatatataggtaataacagctaaaaacgtttcaatgtagaacaagcttttgctgaaaaggcgtcttgcaaaaaatgttgataatttagaattctctatatattatatatttgccctttaaggaaagatttcttttatagtcatagttcaaccaaacattttataaattagaatacaggggtgtcagaattctacgtgaatttattgaaaaaaaagaactttccttaaagttggcataatgatatttttgaaattatgtaaataggtatatgtatgctcttactaacggttttaatattgggtttagaagcaccttaattttatttttatacaaggtagtaacattttttcattgtaatttgttaaaaaatattgtataacgcaaaaaatggtgtgataaagcaaaatattattgagtgcttattttcttattttattaaaagatcttatttacgttaaatctaaatatattgggtatctcagaatatgttaacaaaggtttcttgtatcaacagaaaaatacaaacttattcattattgtggttcatttgattatgcttgtgtatatttaatctgccataaacaagttttgataaatgtcactgctctgtactttttgtttttctgactgtagtttctgtcgtttgtaattccttggtctcggccatcgcccatacacacatagggaatgttgtataaaagaaatgatagtagactagcaatggcccgaacagcaagaattaaataattaaaatatggaaagactgaatactaagctgagattggtcaaagcccttatttttcctattgctatatacgcagctgaaacatggactctcaaaaaaatcaatcgaagtaagatcgaagccttcgaaatgtaggtctacagaattattgtacccgtgtcctggagagaacacagaaccaacctgtcaattctgaaagagcttcatataaaagacaaggtattaaaaaaagtataccgaccatacttaaattactttggtaaagtaacgattactatacgaagaggcaaatcgttactttgattactctgattacttcgtaccaatcgtatcagagcgagtaacgactattgtatctactttgattacttcgtatcagagcgaataacgactattgtatctactttgattactctgattacttcgtaccaatcgtatcagagcgagtaacaactattgtatctactttgattattctgattacttcgtaccaatcgtatcagagcgagtaacaactattgtcagggccgcgtttaggtcaaatgacgccctaggcaattctctagtagccgcccttcaaacatgtaccatttttgcgaaaaaaaaatgcaagcagaattttttatttaaataagaatgttattgcacaaatctcggtgttcttcaaataatgtttagaaatgtgttaaaaatattctttattttacatcaggcgtaatgttacatattactattataagtatgtttgagcgtttggaactgtgtccaatgcatgcgttttaatgcatgatacgtagaaattgcctgtttgtagccgcacctacttgttcgattttaaatgagagatgcattgaaaacattactcaagcactatgtgtttatagctttgtttaacaataaaaaaattaatttttagcaatgcaaataatcaaaaccggtataatttgactgcactttcaaatgcggtaagcagaattgctattttattttttaatcaaaagttattcggattcaaaaattgcaatttttcgatattttgaaagttcaaccgcgtttatctcgaaaaccatgcatcctacgaaaaaacttgtaagaacattttttgcttagaattacccaaaaaatataaaaaatgttttattttgcgaaaaatcgatgttatgtaattcctcaagttctttgtttataacaaacttatcgacatccggatcaactgttacccaaaaaattcgtgttctacgggtcaaaatacgtaaaaaaacttgggtaagtccatctaaataaaggagcccgtagcaccccctcttggccacagcactaatttgtttataagccaaaaaattgtttacttataactttgaaacatttctgaggctgcttaaataatcagatttcaattcggtaaagtgcattttagataggtggagtgcttctttatgttatgtaaaaaaattgacaaatctttgtctgttctagtttttgttgtgcaagattttaaaaaactttaactttttgaaaagtttagattgcaaagtttttatgcaggaatctagtgaagtcattttaatgaaatttggtggacggttttagcacattacaaggattttctaagcgagttaggaaggttccaggtgtaacctaagtgatggaaaacattgaatagggacatgcttgttttgccccctttattttgtgtttgttgctattttgctgcaagggtgatagtttaagacatttttaaccaatcgtatt

SEQ ID NO: 1106 - DNA, 1185 bp, Diabrotica virgifera
aatctggatatttttgggaaagttctggttttttaaaatctttctgaacaaaaactaaaccatttagaagttggctaatttttttacatttaaaaaggtgctctacctatctaatgcactttgcagcattgaaatcggattatttaaggggcctcagcaatgttttaaattataaacaattttttggcttataaaaaaatagctttgtttaataataaaaaaattagtttttagcaatgcaaataattaaaaccagtataatttgacttaaacgttcaaatgctgtcagcagaattgctattttattttttaatcaaaacttattcttgttcaaaattgcaatttttcgattttttgaatgttccaccgcgtttatctcgaaaaccatgcatcctacgaaaaaacttgtaagaacattttttgcttagaattacccaaaaaatataaaaaatgttttattttgcgaaaaatcgatgttatgtaattcctcaagttctttgtttataacaatcttatcgacatccggatcaactgttacccaaaaaattcgtgttctacgggtcaaaatacataaaaaaacttgggtaagtccatctaaataaaggagcccgtagcaccccctcttggccacagcactaatttgtttataagccaaaaaattgtttacttataactttgaaacatttctgaggctgcttaaataatcagatttcaattcggtaaagtgcattttagataggtggagtgcttctttatgttatgtaaaaaaattgacaaatctttgtctgttctagtttttgttgtgcaagattttaaaaactttaactttttgaaaagtttagattgcaaagtttttatgcaaaatctgtaagtcattttaatgaaatttggtggacggttttagcacattacaagaattttctaagcgagttaggaaggttccaggtgtaacctaagtgatggaaaaacattgaataggacaggcttgttttgcccccttattttatatttattgctattttgcagcaagggtgataatttaagacatttttaaccaatcgtatttgatagaaaatttaattatctttgttttatttctatacgactttgttccaaaatgaatcgttttggagttataagcaaagaaagtagaaaaaaacgaaatttttgaaattttaaacattt

SEQ ID NO: 1107 - DNA, 1176 bp, Diabrotica virgifera
aatctggatatttttgggaaagttctggttttttaaaatctttctgaacaaaaactaaaccatttagaagttggctaatttttttacatttaaaaaggtgctctacctatctaatgcactttgcagcattgaaatcggattatttaaggggcctcagcaatgttttaaattataaacaattttttggcttataaaaaaatagctttgtttaataataaaaaaattagtttttagcaatgcaaataattaaaaccagtataatttgacttaaacgttcaaatgctgtcagcagaattgctattttattttttaatcaaaacttattcttgttcaaaattgcaatttttcgattttttgaatgttccaccgcgtttatctcgaaaaccatgcatcctacgaaaaaacttgtaagaacattttttgcttagaattacccaaaaaatataaaaaatgttttattttgcgaaaaatcgatgttatgtaattcctcaagttctttgtttataacaatcttatcgacatccggatcaactgttacccaaaaaattcgtgttctacgggtcaaaatacataaaaaaacttgggtaagtccatctaaataaaggagcccgtagcaccccctcctggccacagcactaatttgtttataagccaaaaaattgtttataactttgaaacattgctgaggctgcttaaacaatccgatttcaattctgtaaagtgcgttagataggtggagtgcttctttatatgtaaaaaaattgacaaatctttgtctgttctagtttttgttgtgcaagattttaaaaactttaactttttgaaaagtttagattgcaaagtttttatgcaaaatctgtaagtcattttaatgaaatttggtggacggttttagcacattacaagaattttctaagcgagttaggaaggttccaggtgtaacctaagtgatggaaaaacattgaataggacaggcttgttttgcccccttattttatatttattgctattttgcagcaagggtgataatttaagacatttttaaccaatcgtatttgatagaaaatttaattatctttgttttatttctatacgactttgttccaaaatgaatcgttttggagttataagcaaagaaagtagaaaaaaacgaaatttttgaaattttaaacattt

SEQ ID NO: 1108 - DNA, 1185 bp, Diabrotica virgifera
aatctggatatttttgggaaagttctggttttttaaaatctttctgaacaaaaactaaaccatttagaagttggctaatttttttacatttaaaaaggtgctctacctatctaatgcactttgcagcattgaaatcggattatttaaggggcctcagcaatgttttaaattataaacaattttttggcttataaaaaaatagctttgtttaataataaaaaaattagtttttagcaatgcaaataattaaaaccagtataatttgacttaaacgttcaaatgctgtcagcagaattgctattttattttttaatcaaaacttattcttgttcaaaattgcaatttttcgattttttgaatgttccaccgcgtttatctcgaaaaccatgcatcctacgaaaaaacttgtaagaacattttttgcttagaattacccaaaaaatataaaaaatgttttattttgcgaaaaatcgatgttatgtaattcctcaagttctttgtttataacaaacttatcgacatccggatcaactgttacccaaaaaattcgtgttctacgggtcaaaatacgtaaaaaaacttgggtaagtccatctaaataaaggagcccgtagcaccccctcttggccacagcactaatttgtttataagccaaaaaattgtttacttataactttgaaacatttctgaggctgcttaaataatcagatttcaattcggtaaagtgcattttagataggtggagtgcttctttatgttatgtaaaaaaattgacaaatctttgtctgttctagtttttgttgtgcaagattttaaaaactttaactttttgaaaagtttagattgcaaagtttttatgcaaaatctgtaagtcattttaatgaaatttggtggacggttttagcacattacaagaattttctaagcgagttaggaaggttccaggtgtaacctaagtgatggaaaaacattgaataggacaggcttgttttgcccccttattttatatttattgctattttgcagcaagggtgataatttaagacatttttaaccaatcgtatttgatagaaaatttaattatctttgttttatttctatacgactttgttccaaaatgaatcgttttggagttataagcaaagaaagtagaaaaaaacgaaatttttgaaattttaaacattt

SEQ ID NO: 1109 - DNA, 1191 bp, Diabrotica virgifera
aatttcattaaggtcgatttaatagattttgcataataaatttgcaatctaaatattttggaaaagttctaattttttgaaatctttctgaacaaaaactaaaccatttagaagttggctaatttttttacatacaaaaatcggattatttaaggggcctcagcaatgttttaaattataaacaattttttggcttataaaaaaatagctttgtttaataataaaaaaattagtttttagcaatgcaaataattaaaaccagtataatttgacttaaacgttcaaatgctgtcagcagaattgctattttattttttaatcaaaacttattcttgttcaaaattgcaatttttcgattttttgaatgttccaccgcgtttatctcgaaaaccatgcatcctacgaaaaaacttgtaagaacattttttgcttagaattacccaaaaaatataaaaaatgttttattttgcgaaaaatcgatgttatgtaattcctcaagttctttgtttataacaatcttatcgacatccggatcaactgttacccaaaaaattcgtgttctacgggtcaaaatacataaaaaaacttgggtaagtccatctaaataaaggagcccgtagcaccccctcttggccacagcactaatttgtttataagccaaaaaattgtttacttataactttgaaacatttctgaggctgcttaaataatcagatttcaattcggtaaagtgcattttagataggtggagtgcttctttatgttatgtaaaaaaattgacaaatctttgtctgttctagtttttgttgtgcaagattttaaaaactttaactttttgaaaagtttagattgcaaagtttttatgcaaaatctgtaagtcattttaatgaaatttggtggacggttttagcacattacaagaattttctaagcgagttaggaaggttccaggtgtaacctaagtgatggaaaaacattgaataggacaggcttgttttgcccccttattttatatttattgctattttgcagcaagggtgataatttaagacatttttaaccaatcgtatttgatagaaaatttaattatctttgttttatttctatacgactttgttccaaaatgaatcgttttggagttataagcaaagaaagtagaaaaaaacgaaatttttgaaattttaaacattt

SEQ ID NO: 1110 - DNA, 1182 bp, Diabrotica virgifera
aatttcattaaggtcgatttaatagattttgcataataaatttgcaatctaaatattttggaaaagttctaattttttgaaatctttctgaacaaaaactaaaccatttagaagttggctaatttttttacatacaaaaatcggattatttaaggggcctcagcaatgttttaaattataaacaattttttggcttataaaaaaatagctttgtttaataataaaaaaattagtttttagcaatgcaaataattaaaaccagtataatttgacttaaacgttcaaatgctgtcagcagaattgctattttattttttaatcaaaacttattcttgttcaaaattgcaatttttcgattttttgaatgttccaccgcgtttatctcgaaaaccatgcatcctacgaaaaaacttgtaagaacattttttgcttagaattacccaaaaaatataaaaaatgttttattttgcgaaaaatcgatgttatgtaattcctcaagttctttgtttataacaatcttatcgacatccggatcaactgttacccaaaaaattcgtgttctacgggtcaaaatacataaaaaaacttgggtaagtccatctaaataaaggagcccgtagcaccccctcctggccacagcactaatttgtttataagccaaaaaattgtttataactttgaaacattgctgaggctgcttaaacaatccgatttcaattctgtaaagtgcgttagataggtggagtgcttctttatatgtaaaaaaattgacaaatctttgtctgttctagtttttgttgtgcaagattttaaaaactttaactttttgaaaagtttagattgcaaagtttttatgcaaaatctgtaagtcattttaatgaaatttggtggacggttttagcacattacaagaattttctaagcgagttaggaaggttccaggtgtaacctaagtgatggaaaaacattgaataggacaggcttgttttgcccccttattttatatttattgctattttgcagcaagggtgataatttaagacatttttaaccaatcgtatttgatagaaaatttaattatctttgttttatttctatacgactttgttccaaaatgaatcgttttggagttataagcaaagaaagtagaaaaaaacgaaatttttgaaattttaaacattt

SEQ ID NO: 1111 - DNA, 1191 bp, Diabrotica virgifera
aatttcattaaggtcgatttaatagattttgcataataaatttgcaatctaaatattttggaaaagttctaattttttgaaatctttctgaacaaaaactaaaccatttagaagttggctaatttttttacatacaaaaatcggattatttaaggggcctcagcaatgttttaaattataaacaattttttggcttataaaaaaatagctttgtttaataataaaaaaattagtttttagcaatgcaaataattaaaaccagtataatttgacttaaacgttcaaatgctgtcagcagaattgctattttattttttaatcaaaacttattcttgttcaaaattgcaatttttcgattttttgaatgttccaccgcgtttatctcgaaaaccatgcatcctacgaaaaaacttgtaagaacattttttgcttagaattacccaaaaaatataaaaaatgttttattttgcgaaaaatcgatgttatgtaattcctcaagttctttgtttataacaaacttatcgacatccggatcaactgttacccaaaaaattcgtgttctacgggtcaaaatacgtaaaaaaacttgggtaagtccatctaaataaaggagcccgtagcaccccctcttggccacagcactaatttgtttataagccaaaaaattgtttacttataactttgaaacatttctgaggctgcttaaataatcagatttcaattcggtaaagtgcattttagataggtggagtgcttctttatgttatgtaaaaaaattgacaaatctttgtctgttctagtttttgttgtgcaagattttaaaaactttaactttttgaaaagtttagattgcaaagtttttatgcaaaatctgtaagtcattttaatgaaatttggtggacggttttagcacattacaagaattttctaagcgagttaggaaggttccaggtgtaacctaagtgatggaaaaacattgaataggacaggcttgttttgcccccttattttatatttattgctattttgcagcaagggtgataatttaagacatttttaaccaatcgtatttgatagaaaatttaattatctttgttttatttctatacgactttgttccaaaatgaatcgttttggagttataagcaaagaaagtagaaaaaaacgaaatttttgaaattttaaacattt

SEQ ID NO: 1112 - DNA, 1147 bp, Diabrotica virgifera
tctttctgaacaaaaagtagaccatttagaagttgtctaatttttttacatataaagaggcgctccacctatccaatacactccacagaattaaaatcggattatttaaggggcctcagcaatgttttaaattataaacaattttttggcttataaaaaaatagctttgtttaataataaaaaaattagtttttagcaatgcaaataattaaaaccagtataatttgacttaaacgttcaaatgctgtcagcagaattgctattttattttttaatcaaaacttattcttgttcaaaattgcaatttttcgattttttgaatgttccaccgcgtttatctcgaaaaccatgcatcctacgaaaaaacttgtaagaacattttttgcttagaattacccaaaaaatataaaaaatgttttattttgcgaaaaatcgatgttatgtaattcctcaagttctttgtttataacaatcttatcgacatccggatcaactgttacccaaaaaattcgtgttctacgggtcaaaatacataaaaaaacttgggtaagtccatctaaataaaggagcccgtagcaccccctcttggccacagcactaatttgtttataagccaaaaaattgtttacttataactttgaaacatttctgaggctgcttaaataatcagatttcaattcggtaaagtgcattttagataggtggagtgcttctttatgttatgtaaaaaaattgacaaatctttgtctgttctagtttttgttgtgcaagattttaaaaactttaactttttgaaaagtttagattgcaaagtttttatgcaaaatctgtaagtcattttaatgaaatttggtggacggttttagcacattacaagaattttctaagcgagttaggaaggttccaggtgtaacctaagtgatggaaaaacattgaataggacaggcttgttttgcccccttattttatatttattgctattttgcagcaagggtgataatttaagacatttttaaccaatcgtatttgatagaaaatttaattatctttgttttatttctatacgactttgttccaaaatgaatcgttttggagttataagcaaagaaagtagaaaaaaacgaaatttttgaaattttaaacattt

SEQ ID NO: 1113 - DNA, 1138 bp, Diabrotica virgifera
tctttctgaacaaaaagtagaccatttagaagttgtctaatttttttacatataaagaggcgctccacctatccaatacactccacagaattaaaatcggattatttaaggggcctcagcaatgttttaaattataaacaattttttggcttataaaaaaatagctttgtttaataataaaaaaattagtttttagcaatgcaaataattaaaaccagtataatttgacttaaacgttcaaatgctgtcagcagaattgctattttattttttaatcaaaacttattcttgttcaaaattgcaatttttcgattttttgaatgttccaccgcgtttatctcgaaaaccatgcatcctacgaaaaaacttgtaagaacattttttgcttagaattacccaaaaaatataaaaaatgttttattttgcgaaaaatcgatgttatgtaattcctcaagttctttgtttataacaatcttatcgacatccggatcaactgttacccaaaaaattcgtgttctacgggtcaaaatacataaaaaaacttgggtaagtccatctaaataaaggagcccgtagcaccccctcctggccacagcactaatttgtttataagccaaaaaattgtttataactttgaaacattgctgaggctgcttaaacaatccgatttcaattctgtaaagtgcgttagataggtggagtgcttctttatatgtaaaaaaattgacaaatctttgtctgttctagtttttgttgtgcaagattttaaaaactttaactttttgaaaagtttagattgcaaagtttttatgcaaaatctgtaagtcattttaatgaaatttggtggacggttttagcacattacaagaattttctaagcgagttaggaaggttccaggtgtaacctaagtgatggaaaaacattgaataggacaggcttgttttgcccccttattttatatttattgctattttgcagcaagggtgataatttaagacatttttaaccaatcgtatttgatagaaaatttaattatctttgttttatttctatacgactttgttccaaaatgaatcgttttggagttataagcaaagaaagtagaaaaaaacgaaatttttgaaattttaaacattt

SEQ ID NO: 1114 - DNA, 1147 bp, Diabrotica virgifera
tctttctgaacaaaaagtagaccatttagaagttgtctaatttttttacatataaagaggcgctccacctatccaatacactccacagaattaaaatcggattatttaaggggcctcagcaatgttttaaattataaacaattttttggcttataaaaaaatagctttgtttaataataaaaaaattagtttttagcaatgcaaataattaaaaccagtataatttgacttaaacgttcaaatgctgtcagcagaattgctattttattttttaatcaaaacttattcttgttcaaaattgcaatttttcgattttttgaatgttccaccgcgtttatctcgaaaaccatgcatcctacgaaaaaacttgtaagaacattttttgcttagaattacccaaaaaatataaaaaatgttttattttgcgaaaaatcgatgttatgtaattcctcaagttctttgtttataacaaacttatcgacatccggatcaactgttacccaaaaaattcgtgttctacgggtcaaaatacgtaaaaaaacttgggtaagtccatctaaataaaggagcccgtagcaccccctcttggccacagcactaatttgtttataagccaaaaaattgtttacttataactttgaaacatttctgaggctgcttaaataatcagatttcaattcggtaaagtgcattttagataggtggagtgcttctttatgttatgtaaaaaaattgacaaatctttgtctgttctagtttttgttgtgcaagattttaaaaactttaactttttgaaaagtttagattgcaaagtttttatgcaaaatctgtaagtcattttaatgaaatttggtggacggttttagcacattacaagaattttctaagcgagttaggaaggttccaggtgtaacctaagtgatggaaaaacattgaataggacaggcttgttttgcccccttattttatatttattgctattttgcagcaagggtgataatttaagacatttttaaccaatcgtatttgatagaaaatttaattatctttgttttatttctatacgactttgttccaaaatgaatcgttttggagttataagcaaagaaagtagaaaaaaacgaaatttttgaaattttaaacattt

SEQ ID NO: 1115 - DNA, 3387 bp, Diabrotica virgifera
  SmartBlast Evalue=2E-60; Info=Charged multivesicular body protein 4b n=2 Tax=Formicidae RepID=E2C316_9HYME
aatttttgagaattagtaattggtttcgtatttttttcttaacaaaagggcaaaatgagcttttttggaaaattgttcggggggaaaaaggaagagatagcccctagtcctggggaggctattcaaaaactcagagagactgaagaaatgttaataaaaaaacaggattttttagaaaagaagatagaagaatttaccatggtagcaaagaaaaatgcgtcgaaaaataaaagagttgcactccaagccctcaaaaagaagaaacgattggaaaagacccaactacaaatagatggaacccttacaactattgaaatgcagagggaagccctcgaaggagctagcacaaatactgctgtattagattctatgaaaaatgctgcagatgcccttaagaaagctcataagaatttgaatgtagatgatgttcacgatatcatggatgacatagccgaacaacacgacatagccaacgaaatcacaaacgctattagcaatcctgtcggattcaccgacgatctggatgacgatgaattagaaaaagaattagaagagctcgaacaagaaggattggaagaagacctgctccaagtgccaggtccaactcaactgccggctgtgcctgctgatgcagttgctactaaaccaatcaaaccagcagctaaaaaagttgaagatgatgacgatatgaaagaattggaagcctgggcctcgtaaaattcctgaaatctggatatttgtaaacgaaatcacccatctaagatgaaaacattataaatatataggtaataacagctaaaaacgtttcaatgtagaacaagcttttgctgaaaaggcgtcttgcaaaaaatgttgataatttagaattctctatatattatatatttgccctttaaggaaagatttcttttatagtcatagttcaaccaaacattttataaattagaatacaggggtgtcagaattctacgtgaatttattgaaaaaaaagaactttccttaaagttggcataatgatatttttgaaattatgtaaataggtatatgtatgctcttactaacggttttaatattgggtttagaagcaccttaattttatttttatacaaggtagtaacattttttcattgtaatttgttaaaaaatattgtataacgcaaaaaatggtgtgataaagcaaaatattattgagtgcttattttcttattttattaaaagatcttatttacgttaaatctaaatatattgggtatctcagaatatgttaacaaaggtttcttgtatcaacagaaaaatacaaacttattcattattgtggttcatttgattatgcttgtgtatatttaatctgccataaacaagttttgataaatgtcactgctctgtactttttgtttttctgactgtagtttctgtcgtttgtaattccttggtctcggccatcgcccatacacacatagggaatgttgtataaaagaaatgatagtagactagcaatggcccgaacagcaagaattaaataattaaaatatggaaagactgaatactaagctgagattggtcaaagcccttatttttcctattgctatatacgcagctgaaacatggactctcaaaaaaatcaatcgaagtaagatcgaagccttcgaaatgtaggtctacagaattattgtacccgtgtcctggagagaacacagaaccaacctgtcaattctgaaagagcttcatataaaagacaaggtattaaaaaaagtataccgaccatacttaaattactttggtaaagtaacgattactatacgaagaggcaaatcgttactttgattactctgattacttcgtaccaatcgtatcagagcgagtaacgactattgtatctactttgattacttcgtatcagagcgaataacgactattgtatctactttgattactctgattacttcgtaccaatcgtatcagagcgagtaacaactattgtatctactttgattattctgattacttcgtaccaatcgtatcagagcgagtaacaactattgtcagggccgcgtttaggtcaaatgacgccctaggcaattctctagtagccgcccttcaaacatgtaccatttttgcgaaaaaaaaatgcaagcagaattttttatttaaataagaatgttattgcacaaatctcggtgttcttcaaataatgtttagaaatgtgttaaaaatattctttattttacatcaggcgtaatgttacatattactattataagtatgtttgagcgtttggaactgtgtccaatgcatgcgttttaatgcatgatacgtagaaattgcctgtttgtagccgcacctacttgttcgattttaaatgagagatgcattgaaaacattactcaagcactatgtgtttatagctttgtttaacaataaaaaaattaatttttagcaatgcaaataatcaaaaccggtataatttgactgcactttcaaatgcggtaagcagaattgctattttattttttaatcaaaacttattcttgttcaaaattgcaatttttcgattttttgaatgttccaccgcgtttatctcgaaaaccatgcatcctacgaaaaaacttgtaagaacattttttgcttagaattacccaaaaaatataaaaaatgttttattttgcgaaaaatcgatgttatgtaattcctcaagttctttgtttataacaatcttatcgacatccggatcaactgttacccaaaaaattcgtgttctacgggtcaaaatacataaaaaaacttgggtaagtccatctaaataaaggagcccgtagcaccccctcttggccacagcactaatttgtttataagccaaaaaattgtttacttataactttgaaacatttctgaggctgcttaaataatcagatttcaattcggtaaagtgcattttagataggtggagtgcttctttatgttatgtaaaaaaattgacaaatctttgtctgttctagtttttgttgtgcaagattttaaaaactttaactttttgaaaagtttagattgcaaagtttttatgcaaaatctgtaagtcattttaatgaaatttggtggacggttttagcacattacaagaattttctaagcgagttaggaaggttccaggtgtaacctaagtgatggaaaaacattgaataggacaggcttgttttgcccccttattttatatttattgctattttgcagcaagggtgataatttaagacatttttaaccaatcgtatttgatagaaaatttaattatctttgttttatttctatacgactttgttccaaaatgaatcgttttggagttataagcaaagaaagtagaaaaaaacgaaatttttgaaattttaaacattt

SEQ ID NO: 1116 - DNA, 1070 bp, Diabrotica virgifera
aatctggatatttttgggaaagttctggttttttaaaatctttctgaacaaaaactaaaccatttagaagttggctaatttttttacatttaaaaaggtgctctacctatctaatgcactttgcagcattgaaatcggattatttaaggggcctcagcaatgttttaaattataaacaattttttggcttataaaaaaatagctttgtttaataataaaaaaattagtttttagcaatgcaaataattaaaaccagtataatttgacttaaacgttcaaatgctgtcagcagaattgctattttattttttaatcaaaacttattcttgttcaaaattgcaatttttcgattttttgaatgttccaccgcgtttatctcgaaaaccatgcatcctacgaaaaaacttgtaagaacattttttgcttagaattacccaaaaaatataaaaaatgttttattttgcgaaaaatcgatgttatgtaattcctcaagttctttgtttataacaatcttatcgacatccggatcaactgttacccaaaaaattcgtgttctacgggtcaaaatacataaaaaaacttgggtaagtccatctaaataaaggagcccgtagcaccccctcttggccacagcactaatttgtttataagccaaaaaattgtttacttataactttgaaacatttctgaggctgcttaaataatcagatttcaattcggtaaagtgcattttagataggtggagtgcttctttatgttatgtaaaaaaattgacaaatctttgtctgttctagtttttgttgtgcaagattttaaaaaactttaactttttgaaaagtttagattgcaaagtttttatgcaggaatctagtgaagtcattttaatgaaatttggtggacggttttagcacattacaaggattttctaagcgagttaggaaggttccaggtgtaacctaagtgatggaaaacattgaatagggacatgcttgttttgccccctttattttgtgtttgttgctattttgctgcaagggtgatagtttaagacatttttaaccaatcgtatt

SEQ ID NO: 1117 - DNA, 1070 bp, Diabrotica virgifera
aatctggatatttttgggaaagttctggttttttaaaatctttctgaacaaaaactaaaccatttagaagttggctaatttttttacatttaaaaaggtgctctacctatctaatgcactttgcagcattgaaatcggattatttaaggggcctcagcaatgttttaaattataaacaattttttggcttataaaaaaatagctttgtttaataataaaaaaattagtttttagcaatgcaaataattaaaaccagtataatttgacttaaacgttcaaatgctgtcagcagaattgctattttattttttaatcaaaacttattcttgttcaaaattgcaatttttcgattttttgaatgttccaccgcgtttatctcgaaaaccatgcatcctacgaaaaaacttgtaagaacattttttgcttagaattacccaaaaaatataaaaaatgttttattttgcgaaaaatcgatgttatgtaattcctcaagttctttgtttataacaaacttatcgacatccggatcaactgttacccaaaaaattcgtgttctacgggtcaaaatacgtaaaaaaacttgggtaagtccatctaaataaaggagcccgtagcaccccctcttggccacagcactaatttgtttataagccaaaaaattgtttacttataactttgaaacatttctgaggctgcttaaataatcagatttcaattcggtaaagtgcattttagataggtggagtgcttctttatgttatgtaaaaaaattgacaaatctttgtctgttctagtttttgttgtgcaagattttaaaaaactttaactttttgaaaagtttagattgcaaagtttttatgcaggaatctagtgaagtcattttaatgaaatttggtggacggttttagcacattacaaggattttctaagcgagttaggaaggttccaggtgtaacctaagtgatggaaaacattgaatagggacatgcttgttttgccccctttattttgtgtttgttgctattttgctgcaagggtgatagtttaagacatttttaaccaatcgtatt

SEQ ID NO: 1118 - DNA, 1076 bp, Diabrotica virgifera
aatttcattaaggtcgatttaatagattttgcataataaatttgcaatctaaatattttggaaaagttctaattttttgaaatctttctgaacaaaaactaaaccatttagaagttggctaatttttttacatacaaaaatcggattatttaaggggcctcagcaatgttttaaattataaacaattttttggcttataaaaaaatagctttgtttaataataaaaaaattagtttttagcaatgcaaataattaaaaccagtataatttgacttaaacgttcaaatgctgtcagcagaattgctattttattttttaatcaaaacttattcttgttcaaaattgcaatttttcgattttttgaatgttccaccgcgtttatctcgaaaaccatgcatcctacgaaaaaacttgtaagaacattttttgcttagaattacccaaaaaatataaaaaatgttttattttgcgaaaaatcgatgttatgtaattcctcaagttctttgtttataacaatcttatcgacatccggatcaactgttacccaaaaaattcgtgttctacgggtcaaaatacataaaaaaacttgggtaagtccatctaaataaaggagcccgtagcaccccctcttggccacagcactaatttgtttataagccaaaaaattgtttacttataactttgaaacatttctgaggctgcttaaataatcagatttcaattcggtaaagtgcattttagataggtggagtgcttctttatgttatgtaaaaaaattgacaaatctttgtctgttctagtttttgttgtgcaagattttaaaaaactttaactttttgaaaagtttagattgcaaagtttttatgcaggaatctagtgaagtcattttaatgaaatttggtggacggttttagcacattacaaggattttctaagcgagttaggaaggttccaggtgtaacctaagtgatggaaaacattgaatagggacatgcttgttttgccccctttattttgtgtttgttgctattttgctgcaagggtgatagtttaagacatttttaaccaatcgtatt

SEQ ID NO: 1119 - DNA, 1078 bp, Diabrotica virgifera
gtctaatgcactttacagagttgaaatcggattatttaaggggcctcagcaatgttttgaatttataaacagtttttggcttgtaaacaaatagttttgtttaataataaaaaaattaatttttagcaatgcaaataattaaaaccggtataatttgacttaaactttcaaatgctttcagcagaattgctattttattttttaatcaaacgttattcgcgttcaaaaattgcaatttttcgatttttttaagttccaccgcgtttatctcgaaaactatgcatcctacgaaaaaacttgtaagaacattttttgcttagaattacccaagaaatacaaaaaaatgttttattttgcgaaaaatcgatgttatgtaattcctcaagttctttgtttataacaatcttatcgacatccggatcaactgttacccaaaaaattcgtgttctacgggtcaaaatacataaaaaaacttgggtaagtccatctaaataaaggagcccgtagcaccccctcttggccacagcactaatttgtttataagccaaaaaattgtttacttataactttgaaacatttctgaggctgcttaaataatcagatttcaattcggtaaagtgcattttagataggtggagtgcttctttatgttatgtaaaaaaattgacaaatctttgtctgttctagtttttgttgtgcaagattttaaaaactttaactttttgaaaagtttagattgcaaagtttttatgcaaaatctgtaagtcattttaatgaaatttggtggacggttttagcacattacaagaattttctaagcgagttaggaaggttccaggtgtaacctaagtgatggaaaaacattgaataggacaggcttgttttgcccccttattttatatttattgctattttgcagcaagggtgataatttaagacatttttaaccaatcgtatttgatagaaaatttaattatctttgttttatttctatacgactttgttccaaaatgaatcgttttggagttataagcaaagaaagtagaaaaaaacgaaatttttgaaattttaaacattt

SEQ ID NO: 1120 - DNA, 1069 bp, Diabrotica virgifera
gtctaatgcactttacagagttgaaatcggattatttaaggggcctcagcaatgttttgaatttataaacagtttttggcttgtaaacaaatagttttgtttaataataaaaaaattaatttttagcaatgcaaataattaaaaccggtataatttgacttaaactttcaaatgctttcagcagaattgctattttattttttaatcaaacgttattcgcgttcaaaaattgcaatttttcgatttttttaagttccaccgcgtttatctcgaaaactatgcatcctacgaaaaaacttgtaagaacattttttgcttagaattacccaagaaatacaaaaaaatgttttattttgcgaaaaatcgatgttatgtaattcctcaagttctttgtttataacaatcttatcgacatccggatcaactgttacccaaaaaattcgtgttctacgggtcaaaatacataaaaaaacttgggtaagtccatctaaataaaggagcccgtagcaccccctcctggccacagcactaatttgtttataagccaaaaaattgtttataactttgaaacattgctgaggctgcttaaacaatccgatttcaattctgtaaagtgcgttagataggtggagtgcttctttatatgtaaaaaaattgacaaatctttgtctgttctagtttttgttgtgcaagattttaaaaactttaactttttgaaaagtttagattgcaaagtttttatgcaaaatctgtaagtcattttaatgaaatttggtggacggttttagcacattacaagaattttctaagcgagttaggaaggttccaggtgtaacctaagtgatggaaaaacattgaataggacaggcttgttttgcccccttattttatatttattgctattttgcagcaagggtgataatttaagacatttttaaccaatcgtatttgatagaaaatttaattatctttgttttatttctatacgactttgttccaaaatgaatcgttttggagttataagcaaagaaagtagaaaaaaacgaaatttttgaaattttaaacattt

SEQ ID NO: 1121 - DNA, 1076 bp, Diabrotica virgifera
aatttcattaaggtcgatttaatagattttgcataataaatttgcaatctaaatattttggaaaagttctaattttttgaaatctttctgaacaaaaactaaaccatttagaagttggctaatttttttacatacaaaaatcggattatttaaggggcctcagcaatgttttaaattataaacaattttttggcttataaaaaaatagctttgtttaataataaaaaaattagtttttagcaatgcaaataattaaaaccagtataatttgacttaaacgttcaaatgctgtcagcagaattgctattttattttttaatcaaaacttattcttgttcaaaattgcaatttttcgattttttgaatgttccaccgcgtttatctcgaaaaccatgcatcctacgaaaaaacttgtaagaacattttttgcttagaattacccaaaaaatataaaaaatgttttattttgcgaaaaatcgatgttatgtaattcctcaagttctttgtttataacaaacttatcgacatccggatcaactgttacccaaaaaattcgtgttctacgggtcaaaatacgtaaaaaaacttgggtaagtccatctaaataaaggagcccgtagcaccccctcttggccacagcactaatttgtttataagccaaaaaattgtttacttataactttgaaacatttctgaggctgcttaaataatcagatttcaattcggtaaagtgcattttagataggtggagtgcttctttatgttatgtaaaaaaattgacaaatctttgtctgttctagtttttgttgtgcaagattttaaaaaactttaactttttgaaaagtttagattgcaaagtttttatgcaggaatctagtgaagtcattttaatgaaatttggtggacggttttagcacattacaaggattttctaagcgagttaggaaggttccaggtgtaacctaagtgatggaaaacattgaatagggacatgcttgttttgccccctttattttgtgtttgttgctattttgctgcaagggtgatagtttaagacatttttaaccaatcgtatt

SEQ ID NO: 1122 - DNA, 1078 bp, Diabrotica virgifera
gtctaatgcactttacagagttgaaatcggattatttagggggcctcagcaatgttttgaatttataaacagtttttggcttgtaaacaaatagttttgtttaataataaaaaaattaatttttagcaatgcaaataattaaaaccggtataatttgacttaaactttcaaatgctttcagcagaattgctattttattttttaatcaaacgttattcgcgttcaaaaattgcaatttttcgatttttttaagttccaccgcgtttatctcgaaaactatgcatcctacgaaaaaacttgtaagaacattttttgcttagaattacccaagaaatacaaaaaaatgttttattttgcgaaaaatcgatgttatgtaattcctcaagttctttgtttataacaaacttatcgacatccggatcaactgttacccaaaaaattcgtgttctacgggtcaaaatacgtaaaaaaacttgggtaagtccatctaaataaaggagcccgtagcaccccctcttggccacagcactaatttgtttataagccaaaaaattgtttacttataactttgaaacatttctgaggctgcttaaataatcagatttcaattcggtaaagtgcattttagataggtggagtgcttctttatgttatgtaaaaaaattgacaaatctttgtctgttctagtttttgttgtgcaagattttaaaaactttaactttttgaaaagtttagattgcaaagtttttatgcaaaatctgtaagtcattttaatgaaatttggtggacggttttagcacattacaagaattttctaagcgagttaggaaggttccaggtgtaacctaagtgatggaaaaacattgaataggacaggcttgttttgcccccttattttatatttattgctattttgcagcaagggtgataatttaagacatttttaaccaatcgtatttgatagaaaatttaattatctttgttttatttctatacgactttgttccaaaatgaatcgttttggagttataagcaaagaaagtagaaaaaaacgaaatttttgaaattttaaacattt

SEQ ID NO: 1123 - DNA, 1032 bp, Diabrotica virgifera
tctttctgaacaaaaagtagaccatttagaagttgtctaatttttttacatataaagaggcgctccacctatccaatacactccacagaattaaaatcggattatttaaggggcctcagcaatgttttaaattataaacaattttttggcttataaaaaaatagctttgtttaataataaaaaaattagtttttagcaatgcaaataattaaaaccagtataatttgacttaaacgttcaaatgctgtcagcagaattgctattttattttttaatcaaaacttattcttgttcaaaattgcaatttttcgattttttgaatgttccaccgcgtttatctcgaaaaccatgcatcctacgaaaaaacttgtaagaacattttttgcttagaattacccaaaaaatataaaaaatgttttattttgcgaaaaatcgatgttatgtaattcctcaagttctttgtttataacaatcttatcgacatccggatcaactgttacccaaaaaattcgtgttctacgggtcaaaatacataaaaaaacttgggtaagtccatctaaataaaggagcccgtagcaccccctcttggccacagcactaatttgtttataagccaaaaaattgtttacttataactttgaaacatttctgaggctgcttaaataatcagatttcaattcggtaaagtgcattttagataggtggagtgcttctttatgttatgtaaaaaaattgacaaatctttgtctgttctagtttttgttgtgcaagattttaaaaaactttaactttttgaaaagtttagattgcaaagtttttatgcaggaatctagtgaagtcattttaatgaaatttggtggacggttttagcacattacaaggattttctaagcgagttaggaaggttccaggtgtaacctaagtgatggaaaacattgaatagggacatgcttgttttgccccctttattttgtgtttgttgctattttgctgcaagggtgatagtttaagacatttttaaccaatcgtatt

SEQ ID NO: 1124 - DNA, 1032 bp, Diabrotica virgifera
tctttctgaacaaaaagtagaccatttagaagttgtctaatttttttacatataaagaggcgctccacctatccaatacactccacagaattaaaatcggattatttaaggggcctcagcaatgttttaaattataaacaattttttggcttataaaaaaatagctttgtttaataataaaaaaattagtttttagcaatgcaaataattaaaaccagtataatttgacttaaacgttcaaatgctgtcagcagaattgctattttattttttaatcaaaacttattcttgttcaaaattgcaatttttcgattttttgaatgttccaccgcgtttatctcgaaaaccatgcatcctacgaaaaaacttgtaagaacattttttgcttagaattacccaaaaaatataaaaaatgttttattttgcgaaaaatcgatgttatgtaattcctcaagttctttgtttataacaaacttatcgacatccggatcaactgttacccaaaaaattcgtgttctacgggtcaaaatacgtaaaaaaacttgggtaagtccatctaaataaaggagcccgtagcaccccctcttggccacagcactaatttgtttataagccaaaaaattgtttacttataactttgaaacatttctgaggctgcttaaataatcagatttcaattcggtaaagtgcattttagataggtggagtgcttctttatgttatgtaaaaaaattgacaaatctttgtctgttctagtttttgttgtgcaagattttaaaaaactttaactttttgaaaagtttagattgcaaagtttttatgcaggaatctagtgaagtcattttaatgaaatttggtggacggttttagcacattacaaggattttctaagcgagttaggaaggttccaggtgtaacctaagtgatggaaaacattgaatagggacatgcttgttttgccccctttattttgtgtttgttgctattttgctgcaagggtgatagtttaagacatttttaaccaatcgtatt

SEQ ID NO: 1125 - DNA, 963 bp, Diabrotica virgifera
gtctaatgcactttacagagttgaaatcggattatttaaggggcctcagcaatgttttgaatttataaacagtttttggcttgtaaacaaatagttttgtttaataataaaaaaattaatttttagcaatgcaaataattaaaaccggtataatttgacttaaactttcaaatgctttcagcagaattgctattttattttttaatcaaacgttattcgcgttcaaaaattgcaatttttcgatttttttaagttccaccgcgtttatctcgaaaactatgcatcctacgaaaaaacttgtaagaacattttttgcttagaattacccaagaaatacaaaaaaatgttttattttgcgaaaaatcgatgttatgtaattcctcaagttctttgtttataacaatcttatcgacatccggatcaactgttacccaaaaaattcgtgttctacgggtcaaaatacataaaaaaacttgggtaagtccatctaaataaaggagcccgtagcaccccctcttggccacagcactaatttgtttataagccaaaaaattgtttacttataactttgaaacatttctgaggctgcttaaataatcagatttcaattcggtaaagtgcattttagataggtggagtgcttctttatgttatgtaaaaaaattgacaaatctttgtctgttctagtttttgttgtgcaagattttaaaaaactttaactttttgaaaagtttagattgcaaagtttttatgcaggaatctagtgaagtcattttaatgaaatttggtggacggttttagcacattacaaggattttctaagcgagttaggaaggttccaggtgtaacctaagtgatggaaaacattgaatagggacatgcttgttttgccccctttattttgtgtttgttgctattttgctgcaagggtgatagtttaagacatttttaaccaatcgtatt

SEQ ID NO: 1126 - DNA, 3388 bp, Diabrotica virgifera
  SmartBlast Evalue=2E-60; Info=Charged multivesicular body protein 4b n=2 Tax=Formicidae RepID=E2C316_9HYME
aatttttgagaattagtaattggtttcgtatttttttcttaacaaaagggcaaaatgagcttttttggaaaattgttcggggggaaaaaggaagagatagcccctagtcctggggaggctattcaaaaactcagagagactgaagaaatgttaataaaaaaacaggattttttagaaaagaagatagaagaatttaccatggtagcaaagaaaaatgcgtcgaaaaataaaagagttgcactccaagccctcaaaaagaagaaacgattggaaaagacccaactacaaatagatggaacccttacaactattgaaatgcagagggaagccctcgaaggagctagcacaaatactgctgtattagattctatgaaaaatgctgcagatgcccttaagaaagctcataagaatttgaatgtagatgatgttcacgatatcatggatgacatagccgaacaacacgacatagccaacgaaatcacaaacgctattagcaatcctgtcggattcaccgacgatctggatgacgatgaattagaaaaagaattagaagagctcgaacaagaaggattggaagaagacctgctccaagtgccaggtccaactcaactgccggctgtgcctgctgatgcagttgctactaaaccaatcaaaccagcagctaaaaaagttgaagatgatgacgatatgaaagaattggaagcctgggcctcgtaaaattcctgaaatctggatatttgtaaacgaaatcacccatctaagatgaaaacattataaatatataggtaataacagctaaaaacgtttcaatgtagaacaagcttttgctgaaaaggcgtcttgcaaaaaatgttgataatttagaattctctatatattatatatttgccctttaaggaaagatttcttttatagtcatagttcaaccaaacattttataaattagaatacaggggtgtcagaattctacgtgaatttattgaaaaaaaagaactttccttaaagttggcataatgatatttttgaaattatgtaaataggtatatgtatgctcttactaacggttttaatattgggtttagaagcaccttaattttatttttatacaaggtagtaacattttttcattgtaatttgttaaaaaatattgtataacgcaaaaaatggtgtgataaagcaaaatattattgagtgcttattttcttattttattaaaagatcttatttacgttaaatctaaatatattgggtatctcagaatatgttaacaaaggtttcttgtatcaacagaaaaatacaaacttattcattattgtggttcatttgattatgcttgtgtatatttaatctgccataaacaagttttgataaatgtcactgctctgtactttttgtttttctgactgtagtttctgtcgtttgtaattccttggtctcggccatcgcccatacacacatagggaatgttgtataaaagaaatgatagtagactagcaatggcccgaacagcaagaattaaataattaaaatatggaaagactgaatactaagctgagattggtcaaagcccttatttttcctattgctatatacgcagctgaaacatggactctcaaaaaaatcaatcgaagtaagatcgaagccttcgaaatgtaggtctacagaattattgtacccgtgtcctggagagaacacagaaccaacctgtcaattctgaaagagcttcatataaaagacaaggtattaaaaaaagtataccgaccatacttaaattactttggtaaagtaacgattactatacgaagaggcaaatcgttactttgattactctgattacttcgtaccaatcgtatcagagcgagtaacgactattgtatctactttgattacttcgtatcagagcgaataacgactattgtatctactttgattactctgattacttcgtaccaatcgtatcagagcgagtaacaactattgtatctactttgattattctgattacttcgtaccaatcgtatcagagcgagtaacaactattgtcagggccgcgtttaggtcaaatgacgccctaggcaattctctagtagccgcccttcaaacatgtaccatttttgcgaaaaaaaaatgcaagcagaattttttatttaaataagaatgttattgcacaaatctcggtgttcttcaaataatgtttagaaatgtgttaaaaatattctttattttacatcaggcgtaatgttacatattactattataagtatgtttgagcgtttggaactgtgtccaatgcatgcgttttaatgcatgatacgtagaaattgcctgtttgtagccgcacctacttgttcgattttaaatgagagatgcattgaaaacattactcaagcactatgtgtttatagctttgtttaacaataaaaaaattaatttttagcaatgcaaataatcaaaaccggtataatttgactgcactttcaaatgcggtaagcagaattgctattttattttttaatcaaaagttattcggattcaaaaattgcaatttttcgatattttgaaagttcaaccgcgtttatctcgaaaaccatgcatcctacgaaaaaacttgtaagaacattttttgcttagaattacccaaaaaatacaaaaaatgttttattttgcgaaaaatcgatgttatgtaattcctcaagttctttgtttataacaatcttatcgacatccggatcaactgttacccaaaaaattcgtgttctacgggtcaaaatacataaaaaaacttgggtaagtccatctaaataaaggagcccgtagcaccccctcttggccacagcactaatttgtttataagccaaaaaattgtttacttataactttgaaacatttctgaggctgcttaaataatcagatttcaattcggtaaagtgcattttagataggtggagtgcttctttatgttatgtaaaaaaattgacaaatctttgtctgttctagtttttgttgtgcaagattttaaaaactttaactttttgaaaagtttagattgcaaagtttttatgcaaaatctgtaagtcattttaatgaaatttggtggacggttttagcacattacaagaattttctaagcgagttaggaaggttccaggtgtaacctaagtgatggaaaaacattgaataggacaggcttgttttgcccccttattttatatttattgctattttgcagcaagggtgataatttaagacatttttaaccaatcgtatttgatagaaaatttaattatctttgttttatttctatacgactttgttccaaaatgaatcgttttggagttataagcaaagaaagtagaaaaaaacgaaatttttgaaattttaaacattt

SEQ ID NO: 1127 - DNA, 963 bp, Diabrotica virgifera
gtctaatgcactttacagagttgaaatcggattatttagggggcctcagcaatgttttgaatttataaacagtttttggcttgtaaacaaatagttttgtttaataataaaaaaattaatttttagcaatgcaaataattaaaaccggtataatttgacttaaactttcaaatgctttcagcagaattgctattttattttttaatcaaacgttattcgcgttcaaaaattgcaatttttcgatttttttaagttccaccgcgtttatctcgaaaactatgcatcctacgaaaaaacttgtaagaacattttttgcttagaattacccaagaaatacaaaaaaatgttttattttgcgaaaaatcgatgttatgtaattcctcaagttctttgtttataacaaacttatcgacatccggatcaactgttacccaaaaaattcgtgttctacgggtcaaaatacgtaaaaaaacttgggtaagtccatctaaataaaggagcccgtagcaccccctcttggccacagcactaatttgtttataagccaaaaaattgtttacttataactttgaaacatttctgaggctgcttaaataatcagatttcaattcggtaaagtgcattttagataggtggagtgcttctttatgttatgtaaaaaaattgacaaatctttgtctgttctagtttttgttgtgcaagattttaaaaaactttaactttttgaaaagtttagattgcaaagtttttatgcaggaatctagtgaagtcattttaatgaaatttggtggacggttttagcacattacaaggattttctaagcgagttaggaaggttccaggtgtaacctaagtgatggaaaacattgaatagggacatgcttgttttgccccctttattttgtgtttgttgctattttgctgcaagggtgatagtttaagacatttttaaccaatcgtatt

SEQ ID NO: 1128 - DNA, 3378 bp, Diabrotica virgifera
  SmartBlast Evalue=2E-60; Info=Charged multivesicular body protein 4b n=2 Tax=Formicidae RepID=E2C316_9HYME
aatttttgagaattagtaattggtttcgtatttttttcttaacaaaagggcaaaatgagcttttttggaaaattgttcggggggaaaaaggaagagatagcccctagtcctggggaggctattcaaaaactcagagagactgaagaaatgttaataaaaaaacaggattttttagaaaagaagatagaagaatttaccatggtagcaaagaaaaatgcgtcgaaaaataaaagagttgcactccaagccctcaaaaagaagaaacgattggaaaagacccaactacaaatagatggaacccttacaactattgaaatgcagagggaagccctcgaaggagctagcacaaatactgctgtattagattctatgaaaaatgctgcagatgcccttaagaaagctcataagaatttgaatgtagatgatgttcacgatatcatggatgacatagccgaacaacacgacatagccaacgaaatcacaaacgctattagcaatcctgtcggattcaccgacgatctggatgacgatgaattagaaaaagaattagaagagctcgaacaagaaggattggaagaagacctgctccaagtgccaggtccaactcaactgccggctgtgcctgctgatgcagttgctactaaaccaatcaaaccagcagctaaaaaagttgaagatgatgacgatatgaaagaattggaagcctgggcctcgtaaaattcctgaaatctggatatttgtaaacgaaatcacccatctaagatgaaaacattataaatatataggtaataacagctaaaaacgtttcaatgtagaacaagcttttgctgaaaaggcgtcttgcaaaaaatgttgataatttagaattctctatatattatatatttgccctttaaggaaagatttcttttatagtcatagttcaaccaaacattttataaattagaatacaggggtgtcagaattctacgtgaatttattgaaaaaaaagaactttccttaaagttggcataatgatatttttgaaattatgtaaataggtatatgtatgctcttactaacggttttaatattgggtttagaagcaccttaattttatttttatacaaggtagtaacattttttcattgtaatttgttaaaaaatattgtataacgcaaaaaatggtgtgataaagcaaaatattattgagtgcttattttcttattttattaaaagatcttatttacgttaaatctaaatatattgggtatctcagaatatgttaacaaaggtttcttgtatcaacagaaaaatacaaacttattcattattgtggttcatttgattatgcttgtgtatatttaatctgccataaacaagttttgataaatgtcactgctctgtactttttgtttttctgactgtagtttctgtcgtttgtaattccttggtctcggccatcgcccatacacacatagggaatgttgtataaaagaaatgatagtagactagcaatggcccgaacagcaagaattaaataattaaaatatggaaagactgaatactaagctgagattggtcaaagcccttatttttcctattgctatatacgcagctgaaacatggactctcaaaaaaatcaatcgaagtaagatcgaagccttcgaaatgtaggtctacagaattattgtacccgtgtcctggagagaacacagaaccaacctgtcaattctgaaagagcttcatataaaagacaaggtattaaaaaaagtataccgaccatacttaaattactttggtaaagtaacgattactatacgaagaggcaaatcgttactttgattactctgattacttcgtaccaatcgtatcagagcgagtaacgactattgtatctactttgattacttcgtatcagagcgaataacgactattgtatctactttgattactctgattacttcgtaccaatcgtatcagagcgagtaacaactattgtatctactttgattattctgattacttcgtaccaatcgtatcagagcgagtaacaactattgtcagggccgcgtttaggtcaaatgacgccctaggcaattctctagtagccgcccttcaaacatgtaccatttttgcgaaaaaaaaatgcaagcagaattttttatttaaataagaatgttattgcacaaatctcggtgttcttcaaataatgtttagaaatgtgttaaaaatattctttattttacatcaggcgtaatgttacatattactattataagtatgtttgagcgtttggaactgtgtccaatgcatgcgttttaatgcatgatacgtagaaattgcctgtttgtagccgcacctacttgttcgattttaaatgagagatgcattgaaaacattactcaagcactatgtgtttatagctttgtttaacaataaaaaaattaatttttagcaatgcaaataatcaaaaccggtataatttgactgcactttcaaatgcggtaagcagaattgctattttattttttaatcaaaacttattcttgttcaaaattgcaatttttcgattttttgaatgttccaccgcgtttatctcgaaaaccatgcatcctacgaaaaaacttgtaagaacattttttgcttagaattacccaaaaaatataaaaaatgttttattttgcgaaaaatcgatgttatgtaattcctcaagttctttgtttataacaatcttatcgacatccggatcaactgttacccaaaaaattcgtgttctacgggtcaaaatacataaaaaaacttgggtaagtccatctaaataaaggagcccgtagcaccccctcctggccacagcactaatttgtttataagccaaaaaattgtttataactttgaaacattgctgaggctgcttaaacaatccgatttcaattctgtaaagtgcgttagataggtggagtgcttctttatatgtaaaaaaattgacaaatctttgtctgttctagtttttgttgtgcaagattttaaaaactttaactttttgaaaagtttagattgcaaagtttttatgcaaaatctgtaagtcattttaatgaaatttggtggacggttttagcacattacaagaattttctaagcgagttaggaaggttccaggtgtaacctaagtgatggaaaaacattgaataggacaggcttgttttgcccccttattttatatttattgctattttgcagcaagggtgataatttaagacatttttaaccaatcgtatttgatagaaaatttaattatctttgttttatttctatacgactttgttccaaaatgaatcgttttggagttataagcaaagaaagtagaaaaaaacgaaatttttgaaattttaaacattt

SEQ ID NO: 1129 - DNA, 3379 bp, Diabrotica virgifera
  SmartBlast Evalue=2E-60; Info=Charged multivesicular body protein 4b n=2 Tax=Formicidae RepID=E2C316_9HYME
aatttttgagaattagtaattggtttcgtatttttttcttaacaaaagggcaaaatgagcttttttggaaaattgttcggggggaaaaaggaagagatagcccctagtcctggggaggctattcaaaaactcagagagactgaagaaatgttaataaaaaaacaggattttttagaaaagaagatagaagaatttaccatggtagcaaagaaaaatgcgtcgaaaaataaaagagttgcactccaagccctcaaaaagaagaaacgattggaaaagacccaactacaaatagatggaacccttacaactattgaaatgcagagggaagccctcgaaggagctagcacaaatactgctgtattagattctatgaaaaatgctgcagatgcccttaagaaagctcataagaatttgaatgtagatgatgttcacgatatcatggatgacatagccgaacaacacgacatagccaacgaaatcacaaacgctattagcaatcctgtcggattcaccgacgatctggatgacgatgaattagaaaaagaattagaagagctcgaacaagaaggattggaagaagacctgctccaagtgccaggtccaactcaactgccggctgtgcctgctgatgcagttgctactaaaccaatcaaaccagcagctaaaaaagttgaagatgatgacgatatgaaagaattggaagcctgggcctcgtaaaattcctgaaatctggatatttgtaaacgaaatcacccatctaagatgaaaacattataaatatataggtaataacagctaaaaacgtttcaatgtagaacaagcttttgctgaaaaggcgtcttgcaaaaaatgttgataatttagaattctctatatattatatatttgccctttaaggaaagatttcttttatagtcatagttcaaccaaacattttataaattagaatacaggggtgtcagaattctacgtgaatttattgaaaaaaaagaactttccttaaagttggcataatgatatttttgaaattatgtaaataggtatatgtatgctcttactaacggttttaatattgggtttagaagcaccttaattttatttttatacaaggtagtaacattttttcattgtaatttgttaaaaaatattgtataacgcaaaaaatggtgtgataaagcaaaatattattgagtgcttattttcttattttattaaaagatcttatttacgttaaatctaaatatattgggtatctcagaatatgttaacaaaggtttcttgtatcaacagaaaaatacaaacttattcattattgtggttcatttgattatgcttgtgtatatttaatctgccataaacaagttttgataaatgtcactgctctgtactttttgtttttctgactgtagtttctgtcgtttgtaattccttggtctcggccatcgcccatacacacatagggaatgttgtataaaagaaatgatagtagactagcaatggcccgaacagcaagaattaaataattaaaatatggaaagactgaatactaagctgagattggtcaaagcccttatttttcctattgctatatacgcagctgaaacatggactctcaaaaaaatcaatcgaagtaagatcgaagccttcgaaatgtaggtctacagaattattgtacccgtgtcctggagagaacacagaaccaacctgtcaattctgaaagagcttcatataaaagacaaggtattaaaaaaagtataccgaccatacttaaattactttggtaaagtaacgattactatacgaagaggcaaatcgttactttgattactctgattacttcgtaccaatcgtatcagagcgagtaacgactattgtatctactttgattacttcgtatcagagcgaataacgactattgtatctactttgattactctgattacttcgtaccaatcgtatcagagcgagtaacaactattgtatctactttgattattctgattacttcgtaccaatcgtatcagagcgagtaacaactattgtcagggccgcgtttaggtcaaatgacgccctaggcaattctctagtagccgcccttcaaacatgtaccatttttgcgaaaaaaaaatgcaagcagaattttttatttaaataagaatgttattgcacaaatctcggtgttcttcaaataatgtttagaaatgtgttaaaaatattctttattttacatcaggcgtaatgttacatattactattataagtatgtttgagcgtttggaactgtgtccaatgcatgcgttttaatgcatgatacgtagaaattgcctgtttgtagccgcacctacttgttcgattttaaatgagagatgcattgaaaacattactcaagcactatgtgtttatagctttgtttaacaataaaaaaattaatttttagcaatgcaaataatcaaaaccggtataatttgactgcactttcaaatgcggtaagcagaattgctattttattttttaatcaaaagttattcggattcaaaaattgcaatttttcgatattttgaaagttcaaccgcgtttatctcgaaaaccatgcatcctacgaaaaaacttgtaagaacattttttgcttagaattacccaaaaaatacaaaaaatgttttattttgcgaaaaatcgatgttatgtaattcctcaagttctttgtttataacaatcttatcgacatccggatcaactgttacccaaaaaattcgtgttctacgggtcaaaatacataaaaaaacttgggtaagtccatctaaataaaggagcccgtagcaccccctcctggccacagcactaatttgtttataagccaaaaaattgtttataactttgaaacattgctgaggctgcttaaacaatccgatttcaattctgtaaagtgcgttagataggtggagtgcttctttatatgtaaaaaaattgacaaatctttgtctgttctagtttttgttgtgcaagattttaaaaactttaactttttgaaaagtttagattgcaaagtttttatgcaaaatctgtaagtcattttaatgaaatttggtggacggttttagcacattacaagaattttctaagcgagttaggaaggttccaggtgtaacctaagtgatggaaaaacattgaataggacaggcttgttttgcccccttattttatatttattgctattttgcagcaagggtgataatttaagacatttttaaccaatcgtatttgatagaaaatttaattatctttgttttatttctatacgactttgttccaaaatgaatcgttttggagttataagcaaagaaagtagaaaaaaacgaaatttttgaaattttaaacattt

SEQ ID NO: 1130 - DNA, 3387 bp, Diabrotica virgifera
  SmartBlast Evalue=2E-60; Info=Charged multivesicular body protein 4b n=2 Tax=Formicidae RepID=E2C316_9HYME
aatttttgagaattagtaattggtttcgtatttttttcttaacaaaagggcaaaatgagcttttttggaaaattgttcggggggaaaaaggaagagatagcccctagtcctggggaggctattcaaaaactcagagagactgaagaaatgttaataaaaaaacaggattttttagaaaagaagatagaagaatttaccatggtagcaaagaaaaatgcgtcgaaaaataaaagagttgcactccaagccctcaaaaagaagaaacgattggaaaagacccaactacaaatagatggaacccttacaactattgaaatgcagagggaagccctcgaaggagctagcacaaatactgctgtattagattctatgaaaaatgctgcagatgcccttaagaaagctcataagaatttgaatgtagatgatgttcacgatatcatggatgacatagccgaacaacacgacatagccaacgaaatcacaaacgctattagcaatcctgtcggattcaccgacgatctggatgacgatgaattagaaaaagaattagaagagctcgaacaagaaggattggaagaagacctgctccaagtgccaggtccaactcaactgccggctgtgcctgctgatgcagttgctactaaaccaatcaaaccagcagctaaaaaagttgaagatgatgacgatatgaaagaattggaagcctgggcctcgtaaaattcctgaaatctggatatttgtaaacgaaatcacccatctaagatgaaaacattataaatatataggtaataacagctaaaaacgtttcaatgtagaacaagcttttgctgaaaaggcgtcttgcaaaaaatgttgataatttagaattctctatatattatatatttgccctttaaggaaagatttcttttatagtcatagttcaaccaaacattttataaattagaatacaggggtgtcagaattctacgtgaatttattgaaaaaaaagaactttccttaaagttggcataatgatatttttgaaattatgtaaataggtatatgtatgctcttactaacggttttaatattgggtttagaagcaccttaattttatttttatacaaggtagtaacattttttcattgtaatttgttaaaaaatattgtataacgcaaaaaatggtgtgataaagcaaaatattattgagtgcttattttcttattttattaaaagatcttatttacgttaaatctaaatatattgggtatctcagaatatgttaacaaaggtttcttgtatcaacagaaaaatacaaacttattcattattgtggttcatttgattatgcttgtgtatatttaatctgccataaacaagttttgataaatgtcactgctctgtactttttgtttttctgactgtagtttctgtcgtttgtaattccttggtctcggccatcgcccatacacacatagggaatgttgtataaaagaaatgatagtagactagcaatggcccgaacagcaagaattaaataattaaaatatggaaagactgaatactaagctgagattggtcaaagcccttatttttcctattgctatatacgcagctgaaacatggactctcaaaaaaatcaatcgaagtaagatcgaagccttcgaaatgtaggtctacagaattattgtacccgtgtcctggagagaacacagaaccaacctgtcaattctgaaagagcttcatataaaagacaaggtattaaaaaaagtataccgaccatacttaaattactttggtaaagtaacgattactatacgaagaggcaaatcgttactttgattactctgattacttcgtaccaatcgtatcagagcgagtaacgactattgtatctactttgattacttcgtatcagagcgaataacgactattgtatctactttgattactctgattacttcgtaccaatcgtatcagagcgagtaacaactattgtatctactttgattattctgattacttcgtaccaatcgtatcagagcgagtaacaactattgtcagggccgcgtttaggtcaaatgacgccctaggcaattctctagtagccgcccttcaaacatgtaccatttttgcgaaaaaaaaatgcaagcagaattttttatttaaataagaatgttattgcacaaatctcggtgttcttcaaataatgtttagaaatgtgttaaaaatattctttattttacatcaggcgtaatgttacatattactattataagtatgtttgagcgtttggaactgtgtccaatgcatgcgttttaatgcatgatacgtagaaattgcctgtttgtagccgcacctacttgttcgattttaaatgagagatgcattgaaaacattactcaagcactatgtgtttatagctttgtttaacaataaaaaaattaatttttagcaatgcaaataatcaaaaccggtataatttgactgcactttcaaatgcggtaagcagaattgctattttattttttaatcaaaacttattcttgttcaaaattgcaatttttcgattttttgaatgttccaccgcgtttatctcgaaaaccatgcatcctacgaaaaaacttgtaagaacattttttgcttagaattacccaaaaaatataaaaaatgttttattttgcgaaaaatcgatgttatgtaattcctcaagttctttgtttataacaaacttatcgacatccggatcaactgttacccaaaaaattcgtgttctacgggtcaaaatacgtaaaaaaacttgggtaagtccatctaaataaaggagcccgtagcaccccctcttggccacagcactaatttgtttataagccaaaaaattgtttacttataactttgaaacatttctgaggctgcttaaataatcagatttcaattcggtaaagtgcattttagataggtggagtgcttctttatgttatgtaaaaaaattgacaaatctttgtctgttctagtttttgttgtgcaagattttaaaaactttaactttttgaaaagtttagattgcaaagtttttatgcaaaatctgtaagtcattttaatgaaatttggtggacggttttagcacattacaagaattttctaagcgagttaggaaggttccaggtgtaacctaagtgatggaaaaacattgaataggacaggcttgttttgcccccttattttatatttattgctattttgcagcaagggtgataatttaagacatttttaaccaatcgtatttgatagaaaatttaattatctttgttttatttctatacgactttgttccaaaatgaatcgttttggagttataagcaaagaaagtagaaaaaaacgaaatttttgaaattttaaacattt

SEQ ID NO: 1131 - DNA, 3388 bp, Diabrotica virgifera
  SmartBlast Evalue=2E-60; Info=Charged multivesicular body protein 4b n=2 Tax=Formicidae RepID=E2C316_9HYME
aatttttgagaattagtaattggtttcgtatttttttcttaacaaaagggcaaaatgagcttttttggaaaattgttcggggggaaaaaggaagagatagcccctagtcctggggaggctattcaaaaactcagagagactgaagaaatgttaataaaaaaacaggattttttagaaaagaagatagaagaatttaccatggtagcaaagaaaaatgcgtcgaaaaataaaagagttgcactccaagccctcaaaaagaagaaacgattggaaaagacccaactacaaatagatggaacccttacaactattgaaatgcagagggaagccctcgaaggagctagcacaaatactgctgtattagattctatgaaaaatgctgcagatgcccttaagaaagctcataagaatttgaatgtagatgatgttcacgatatcatggatgacatagccgaacaacacgacatagccaacgaaatcacaaacgctattagcaatcctgtcggattcaccgacgatctggatgacgatgaattagaaaaagaattagaagagctcgaacaagaaggattggaagaagacctgctccaagtgccaggtccaactcaactgccggctgtgcctgctgatgcagttgctactaaaccaatcaaaccagcagctaaaaaagttgaagatgatgacgatatgaaagaattggaagcctgggcctcgtaaaattcctgaaatctggatatttgtaaacgaaatcacccatctaagatgaaaacattataaatatataggtaataacagctaaaaacgtttcaatgtagaacaagcttttgctgaaaaggcgtcttgcaaaaaatgttgataatttagaattctctatatattatatatttgccctttaaggaaagatttcttttatagtcatagttcaaccaaacattttataaattagaatacaggggtgtcagaattctacgtgaatttattgaaaaaaaagaactttccttaaagttggcataatgatatttttgaaattatgtaaataggtatatgtatgctcttactaacggttttaatattgggtttagaagcaccttaattttatttttatacaaggtagtaacattttttcattgtaatttgttaaaaaatattgtataacgcaaaaaatggtgtgataaagcaaaatattattgagtgcttattttcttattttattaaaagatcttatttacgttaaatctaaatatattgggtatctcagaatatgttaacaaaggtttcttgtatcaacagaaaaatacaaacttattcattattgtggttcatttgattatgcttgtgtatatttaatctgccataaacaagttttgataaatgtcactgctctgtactttttgtttttctgactgtagtttctgtcgtttgtaattccttggtctcggccatcgcccatacacacatagggaatgttgtataaaagaaatgatagtagactagcaatggcccgaacagcaagaattaaataattaaaatatggaaagactgaatactaagctgagattggtcaaagcccttatttttcctattgctatatacgcagctgaaacatggactctcaaaaaaatcaatcgaagtaagatcgaagccttcgaaatgtaggtctacagaattattgtacccgtgtcctggagagaacacagaaccaacctgtcaattctgaaagagcttcatataaaagacaaggtattaaaaaaagtataccgaccatacttaaattactttggtaaagtaacgattactatacgaagaggcaaatcgttactttgattactctgattacttcgtaccaatcgtatcagagcgagtaacgactattgtatctactttgattacttcgtatcagagcgaataacgactattgtatctactttgattactctgattacttcgtaccaatcgtatcagagcgagtaacaactattgtatctactttgattattctgattacttcgtaccaatcgtatcagagcgagtaacaactattgtcagggccgcgtttaggtcaaatgacgccctaggcaattctctagtagccgcccttcaaacatgtaccatttttgcgaaaaaaaaatgcaagcagaattttttatttaaataagaatgttattgcacaaatctcggtgttcttcaaataatgtttagaaatgtgttaaaaatattctttattttacatcaggcgtaatgttacatattactattataagtatgtttgagcgtttggaactgtgtccaatgcatgcgttttaatgcatgatacgtagaaattgcctgtttgtagccgcacctacttgttcgattttaaatgagagatgcattgaaaacattactcaagcactatgtgtttatagctttgtttaacaataaaaaaattaatttttagcaatgcaaataatcaaaaccggtataatttgactgcactttcaaatgcggtaagcagaattgctattttattttttaatcaaaagttattcggattcaaaaattgcaatttttcgatattttgaaagttcaaccgcgtttatctcgaaaaccatgcatcctacgaaaaaacttgtaagaacattttttgcttagaattacccaaaaaatataaaaaatgttttattttgcgaaaaatcgatgttatgtaattcctcaagttctttgtttataacaaacttatcgacatccggatcaactgttacccaaaaaattcgtgttctacgggtcaaaatacgtaaaaaaacttgggtaagtccatctaaataaaggagcccgtagcaccccctcttggccacagcactaatttgtttataagccaaaaaattgtttacttataactttgaaacatttctgaggctgcttaaataatcagatttcaattcggtaaagtgcattttagataggtggagtgcttctttatgttatgtaaaaaaattgacaaatctttgtctgttctagtttttgttgtgcaagattttaaaaactttaactttttgaaaagtttagattgcaaagtttttatgcaaaatctgtaagtcattttaatgaaatttggtggacggttttagcacattacaagaattttctaagcgagttaggaaggttccaggtgtaacctaagtgatggaaaaacattgaataggacaggcttgttttgcccccttattttatatttattgctattttgcagcaagggtgataatttaagacatttttaaccaatcgtatttgatagaaaatttaattatctttgttttatttctatacgactttgttccaaaatgaatcgttttggagttataagcaaagaaagtagaaaaaaacgaaatttttgaaattttaaacattt

SEQ ID NO: 1132 - DNA, 3272 bp, Diabrotica virgifera
  SmartBlast Evalue=2E-60; Info=Charged multivesicular body protein 4b n=2 Tax=Formicidae RepID=E2C316_9HYME
aatttttgagaattagtaattggtttcgtatttttttcttaacaaaagggcaaaatgagcttttttggaaaattgttcggggggaaaaaggaagagatagcccctagtcctggggaggctattcaaaaactcagagagactgaagaaatgttaataaaaaaacaggattttttagaaaagaagatagaagaatttaccatggtagcaaagaaaaatgcgtcgaaaaataaaagagttgcactccaagccctcaaaaagaagaaacgattggaaaagacccaactacaaatagatggaacccttacaactattgaaatgcagagggaagccctcgaaggagctagcacaaatactgctgtattagattctatgaaaaatgctgcagatgcccttaagaaagctcataagaatttgaatgtagatgatgttcacgatatcatggatgacatagccgaacaacacgacatagccaacgaaatcacaaacgctattagcaatcctgtcggattcaccgacgatctggatgacgatgaattagaaaaagaattagaagagctcgaacaagaaggattggaagaagacctgctccaagtgccaggtccaactcaactgccggctgtgcctgctgatgcagttgctactaaaccaatcaaaccagcagctaaaaaagttgaagatgatgacgatatgaaagaattggaagcctgggcctcgtaaaattcctgaaatctggatatttgtaaacgaaatcacccatctaagatgaaaacattataaatatataggtaataacagctaaaaacgtttcaatgtagaacaagcttttgctgaaaaggcgtcttgcaaaaaatgttgataatttagaattctctatatattatatatttgccctttaaggaaagatttcttttatagtcatagttcaaccaaacattttataaattagaatacaggggtgtcagaattctacgtgaatttattgaaaaaaaagaactttccttaaagttggcataatgatatttttgaaattatgtaaataggtatatgtatgctcttactaacggttttaatattgggtttagaagcaccttaattttatttttatacaaggtagtaacattttttcattgtaatttgttaaaaaatattgtataacgcaaaaaatggtgtgataaagcaaaatattattgagtgcttattttcttattttattaaaagatcttatttacgttaaatctaaatatattgggtatctcagaatatgttaacaaaggtttcttgtatcaacagaaaaatacaaacttattcattattgtggttcatttgattatgcttgtgtatatttaatctgccataaacaagttttgataaatgtcactgctctgtactttttgtttttctgactgtagtttctgtcgtttgtaattccttggtctcggccatcgcccatacacacatagggaatgttgtataaaagaaatgatagtagactagcaatggcccgaacagcaagaattaaataattaaaatatggaaagactgaatactaagctgagattggtcaaagcccttatttttcctattgctatatacgcagctgaaacatggactctcaaaaaaatcaatcgaagtaagatcgaagccttcgaaatgtaggtctacagaattattgtacccgtgtcctggagagaacacagaaccaacctgtcaattctgaaagagcttcatataaaagacaaggtattaaaaaaagtataccgaccatacttaaattactttggtaaagtaacgattactatacgaagaggcaaatcgttactttgattactctgattacttcgtaccaatcgtatcagagcgagtaacgactattgtatctactttgattacttcgtatcagagcgaataacgactattgtatctactttgattactctgattacttcgtaccaatcgtatcagagcgagtaacaactattgtatctactttgattattctgattacttcgtaccaatcgtatcagagcgagtaacaactattgtcagggccgcgtttaggtcaaatgacgccctaggcaattctctagtagccgcccttcaaacatgtaccatttttgcgaaaaaaaaatgcaagcagaattttttatttaaataagaatgttattgcacaaatctcggtgttcttcaaataatgtttagaaatgtgttaaaaatattctttattttacatcaggcgtaatgttacatattactattataagtatgtttgagcgtttggaactgtgtccaatgcatgcgttttaatgcatgatacgtagaaattgcctgtttgtagccgcacctacttgttcgattttaaatgagagatgcattgaaaacattactcaagcactatgtgtttatagctttgtttaacaataaaaaaattaatttttagcaatgcaaataatcaaaaccggtataatttgactgcactttcaaatgcggtaagcagaattgctattttattttttaatcaaaacttattcttgttcaaaattgcaatttttcgattttttgaatgttccaccgcgtttatctcgaaaaccatgcatcctacgaaaaaacttgtaagaacattttttgcttagaattacccaaaaaatataaaaaatgttttattttgcgaaaaatcgatgttatgtaattcctcaagttctttgtttataacaatcttatcgacatccggatcaactgttacccaaaaaattcgtgttctacgggtcaaaatacataaaaaaacttgggtaagtccatctaaataaaggagcccgtagcaccccctcttggccacagcactaatttgtttataagccaaaaaattgtttacttataactttgaaacatttctgaggctgcttaaataatcagatttcaattcggtaaagtgcattttagataggtggagtgcttctttatgttatgtaaaaaaattgacaaatctttgtctgttctagtttttgttgtgcaagattttaaaaaactttaactttttgaaaagtttagattgcaaagtttttatgcaggaatctagtgaagtcattttaatgaaatttggtggacggttttagcacattacaaggattttctaagcgagttaggaaggttccaggtgtaacctaagtgatggaaaacattgaatagggacatgcttgttttgccccctttattttgtgtttgttgctattttgctgcaagggtgatagtttaagacatttttaaccaatcgtatt

SEQ ID NO: 1133 - DNA, 3273 bp, Diabrotica virgifera
  SmartBlast Evalue=2E-60; Info=Charged multivesicular body protein 4b n=2 Tax=Formicidae RepID=E2C316_9HYME
aatttttgagaattagtaattggtttcgtatttttttcttaacaaaagggcaaaatgagcttttttggaaaattgttcggggggaaaaaggaagagatagcccctagtcctggggaggctattcaaaaactcagagagactgaagaaatgttaataaaaaaacaggattttttagaaaagaagatagaagaatttaccatggtagcaaagaaaaatgcgtcgaaaaataaaagagttgcactccaagccctcaaaaagaagaaacgattggaaaagacccaactacaaatagatggaacccttacaactattgaaatgcagagggaagccctcgaaggagctagcacaaatactgctgtattagattctatgaaaaatgctgcagatgcccttaagaaagctcataagaatttgaatgtagatgatgttcacgatatcatggatgacatagccgaacaacacgacatagccaacgaaatcacaaacgctattagcaatcctgtcggattcaccgacgatctggatgacgatgaattagaaaaagaattagaagagctcgaacaagaaggattggaagaagacctgctccaagtgccaggtccaactcaactgccggctgtgcctgctgatgcagttgctactaaaccaatcaaaccagcagctaaaaaagttgaagatgatgacgatatgaaagaattggaagcctgggcctcgtaaaattcctgaaatctggatatttgtaaacgaaatcacccatctaagatgaaaacattataaatatataggtaataacagctaaaaacgtttcaatgtagaacaagcttttgctgaaaaggcgtcttgcaaaaaatgttgataatttagaattctctatatattatatatttgccctttaaggaaagatttcttttatagtcatagttcaaccaaacattttataaattagaatacaggggtgtcagaattctacgtgaatttattgaaaaaaaagaactttccttaaagttggcataatgatatttttgaaattatgtaaataggtatatgtatgctcttactaacggttttaatattgggtttagaagcaccttaattttatttttatacaaggtagtaacattttttcattgtaatttgttaaaaaatattgtataacgcaaaaaatggtgtgataaagcaaaatattattgagtgcttattttcttattttattaaaagatcttatttacgttaaatctaaatatattgggtatctcagaatatgttaacaaaggtttcttgtatcaacagaaaaatacaaacttattcattattgtggttcatttgattatgcttgtgtatatttaatctgccataaacaagttttgataaatgtcactgctctgtactttttgtttttctgactgtagtttctgtcgtttgtaattccttggtctcggccatcgcccatacacacatagggaatgttgtataaaagaaatgatagtagactagcaatggcccgaacagcaagaattaaataattaaaatatggaaagactgaatactaagctgagattggtcaaagcccttatttttcctattgctatatacgcagctgaaacatggactctcaaaaaaatcaatcgaagtaagatcgaagccttcgaaatgtaggtctacagaattattgtacccgtgtcctggagagaacacagaaccaacctgtcaattctgaaagagcttcatataaaagacaaggtattaaaaaaagtataccgaccatacttaaattactttggtaaagtaacgattactatacgaagaggcaaatcgttactttgattactctgattacttcgtaccaatcgtatcagagcgagtaacgactattgtatctactttgattacttcgtatcagagcgaataacgactattgtatctactttgattactctgattacttcgtaccaatcgtatcagagcgagtaacaactattgtatctactttgattattctgattacttcgtaccaatcgtatcagagcgagtaacaactattgtcagggccgcgtttaggtcaaatgacgccctaggcaattctctagtagccgcccttcaaacatgtaccatttttgcgaaaaaaaaatgcaagcagaattttttatttaaataagaatgttattgcacaaatctcggtgttcttcaaataatgtttagaaatgtgttaaaaatattctttattttacatcaggcgtaatgttacatattactattataagtatgtttgagcgtttggaactgtgtccaatgcatgcgttttaatgcatgatacgtagaaattgcctgtttgtagccgcacctacttgttcgattttaaatgagagatgcattgaaaacattactcaagcactatgtgtttatagctttgtttaacaataaaaaaattaatttttagcaatgcaaataatcaaaaccggtataatttgactgcactttcaaatgcggtaagcagaattgctattttattttttaatcaaaagttattcggattcaaaaattgcaatttttcgatattttgaaagttcaaccgcgtttatctcgaaaaccatgcatcctacgaaaaaacttgtaagaacattttttgcttagaattacccaaaaaatacaaaaaatgttttattttgcgaaaaatcgatgttatgtaattcctcaagttctttgtttataacaatcttatcgacatccggatcaactgttacccaaaaaattcgtgttctacgggtcaaaatacataaaaaaacttgggtaagtccatctaaataaaggagcccgtagcaccccctcttggccacagcactaatttgtttataagccaaaaaattgtttacttataactttgaaacatttctgaggctgcttaaataatcagatttcaattcggtaaagtgcattttagataggtggagtgcttctttatgttatgtaaaaaaattgacaaatctttgtctgttctagtttttgttgtgcaagattttaaaaaactttaactttttgaaaagtttagattgcaaagtttttatgcaggaatctagtgaagtcattttaatgaaatttggtggacggttttagcacattacaaggattttctaagcgagttaggaaggttccaggtgtaacctaagtgatggaaaacattgaatagggacatgcttgttttgccccctttattttgtgtttgttgctattttgctgcaagggtgatagtttaagacatttttaaccaatcgtatt

SEQ ID NO: 1134 - DNA, 3272 bp, Diabrotica virgifera
  SmartBlast Evalue=2E-60; Info=Charged multivesicular body protein 4b n=2 Tax=Formicidae RepID=E2C316_9HYME
aatttttgagaattagtaattggtttcgtatttttttcttaacaaaagggcaaaatgagcttttttggaaaattgttcggggggaaaaaggaagagatagcccctagtcctggggaggctattcaaaaactcagagagactgaagaaatgttaataaaaaaacaggattttttagaaaagaagatagaagaatttaccatggtagcaaagaaaaatgcgtcgaaaaataaaagagttgcactccaagccctcaaaaagaagaaacgattggaaaagacccaactacaaatagatggaacccttacaactattgaaatgcagagggaagccctcgaaggagctagcacaaatactgctgtattagattctatgaaaaatgctgcagatgcccttaagaaagctcataagaatttgaatgtagatgatgttcacgatatcatggatgacatagccgaacaacacgacatagccaacgaaatcacaaacgctattagcaatcctgtcggattcaccgacgatctggatgacgatgaattagaaaaagaattagaagagctcgaacaagaaggattggaagaagacctgctccaagtgccaggtccaactcaactgccggctgtgcctgctgatgcagttgctactaaaccaatcaaaccagcagctaaaaaagttgaagatgatgacgatatgaaagaattggaagcctgggcctcgtaaaattcctgaaatctggatatttgtaaacgaaatcacccatctaagatgaaaacattataaatatataggtaataacagctaaaaacgtttcaatgtagaacaagcttttgctgaaaaggcgtcttgcaaaaaatgttgataatttagaattctctatatattatatatttgccctttaaggaaagatttcttttatagtcatagttcaaccaaacattttataaattagaatacaggggtgtcagaattctacgtgaatttattgaaaaaaaagaactttccttaaagttggcataatgatatttttgaaattatgtaaataggtatatgtatgctcttactaacggttttaatattgggtttagaagcaccttaattttatttttatacaaggtagtaacattttttcattgtaatttgttaaaaaatattgtataacgcaaaaaatggtgtgataaagcaaaatattattgagtgcttattttcttattttattaaaagatcttatttacgttaaatctaaatatattgggtatctcagaatatgttaacaaaggtttcttgtatcaacagaaaaatacaaacttattcattattgtggttcatttgattatgcttgtgtatatttaatctgccataaacaagttttgataaatgtcactgctctgtactttttgtttttctgactgtagtttctgtcgtttgtaattccttggtctcggccatcgcccatacacacatagggaatgttgtataaaagaaatgatagtagactagcaatggcccgaacagcaagaattaaataattaaaatatggaaagactgaatactaagctgagattggtcaaagcccttatttttcctattgctatatacgcagctgaaacatggactctcaaaaaaatcaatcgaagtaagatcgaagccttcgaaatgtaggtctacagaattattgtacccgtgtcctggagagaacacagaaccaacctgtcaattctgaaagagcttcatataaaagacaaggtattaaaaaaagtataccgaccatacttaaattactttggtaaagtaacgattactatacgaagaggcaaatcgttactttgattactctgattacttcgtaccaatcgtatcagagcgagtaacgactattgtatctactttgattacttcgtatcagagcgaataacgactattgtatctactttgattactctgattacttcgtaccaatcgtatcagagcgagtaacaactattgtatctactttgattattctgattacttcgtaccaatcgtatcagagcgagtaacaactattgtcagggccgcgtttaggtcaaatgacgccctaggcaattctctagtagccgcccttcaaacatgtaccatttttgcgaaaaaaaaatgcaagcagaattttttatttaaataagaatgttattgcacaaatctcggtgttcttcaaataatgtttagaaatgtgttaaaaatattctttattttacatcaggcgtaatgttacatattactattataagtatgtttgagcgtttggaactgtgtccaatgcatgcgttttaatgcatgatacgtagaaattgcctgtttgtagccgcacctacttgttcgattttaaatgagagatgcattgaaaacattactcaagcactatgtgtttatagctttgtttaacaataaaaaaattaatttttagcaatgcaaataatcaaaaccggtataatttgactgcactttcaaatgcggtaagcagaattgctattttattttttaatcaaaacttattcttgttcaaaattgcaatttttcgattttttgaatgttccaccgcgtttatctcgaaaaccatgcatcctacgaaaaaacttgtaagaacattttttgcttagaattacccaaaaaatataaaaaatgttttattttgcgaaaaatcgatgttatgtaattcctcaagttctttgtttataacaaacttatcgacatccggatcaactgttacccaaaaaattcgtgttctacgggtcaaaatacgtaaaaaaacttgggtaagtccatctaaataaaggagcccgtagcaccccctcttggccacagcactaatttgtttataagccaaaaaattgtttacttataactttgaaacatttctgaggctgcttaaataatcagatttcaattcggtaaagtgcattttagataggtggagtgcttctttatgttatgtaaaaaaattgacaaatctttgtctgttctagtttttgttgtgcaagattttaaaaaactttaactttttgaaaagtttagattgcaaagtttttatgcaggaatctagtgaagtcattttaatgaaatttggtggacggttttagcacattacaaggattttctaagcgagttaggaaggttccaggtgtaacctaagtgatggaaaacattgaatagggacatgcttgttttgccccctttattttgtgtttgttgctattttgctgcaagggtgatagtttaagacatttttaaccaatcgtatt

SEQ ID NO: 1135 - DNA, 2697 bp, Diabrotica virgifera
  SmartBlast Evalue=1E-68; Info="1-acyl-sn-glycerol-3-phosphate acyltransferase alpha, putative n=1 Tax=Pediculus humanus corporis RepID=E0VLP4_PEDHC"
attcagtaatcgatcgagtaatcagcagtagagtacgagtacggcgatcctcagtaactacgcaggtcgattatgctgtgccggtacgcattgaattcaatcagctgaagaacataatgttttgatatctctttttaattttcgtccaagaacaatatttgtttatttatttgtgttaaaaaagtgcaagttttgcttcaaataaaaattaagtatagatatgggactgctactttacaccttgggatctttaacgctgctggctatattatggacggtcagctccgtagccagatatgtcctgaaatttgcctgttttggagtgttatgcatgatatttgcttgtgcaccgatacctttgatgttgttgaatccaagaaatagcaaaaacgccttaattccatcagctctgctaagatggagcagaaagttttatggactggagtacaaagtcgaaggcctagagaatatcgataaagatagcggttccgtggttcttataaaccatcaaagtgctatagatttacttgttttagcctatttatggcccttaatgccaaactcaactgtgatatcgaagaaggagatcttctacattcagcccttcggattggctgcctggctgtggggaaccatttttatcgacagagttaaagccaaagatgcccaatcggcggtgaacaaaactggtcaaattatcaaaaggcggaaggcgcgagtactgatgttccctgaaggcaccagaaaccttggaaagaagttgctgccgttcaaaaaaggtgccttccatttggcaattgcttcccaagttcctatccagcccgtagcagtatccagatattcgttcatgggtaacgcccgcttcgattcaggtgctgtaactatcaggattcttccaacgattcccacagaaggttgcaccgttgaagacattccaaaattaatagatcaaacgtacaaagcgttatctgaaaacgtggacgaaatttctgcaccaacgagtacgatgaacggaaccgaagccaaaataaaaagcaactgaatccaaagataaaaacttaggcatgtacaaatttgaggcgtctgcgaagtatgcaccgaagctataataaacattcaatataaaagtttgaaatatactacgctgattgaccattccagtaattttctttaataatatactctccaaccggtatctacttccacggttgctatttctaattcgattgatgaaaattgaactgtgacgatcaccaaaaatcagaaagtgttaaatctggccaataaggtggatgctgcaacaattcgtactttattttagtgatttctgaaatagcttatggagcagtgccaattgtgttgatgaaaaatagtcttcttttctgtaaaacagctattttctcatgaatttttatatccagttgattcaaaaggttataataataatctgaattttctattttaccagtaatttagctaattatataatctgaataagagaaactcctattctatccatcacatttcgtttggagtcatggcatcttccagaaagttattctacgtactttcttcttgtatgaccatgtaacacgaccatggcagctatatcatacattttaacttatgtgaaaaatactttgtaatattttgtttgttttagtcttttagtatatgttcattctctattcatgatattcattcttctataacatccagaaaattaccataaccagagaaataagaataattaccattgccaataccagagaaataagatttttctcgtgacacatccccctccagactgaaccagtttttgagtagtatggacgtccgtaataatggcctatatgttcctgcagtcgatttctatgcacgtaagtttatgtgtatcatcaaaatcggctgcaggaaacatgtaggttgttattatggatgtccatactactcggaaaatttggtttcggcctggaaggggctgtgtcactaacaggatattttttttcttatttctctgaactaaaaagttccatatttagtttagtttagcgttttggtagtgcatatacggaattaaatgaaaatatgtttagttgtttaggttaattacatcccaacaatcgattgagactatataaaatttaaccactaagaaagtagcttccgatgattagggcaaaaacagactaaccattctgcagcgctacgctgtattctaaatttttatgtaaattaaaagtgccattccacaagagcgacagtggctggccacggtcgccgatcctcgctactgtggcgtccattacaaaatcattggtgctaaaaaatcgcctggttcagccagtttgtgggtccacagagtagcgctgtagagtgattcgtctgttttaaacctagatgttcacgatcaaaatgtagaatagcatatttcgtgggccccttgtggactcttggtgcttcttccaaaatctgcttcggtgattctgttatttttttacttgtataaaaaacaattcgttcagtattgatttactggcgaacttttgtcgatgttatatatgccgtatgacatgtaaggactgattagttttaggtttaacttgttagttgactgttgtgtaacattatgatttatgatttgtttggttctgtttgattgtatatttacgaaataaataagttacaaactcaaaa

SEQ ID NO: 1136 - DNA, 2697 bp, Diabrotica virgifera
  SmartBlast Evalue=1E-68; Info="1-acyl-sn-glycerol-3-phosphate acyltransferase alpha, putative n=1 Tax=Pediculus humanus corporis RepID=E0VLP4_PEDHC"
attcagtaatcgatcgagtaatcagcagtagagtacgagtacggcgatcctcagtaactacgcaggtcgattatgctgtgccggtacgcattgaattcaatcagctgaagaacataatgttttgatatctctttttaattttcgtccaagaacaatatttgtttatttatttgtgttaaaaaagtgcaagttttgcttcaaataaaaattaagtatagatatgggactgctactttacaccttgggatctttaacgctgctggctatattatggacggtcagctccgtagccagatatgtcctgaaatttgcctgttttggagtgttatgcatgatatttgcttgtgcaccgatacctttgatgttgttgaatccaagaaatagcaaaaacgccttaattccatcagctctgctaagatggagcagaaagttttatggactggagtacaaagtcgaaggcctagagaatatcgataaagatagcggttccgtggttcttataaaccatcaaagtgctatagatttacttgttttagcctatttatggcccttaatgccaaactcaactgtgatatcgaagaaggagatcttctacattcagcccttcggattggctgcctggctgtggggaaccatttttatcgacagagttaaagccaaagatgcccaatcggcggtgaacaaaactggtcaaattatcaaaaggcggaaggcgcgagtactgatgttccctgaaggcaccagaaaccttggaaagaagttgctgccgttcaaaaaaggtgccttccatttggcaattgcttcccaagttcctatccagcccgtagcagtatccagatattcgttcatgggtaacgcccgcttcgattcaggtgctgtaactatcaggattcttccaacgattcccacagaaggttgcaccgttgaagacattccaaaattaatagatcaaacgtacaaagcgttatctgaaaacgtggacgaaatttctgcaccaacgagtacgatgaacggaaccgaagccaaaataaaaagcaactgaatccaaagataaaaacttaggcatgtacaaatttgaggcgtctgcgaagtatgcaccgaagctataataaacattcaatataaaagtttgaaatatactacgctgattgaccattccagtaattttctttaataatatactctccaaccggtatctacttccacggttgctatttctaattcgattgatgaaaattgaactgtgacgatcaccaaaaatcagaaagtgttaaatctggccaataaggtggatgctgcaacaattcgtactttattttagtgatttctgaaatagcttatggagcagtgccaattgtgttgatgaaaaatagtcttcttttctgtaaaacagctattttctcatgaatttttatatccagttgattcaaaaggttataataataatctgaattttctattttaccagtaatttagctaattatataatctgaataagagaaactcctattctatccatcacatttcgtttggagtcatggcatcttccagaaagttattctacgtactttcttcttgtatgaccatgtaacacgaccatggcagctatatcatacattttaacttatgtgaaaaatactttgtaatattttgtttgttttagtcttttagtatatgttcattctctattcatgatattcattcttctataacatccagaaaattaccataaccagagaaataagaataattaccattgccaataccagagaaataagatttttctcgtgacacatccccctccagactgaaccagtttttgagtagtatggacgtccataataatggcctatatgttcctgctgtcgatttctatgcacgtaagtttatgtatatcatcaaaatcggctgcaggaaacatgtaggttattattgtggatgtccatactactcaaaaagtttggtttcggcctggaaggggctgtgtcactaacaggatattttttttcttatttctctgaactaaaaagttccatatttagtttagtttagcgttttggtagtgcatatacggaattaaatgaaaatatgtttagttgtttaggttaattacatcccaacaatcgattgagactatataaaatttaaccactaagaaagtagcttccgatgattagggcaaaaacagactaaccattctgcagcgctacgctgtattctaaatttttatgtaaattaaaagtgccattccacaagagcgacagtggctggccacggtcgccgatcctcgctactgtggcgtccattacaaaatcattggtgctaaaaaatcgcctggttcagccagtttgtgggtccacagagtagcgctgtagagtgattcgtctgttttaaacctagatgttcacgatcaaaatgtagaatagcatatttcgtgggccccttgtggactcttggtgcttcttccaaaatctgcttcggtgattctgttatttttttacttgtataaaaaacaattcgttcagtattgatttactggcgaacttttgtcgatgttatatatgccgtatgacatgtaaggactgattagttttaggtttaacttgttagttgactgttgtgtaacattatgatttatgatttgtttggttctgtttgattgtatatttacgaaataaataagttacaaactcaaaa

SEQ ID NO: 1137 - DNA, 2569 bp, Diabrotica virgifera
  SmartBlast Evalue=1E-68; Info="1-acyl-sn-glycerol-3-phosphate acyltransferase alpha, putative n=1 Tax=Pediculus humanus corporis RepID=E0VLP4_PEDHC"
gtaagattaaaattgtagtttctaggtaggtcatagtctattttagtcgatgtaatcgagtgtttgctttaacaataagtgcgctagagatatgggactgctactttacaccttgggatctttaacgctgctggctatattatggacggtcagctccgtagccagatatgtcctgaaatttgcctgttttggagtgttatgcatgatatttgcttgtgcaccgatacctttgatgttgttgaatccaagaaatagcaaaaacgccttaattccatcagctctgctaagatggagcagaaagttttatggactggagtacaaagtcgaaggcctagagaatatcgataaagatagcggttccgtggttcttataaaccatcaaagtgctatagatttacttgttttagcctatttatggcccttaatgccaaactcaactgtgatatcgaagaaggagatcttctacattcagcccttcggattggctgcctggctgtggggaaccatttttatcgacagagttaaagccaaagatgcccaatcggcggtgaacaaaactggtcaaattatcaaaaggcggaaggcgcgagtactgatgttccctgaaggcaccagaaaccttggaaagaagttgctgccgttcaaaaaaggtgccttccatttggcaattgcttcccaagttcctatccagcccgtagcagtatccagatattcgttcatgggtaacgcccgcttcgattcaggtgctgtaactatcaggattcttccaacgattcccacagaaggttgcaccgttgaagacattccaaaattaatagatcaaacgtacaaagcgttatctgaaaacgtggacgaaatttctgcaccaacgagtacgatgaacggaaccgaagccaaaataaaaagcaactgaatccaaagataaaaacttaggcatgtacaaatttgaggcgtctgcgaagtatgcaccgaagctataataaacattcaatataaaagtttgaaatatactacgctgattgaccattccagtaattttctttaataatatactctccaaccggtatctacttccacggttgctatttctaattcgattgatgaaaattgaactgtgacgatcaccaaaaatcagaaagtgttaaatctggccaataaggtggatgctgcaacaattcgtactttattttagtgatttctgaaatagcttatggagcagtgccaattgtgttgatgaaaaatagtcttcttttctgtaaaacagctattttctcatgaatttttatatccagttgattcaaaaggttataataataatctgaattttctattttaccagtaatttagctaattatataatctgaataagagaaactcctattctatccatcacatttcgtttggagtcatggcatcttccagaaagttattctacgtactttcttcttgtatgaccatgtaacacgaccatggcagctatatcatacattttaacttatgtgaaaaatactttgtaatattttgtttgttttagtcttttagtatatgttcattctctattcatgatattcattcttctataacatccagaaaattaccataaccagagaaataagaataattaccattgccaataccagagaaataagatttttctcgtgacacatccccctccagactgaaccagtttttgagtagtatggacgtccgtaataatggcctatatgttcctgcagtcgatttctatgcacgtaagtttatgtgtatcatcaaaatcggctgcaggaaacatgtaggttgttattatggatgtccatactactcggaaaatttggtttcggcctggaaggggctgtgtcaccaacaggatatttttttttcatatttctctgaactaaaaagttccatatttagtttagtttagcgttttggtagtgcatatacggaattaaatgaaaatatgtttagttgtttaggttaattacatcccaacaatcgattgagactatataaaatttaaccactaagaaagtagcttccgatgattagggcaaaaacagactaaccattctgcagcgctacgctgtattctaaatttttatgtaaattaaaagtgccattccacaagagcgacagtggctggccacggtcgccgatcctcgctactgtggcgtccattacaaaatcattggtgctaaaaaatcgcctggttcagccagtttgtgggtccacagagtagcgctgtagagtgattcgtctgttttaaacctagatgttcacgatcaaaatgtagaatagcatatttcgtgggccccttgtggactcttggtgcttcttccaaaatctgcttcggtgattctgttatttttttacttgtataaaaaacaattcgttcagtattgatttactggcgaacttttgtcgatgttatatatgccgtatgacatgtaaggactgattagttttaggtttaacttgttagttgactgttgtgtaacattatgatttatgatttgtttggttctgtttgattgtatatttacgaaataaataagttacaaactcaaaa

SEQ ID NO: 1138 - DNA, 2568 bp, Diabrotica virgifera
  SmartBlast Evalue=1E-68; Info="1-acyl-sn-glycerol-3-phosphate acyltransferase alpha, putative n=1 Tax=Pediculus humanus corporis RepID=E0VLP4_PEDHC"
gtaagattaaaattgtagtttctaggtaggtcatagtctattttagtcgatgtaatcgagtgtttgctttaacaataagtgcgctagagatatgggactgctactttacaccttgggatctttaacgctgctggctatattatggacggtcagctccgtagccagatatgtcctgaaatttgcctgttttggagtgttatgcatgatatttgcttgtgcaccgatacctttgatgttgttgaatccaagaaatagcaaaaacgccttaattccatcagctctgctaagatggagcagaaagttttatggactggagtacaaagtcgaaggcctagagaatatcgataaagatagcggttccgtggttcttataaaccatcaaagtgctatagatttacttgttttagcctatttatggcccttaatgccaaactcaactgtgatatcgaagaaggagatcttctacattcagcccttcggattggctgcctggctgtggggaaccatttttatcgacagagttaaagccaaagatgcccaatcggcggtgaacaaaactggtcaaattatcaaaaggcggaaggcgcgagtactgatgttccctgaaggcaccagaaaccttggaaagaagttgctgccgttcaaaaaaggtgccttccatttggcaattgcttcccaagttcctatccagcccgtagcagtatccagatattcgttcatgggtaacgcccgcttcgattcaggtgctgtaactatcaggattcttccaacgattcccacagaaggttgcaccgttgaagacattccaaaattaatagatcaaacgtacaaagcgttatctgaaaacgtggacgaaatttctgcaccaacgagtacgatgaacggaaccgaagccaaaataaaaagcaactgaatccaaagataaaaacttaggcatgtacaaatttgaggcgtctgcgaagtatgcaccgaagctataataaacattcaatataaaagtttgaaatatactacgctgattgaccattccagtaattttctttaataatatactctccaaccggtatctacttccacggttgctatttctaattcgattgatgaaaattgaactgtgacgatcaccaaaaatcagaaagtgttaaatctggccaataaggtggatgctgcaacaattcgtactttattttagtgatttctgaaatagcttatggagcagtgccaattgtgttgatgaaaaatagtcttcttttctgtaaaacagctattttctcatgaatttttatatccagttgattcaaaaggttataataataatctgaattttctattttaccagtaatttagctaattatataatctgaataagagaaactcctattctatccatcacatttcgtttggagtcatggcatcttccagaaagttattctacgtactttcttcttgtatgaccatgtaacacgaccatggcagctatatcatacattttaacttatgtgaaaaatactttgtaatattttgtttgttttagtcttttagtatatgttcattctctattcatgatattcattcttctataacatccagaaaattaccataaccagagaaataagaataattaccattgccaataccagagaaataagatttttctcgtgacacatccccctccagactgaaccagtttttgagtagtatggacgtccgtaataatggcctatatgttcctgcagtcgatttctatgcacgtaagtttatgtgtatcatcaaaatcggctgcaggaaacatgtaggttgttattatggatgtccatactactcggaaaatttggtttcggcctggaaggggctgtgtcactaacaggatattttttttcttatttctctgaactaaaaagttccatatttagtttagtttagcgttttggtagtgcatatacggaattaaatgaaaatatgtttagttgtttaggttaattacatcccaacaatcgattgagactatataaaatttaaccactaagaaagtagcttccgatgattagggcaaaaacagactaaccattctgcagcgctacgctgtattctaaatttttatgtaaattaaaagtgccattccacaagagcgacagtggctggccacggtcgccgatcctcgctactgtggcgtccattacaaaatcattggtgctaaaaaatcgcctggttcagccagtttgtgggtccacagagtagcgctgtagagtgattcgtctgttttaaacctagatgttcacgatcaaaatgtagaatagcatatttcgtgggccccttgtggactcttggtgcttcttccaaaatctgcttcggtgattctgttatttttttacttgtataaaaaacaattcgttcagtattgatttactggcgaacttttgtcgatgttatatatgccgtatgacatgtaaggactgattagttttaggtttaacttgttagttgactgttgtgtaacattatgatttatgatttgtttggttctgtttgattgtatatttacgaaataaataagttacaaactcaaaa

SEQ ID NO: 1139 - DNA, 2531 bp, Diabrotica virgifera
  SmartBlast Evalue=1E-68; Info="1-acyl-sn-glycerol-3-phosphate acyltransferase alpha, putative n=1 Tax=Pediculus humanus corporis RepID=E0VLP4_PEDHC"
attcagtaatcgatcgagtaatcagcagtagagtacgagtacggcgatcctcagtaactacgcaggtcgattatgctgtgccggtacgcattgaattcaatcagctgaagaacataatgttttgatatctctttttaattttcgtccaagaacaatatttgtttatttatttgtgttaaaaaagtgcaagttttgcttcaaataaaaattaagtatagatatgggactgctactttacaccttgggatctttaacgctgctggctatattatggacggtcagctccgtagccagatatgtcctgaaatttgcctgttttggagtgttatgcatgatatttgcttgtgcaccgatacctttgatgttgttgaatccaagaaatagcaaaaacgccttaattccatcagctctgctaagatggagcagaaagttttatggactggagtacaaagtcgaaggcctagagaatatcgataaagatagcggttccgtggttcttataaaccatcaaagtgctatagatttacttgttttagcctatttatggcccttaatgccaaactcaactgtgatatcgaagaaggagatcttctacattcagcccttcggattggctgcctggctgtggggaaccatttttatcgacagagttaaagccaaagatgcccaatcggcggtgaacaaaactggtcaaattatcaaaaggcggaaggcgcgagtactgatgttccctgaaggcaccagaaaccttggaaagaagttgctgccgttcaaaaaaggtgccttccatttggcaattgcttcccaagttcctatccagcccgtagcagtatccagatattcgttcatgggtaacgcccgcttcgattcaggtgctgtaactatcaggattcttccaacgattcccacagaaggttgcaccgttgaagacattccaaaattaatagatcaaacgtacaaagcgttatctgaaaacgtggacgaaatttctgcaccaacgagtacgatgaacggaaccgaagccaaaataaaaagcaactgaatccaaagataaaaacttaggcatgtacaaatttgaggcgtctgcgaagtatgcaccgaagctataataaacattcaatataaaagtttgaaatatactacgctgattgaccattccagtaattttctttaataatatactctccaaccggtatctacttccacggttgctatttctaattcgattgatgaaaattgaactgtgacgatcaccaaaaatcagaaagtgttaaatctggccaataaggtggatgctgcaacaattcgtactttattttagtgatttctgaaatagcttatggagcagtgccaattgtgttgatgaaaaatagtcttcttttctgtaaaacagctattttctcatgaatttttatatccagttgattcaaaaggttataataataatctgaattttctattttaccagtaatttagctaattatataatctgaataagagaaactcctattctatccatcacatttcgtttggagtcatggcatcttccagaaagttattctacgtactttcttcttgtatgaccatgtaacacgaccatggcagctatatcatacattttaacttatgtgaaaaatactttgtaatattttgtttgttttagtcttttagtatatgttcattctctattcatgatattcattcttctataacatccagaaaattaccataaccagagaaataagaataattaccattgccaataccagagaaataagatttttctcgtgacacatccccctccagactgaaccagtttttgagtagtatggacgtccgtaataatggcctatatgttcctgcagtcgattttgatgatatacatagttataaacaagtgaagatcaaaaaatggtaaattttcgattctttcgtctattgctaaagggtgaagcattctagacaagtttgagagtgagaagctcataaatcgtatataagcttcaatgtggcgttcgctgaatatgtctgcccttgtttgttgcttggaaaattgcaaaagtcataaattttgagattttataagtgttcatggcttatgtagaattaagttacaaccttcttattacacggaatgctgagatttcttgtgcttaaattatattttgaatttcaaagtagttggtcaagtggtttagaagttatttaatttgtttatcccaaattccttttgtttgcaacactataattcagaaaattatgaggttacagtaatagttcggactgacagtttatgagagagaacatttatactctaaacttaaaaaaaaatgacaaagagtaattttaacagtgtaaaattattttgcaaaaacatgtcgattttttgcttacttataaacaattagaataactttttaaccgttacccgtagaaaaattatttttccatatttagaaagactgaatttttatacacatttagacagaaatacaattgtcctagggcaattagggatgaagttaggcccc

SEQ ID NO: 1140 - DNA, 2568 bp, Diabrotica virgifera
  SmartBlast Evalue=1E-68; Info="1-acyl-sn-glycerol-3-phosphate acyltransferase alpha, putative n=1 Tax=Pediculus humanus corporis RepID=E0VLP4_PEDHC"
gtaagattaaaattgtagtttctaggtaggtcatagtctattttagtcgatgtaatcgagtgtttgctttaacaataagtgcgctagagatatgggactgctactttacaccttgggatctttaacgctgctggctatattatggacggtcagctccgtagccagatatgtcctgaaatttgcctgttttggagtgttatgcatgatatttgcttgtgcaccgatacctttgatgttgttgaatccaagaaatagcaaaaacgccttaattccatcagctctgctaagatggagcagaaagttttatggactggagtacaaagtcgaaggcctagagaatatcgataaagatagcggttccgtggttcttataaaccatcaaagtgctatagatttacttgttttagcctatttatggcccttaatgccaaactcaactgtgatatcgaagaaggagatcttctacattcagcccttcggattggctgcctggctgtggggaaccatttttatcgacagagttaaagccaaagatgcccaatcggcggtgaacaaaactggtcaaattatcaaaaggcggaaggcgcgagtactgatgttccctgaaggcaccagaaaccttggaaagaagttgctgccgttcaaaaaaggtgccttccatttggcaattgcttcccaagttcctatccagcccgtagcagtatccagatattcgttcatgggtaacgcccgcttcgattcaggtgctgtaactatcaggattcttccaacgattcccacagaaggttgcaccgttgaagacattccaaaattaatagatcaaacgtacaaagcgttatctgaaaacgtggacgaaatttctgcaccaacgagtacgatgaacggaaccgaagccaaaataaaaagcaactgaatccaaagataaaaacttaggcatgtacaaatttgaggcgtctgcgaagtatgcaccgaagctataataaacattcaatataaaagtttgaaatatactacgctgattgaccattccagtaattttctttaataatatactctccaaccggtatctacttccacggttgctatttctaattcgattgatgaaaattgaactgtgacgatcaccaaaaatcagaaagtgttaaatctggccaataaggtggatgctgcaacaattcgtactttattttagtgatttctgaaatagcttatggagcagtgccaattgtgttgatgaaaaatagtcttcttttctgtaaaacagctattttctcatgaatttttatatccagttgattcaaaaggttataataataatctgaattttctattttaccagtaatttagctaattatataatctgaataagagaaactcctattctatccatcacatttcgtttggagtcatggcatcttccagaaagttattctacgtactttcttcttgtatgaccatgtaacacgaccatggcagctatatcatacattttaacttatgtgaaaaatactttgtaatattttgtttgttttagtcttttagtatatgttcattctctattcatgatattcattcttctataacatccagaaaattaccataaccagagaaataagaataattaccattgccaataccagagaaataagatttttctcgtgacacatccccctccagactgaaccagtttttgagtagtatggacgtccataataatggcctatatgttcctgctgtcgatttctatgcacgtaagtttatgtatatcatcaaaatcggctgcaggaaacatgtaggttattattgtggatgtccatactactcaaaaagtttggtttcggcctggaaggggctgtgtcactaacaggatattttttttcttatttctctgaactaaaaagttccatatttagtttagtttagcgttttggtagtgcatatacggaattaaatgaaaatatgtttagttgtttaggttaattacatcccaacaatcgattgagactatataaaatttaaccactaagaaagtagcttccgatgattagggcaaaaacagactaaccattctgcagcgctacgctgtattctaaatttttatgtaaattaaaagtgccattccacaagagcgacagtggctggccacggtcgccgatcctcgctactgtggcgtccattacaaaatcattggtgctaaaaaatcgcctggttcagccagtttgtgggtccacagagtagcgctgtagagtgattcgtctgttttaaacctagatgttcacgatcaaaatgtagaatagcatatttcgtgggccccttgtggactcttggtgcttcttccaaaatctgcttcggtgattctgttatttttttacttgtataaaaaacaattcgttcagtattgatttactggcgaacttttgtcgatgttatatatgccgtatgacatgtaaggactgattagttttaggtttaacttgttagttgactgttgtgtaacattatgatttatgatttgtttggttctgtttgattgtatatttacgaaataaataagttacaaactcaaaa

SEQ ID NO: 1141 - DNA, 2402 bp, Diabrotica virgifera
  SmartBlast Evalue=1E-68; Info="1-acyl-sn-glycerol-3-phosphate acyltransferase alpha, putative n=1 Tax=Pediculus humanus corporis RepID=E0VLP4_PEDHC"
gtaagattaaaattgtagtttctaggtaggtcatagtctattttagtcgatgtaatcgagtgtttgctttaacaataagtgcgctagagatatgggactgctactttacaccttgggatctttaacgctgctggctatattatggacggtcagctccgtagccagatatgtcctgaaatttgcctgttttggagtgttatgcatgatatttgcttgtgcaccgatacctttgatgttgttgaatccaagaaatagcaaaaacgccttaattccatcagctctgctaagatggagcagaaagttttatggactggagtacaaagtcgaaggcctagagaatatcgataaagatagcggttccgtggttcttataaaccatcaaagtgctatagatttacttgttttagcctatttatggcccttaatgccaaactcaactgtgatatcgaagaaggagatcttctacattcagcccttcggattggctgcctggctgtggggaaccatttttatcgacagagttaaagccaaagatgcccaatcggcggtgaacaaaactggtcaaattatcaaaaggcggaaggcgcgagtactgatgttccctgaaggcaccagaaaccttggaaagaagttgctgccgttcaaaaaaggtgccttccatttggcaattgcttcccaagttcctatccagcccgtagcagtatccagatattcgttcatgggtaacgcccgcttcgattcaggtgctgtaactatcaggattcttccaacgattcccacagaaggttgcaccgttgaagacattccaaaattaatagatcaaacgtacaaagcgttatctgaaaacgtggacgaaatttctgcaccaacgagtacgatgaacggaaccgaagccaaaataaaaagcaactgaatccaaagataaaaacttaggcatgtacaaatttgaggcgtctgcgaagtatgcaccgaagctataataaacattcaatataaaagtttgaaatatactacgctgattgaccattccagtaattttctttaataatatactctccaaccggtatctacttccacggttgctatttctaattcgattgatgaaaattgaactgtgacgatcaccaaaaatcagaaagtgttaaatctggccaataaggtggatgctgcaacaattcgtactttattttagtgatttctgaaatagcttatggagcagtgccaattgtgttgatgaaaaatagtcttcttttctgtaaaacagctattttctcatgaatttttatatccagttgattcaaaaggttataataataatctgaattttctattttaccagtaatttagctaattatataatctgaataagagaaactcctattctatccatcacatttcgtttggagtcatggcatcttccagaaagttattctacgtactttcttcttgtatgaccatgtaacacgaccatggcagctatatcatacattttaacttatgtgaaaaatactttgtaatattttgtttgttttagtcttttagtatatgttcattctctattcatgatattcattcttctataacatccagaaaattaccataaccagagaaataagaataattaccattgccaataccagagaaataagatttttctcgtgacacatccccctccagactgaaccagtttttgagtagtatggacgtccgtaataatggcctatatgttcctgcagtcgattttgatgatatacatagttataaacaagtgaagatcaaaaaatggtaaattttcgattctttcgtctattgctaaagggtgaagcattctagacaagtttgagagtgagaagctcataaatcgtatataagcttcaatgtggcgttcgctgaatatgtctgcccttgtttgttgcttggaaaattgcaaaagtcataaattttgagattttataagtgttcatggcttatgtagaattaagttacaaccttcttattacacggaatgctgagatttcttgtgcttaaattatattttgaatttcaaagtagttggtcaagtggtttagaagttatttaatttgtttatcccaaattccttttgtttgcaacactataattcagaaaattatgaggttacagtaatagttcggactgacagtttatgagagagaacatttatactctaaacttaaaaaaaaatgacaaagagtaattttaacagtgtaaaattattttgcaaaaacatgtcgattttttgcttacttataaacaattagaataactttttaaccgttacccgtagaaaaattatttttccatatttagaaagactgaatttttatacacatttagacagaaatacaattgtcctagggcaattagggatgaagttaggcccc

SEQ ID NO: 1142 - DNA, 1022 bp, Diabrotica virgifera
atgcgaactttagagaaaaaaaacaacagttttttggtacacccggtatacaatgggaacttgcctgtttggcagcaatgttgttgcagtgatatggttaaagaatcaggctatgaagtgtttagaaagtcacttggatcagccaacgggtttggggagtgtgagacatcaaaaatgaccaaaagtgggccgatttctatgcacgtaagtttatgtatatcatcaaaatcggctgcaggaaacatgtaggttgttattatggatgtccatactactcggaaaatttggtttcggcctggaaggggctgtgtcaccaacaggatatttttttttcatatttctctgaactaaaaagttccatatttagtttagtttagcgttttggtagtgcatatacggaattaaatgaaaatatgtttagttgtttaggttaattacatcccaacaatcgattgagactatataaaatttaaccactaagaaagtagcttccgatgattagggcaaaaacagactaaccattctgcagcgctacgctgtattctaaatttttatgtaaattaaaagtgccattccacaagagcgacagtggctggccacggtcgccgatcctcgctactgtggcgtccattacaaaatcattggtgctaaaaaatcgcctggttcagccagtttgtgggtccacagagtagcgctgtagagtgattcgtctgttttaaacctagatgttcacgatcaaaatgtagaatagcatatttcgtgggccccttgtggactcttggtgcttcttccaaaatctgcttcggtgattctgttatttttttacttgtataaaaaacaattcgttcagtattgatttactggcgaacttttgtcgatgttatatatgccgtatgacatgtaaggactgattagttttaggtttaacttgttagttgactgttgtgtaacattatgatttatgatttgtttggttctgtttgattgtatatttacgaaataaataagttacaaactcaaaa

SEQ ID NO: 1143 - DNA, 1021 bp, Diabrotica virgifera
atgcgaactttagagaaaaaaaacaacagttttttggtacacccggtatacaatgggaacttgcctgtttggcagcaatgttgttgcagtgatatggttaaagaatcaggctatgaagtgtttagaaagtcacttggatcagccaacgggtttggggagtgtgagacatcaaaaatgaccaaaagtgggccgatttctatgcacgtaagtttatgtatatcatcaaaatcggctgcaggaaacatgtaggttgttattatggatgtccatactactcggaaaatttggtttcggcctggaaggggctgtgtcactaacaggatattttttttcttatttctctgaactaaaaagttccatatttagtttagtttagcgttttggtagtgcatatacggaattaaatgaaaatatgtttagttgtttaggttaattacatcccaacaatcgattgagactatataaaatttaaccactaagaaagtagcttccgatgattagggcaaaaacagactaaccattctgcagcgctacgctgtattctaaatttttatgtaaattaaaagtgccattccacaagagcgacagtggctggccacggtcgccgatcctcgctactgtggcgtccattacaaaatcattggtgctaaaaaatcgcctggttcagccagtttgtgggtccacagagtagcgctgtagagtgattcgtctgttttaaacctagatgttcacgatcaaaatgtagaatagcatatttcgtgggccccttgtggactcttggtgcttcttccaaaatctgcttcggtgattctgttatttttttacttgtataaaaaacaattcgttcagtattgatttactggcgaacttttgtcgatgttatatatgccgtatgacatgtaaggactgattagttttaggtttaacttgttagttgactgttgtgtaacattatgatttatgatttgtttggttctgtttgattgtatatttacgaaataaataagttacaaactcaaaa

SEQ ID NO: 1144 - DNA, 607 bp, Diabrotica virgifera
cttttttcgtctattgctagaagggtggagcattctagacaagtttgagagtgggaagctcataaatcgtatataaagcttcaatgtggcgttcgctggatatgtctatccttgtttgttgcttagaaaattgcaaggtgagtcataaattttgagattttataaatgttcataacttatgtaaaaattggttagaaccttcttattacacgaaatgctgagacttcttgtgctggaattatattttaaatttcaaagtaattggtcgaatggtttagaagttatttaatttgtttatcccaaattccttttgtttgcaacactgtaattcagaaaattatgaggttacagtgatagttcggacagtttatgagagagaacatttatactctaaacttaaaaaaaaatgacaaagagtaattttaacagtgtaaaattattttgcaaaaacatgtcgattttttgcttacttataaacaattagaataactttttaaccgttacccgtagaaaaattatttttccatatttagaaagactgaatttttatacacatttagacagaaatacaattgtcctagggcaattagggatgaagttaggcccc

SEQ ID NO: 1145 - DNA, 3035 bp, Diabrotica virgifera
  SmartBlast Evalue=1E-68; Info="1-acyl-sn-glycerol-3-phosphate acyltransferase alpha, putative n=1 Tax=Pediculus humanus corporis RepID=E0VLP4_PEDHC"
attcagtaatcgatcgagtaatcagcagtagagtacgagtacggcgatcctcagtaactacgcaggtcgattatgctgtgccggtacgcattgaattcaatcagctgaagaacataatgttttgatatctctttttaattttcgtccaagaacaatatttgtttatttatttgtgttaaaaaagtgcaagttttgcttcaaataaaaattaagtatagatatgggactgctactttacaccttgggatctttaacgctgctggctatattatggacggtcagctccgtagccagatatgtcctgaaatttgcctgttttggagtgttatgcatgatatttgcttgtgcaccgatacctttgatgttgttgaatccaagaaatagcaaaaacgccttaattccatcagctctgctaagatggagcagaaagttttatggactggagtacaaagtcgaaggcctagagaatatcgataaagatagcggttccgtggttcttataaaccatcaaagtgctatagatttacttgttttagcctatttatggcccttaatgccaaactcaactgtgatatcgaagaaggagatcttctacattcagcccttcggattggctgcctggctgtggggaaccatttttatcgacagagttaaagccaaagatgcccaatcggcggtgaacaaaactggtcaaattatcaaaaggcggaaggcgcgagtactgatgttccctgaaggcaccagaaaccttggaaagaagttgctgccgttcaaaaaaggtgccttccatttggcaattgcttcccaagttcctatccagcccgtagcagtatccagatattcgttcatgggtaacgcccgcttcgattcaggtgctgtaactatcaggattcttccaacgattcccacagaaggttgcaccgttgaagacattccaaaattaatagatcaaacgtacaaagcgttatctgaaaacgtggacgaaatttctgcaccaacgagtacgatgaacggaaccgaagccaaaataaaaagcaactgaatccaaagataaaaacttaggcatgtacaaatttgaggcgtctgcgaagtatgcaccgaagctataataaacattcaatataaaagtttgaaatatactacgctgattgaccattccagtaattttctttaataatatactctccaaccggtatctacttccacggttgctatttctaattcgattgatgaaaattgaactgtgacgatcgccaaaagtcagaaagtgctaaatctggccaataaggtggatgctgcaacaattcgtactttattttagtgatttctgaaatagcttatggagcagtgccaattgtgttgatgaaaaatagtcttcttttctgaaaatcaggtattttctcatgaattttcatatccagttgattcataaggttataataataatcggaattttctattttatcagtaatttagctaattatataatccgaataagagaaacccctattctacccatcacatttcgtttggagtcatggcatcttccagaaagttattctacgtactttcttcttgtatgaccatgtaacacgaccatggcagctatataatacattgtgacttatgtgaaaaaaatactttgtaatacagtcaaacctgccatatccggatcaatgtggcgacagaccgatccggatatgaaaaaatccggatatcaaaaccactaccttttttatactctctgaaacgttttctccttcatacattccagtaatcaacgccgtcaataactttcgtcgataggcacgttttatagattctataatacattacttcgccatcttttagttcttctgttagtgcgttgtccaacagcaagactgcctttatcggtagatttcggtagatccggacggcgcagaaccctctggatatggggaggtccggatatgacaggtccggatatggcaggttgtactgtattttgtttgtttttagtgttttagtaaatgttcattctctattcatgatattcattcttctataacattcagaaaattaccataaccagagaaataagaataattaccattaccaataccagagaaataagatttttctcgtgacacatccccctccagactgaaccagtttttgagtagtatggacgtccgtaataatggcctatatgttcctgcagtcgatttctatgcacgtaagtttatgtgtatcatcaaaatcggctgcaggaaacatgtaggttgttattatggatgtccatactactcggaaaatttggtttcggcctggaaggggctgtgtcactaacaggatattttttttcttatttctctgaactaaaaagttccatatttagtttagtttagcgttttggtagtgcatatacggaattaaatgaaaatatgtttagttgtttaggttaattacatcccaacaatcgattgagactatataaaatttaaccactaagaaagtagcttccgatgattagggcaaaaacagactaaccattctgcagcgctacgctgtattctaaatttttatgtaaattaaaagtgccattccacaagagcgacagtggctggccacggtcgccgatcctcgctactgtggcgtccattacaaaatcattggtgctaaaaaatcgcctggttcagccagtttgtgggtccacagagtagcgctgtagagtgattcgtctgttttaaacctagatgttcacgatcaaaatgtagaatagcatatttcgtgggccccttgtggactcttggtgcttcttccaaaatctgcttcggtgattctgttatttttttacttgtataaaaaacaattcgttcagtattgatttactggcgaacttttgtcgatgttatatatgccgtatgacatgtaaggactgattagttttaggtttaacttgttagttgactgttgtgtaacattatgatttatgatttgtttggttctgtttgattgtatatttacgaaataaataagttacaaactcaaaa

SEQ ID NO: 1146 - DNA, 3036 bp, Diabrotica virgifera
  SmartBlast Evalue=1E-68; Info="1-acyl-sn-glycerol-3-phosphate acyltransferase alpha, putative n=1 Tax=Pediculus humanus corporis RepID=E0VLP4_PEDHC"
attcagtaatcgatcgagtaatcagcagtagagtacgagtacggcgatcctcagtaactacgcaggtcgattatgctgtgccggtacgcattgaattcaatcagctgaagaacataatgttttgatatctctttttaattttcgtccaagaacaatatttgtttatttatttgtgttaaaaaagtgcaagttttgcttcaaataaaaattaagtatagatatgggactgctactttacaccttgggatctttaacgctgctggctatattatggacggtcagctccgtagccagatatgtcctgaaatttgcctgttttggagtgttatgcatgatatttgcttgtgcaccgatacctttgatgttgttgaatccaagaaatagcaaaaacgccttaattccatcagctctgctaagatggagcagaaagttttatggactggagtacaaagtcgaaggcctagagaatatcgataaagatagcggttccgtggttcttataaaccatcaaagtgctatagatttacttgttttagcctatttatggcccttaatgccaaactcaactgtgatatcgaagaaggagatcttctacattcagcccttcggattggctgcctggctgtggggaaccatttttatcgacagagttaaagccaaagatgcccaatcggcggtgaacaaaactggtcaaattatcaaaaggcggaaggcgcgagtactgatgttccctgaaggcaccagaaaccttggaaagaagttgctgccgttcaaaaaaggtgccttccatttggcaattgcttcccaagttcctatccagcccgtagcagtatccagatattcgttcatgggtaacgcccgcttcgattcaggtgctgtaactatcaggattcttccaacgattcccacagaaggttgcaccgttgaagacattccaaaattaatagatcaaacgtacaaagcgttatctgaaaacgtggacgaaatttctgcaccaacgagtacgatgaacggaaccgaagccaaaataaaaagcaactgaatccaaagataaaaacttaggcatgtacaaatttgaggcgtctgcgaagtatgcaccgaagctataataaacattcaatataaaagtttgaaatatactacgctgattgaccattccagtaattttctttaataatatactctccaaccggtatctacttccacggttgctatttctaattcgattgatgaaaattgaactgtgacgatcgccaaaagtcagaaagtgctaaatctggccaataaggtggatgctgcaacaattcgtactttattttagtgatttctgaaatagcttatggagcagtgccaattgtgttgatgaaaaatagtcttcttttctgaaaatcaggtattttctcatgaattttcatatccagttgattcataaggttataataataatcggaattttctattttatcagtaatttagctaattatataatccgaataagagaaacccctattctacccatcacatttcgtttggagtcatggcatcttccagaaagttattctacgtactttcttcttgtatgaccatgtaacacgaccatggcagctatataatacattgtgacttatgtgaaaaaaatactttgtaatacagtcaaacctgccatatccggatcaatgtggcgacagaccgatccggatatgaaaaaatccggatatcaaaaccactaccttttttatactctctgaaacgttttctccttcatacattccagtaatcaacgccgtcaataactttcgtcgataggcacgttttatagattctataatacattacttcgccatcttttagttcttctgttagtgcgttgtccaacagcaagactgcctttatcggtagatttcggtagatccggacggcgcagaaccctctggatatggggaggtccggatatgacaggtccggatatggcaggttgtactgtattttgtttgtttttagtgttttagtaaatgttcattctctattcatgatattcattcttctataacattcagaaaattaccataaccagagaaataagaataattaccattaccaataccagagaaataagatttttctcgtgacacatccccctccagactgaaccagtttttgagtagtatggacgtccgtaataatggcctatatgttcctgcagtcgatttctatgcacgtaagtttatgtgtatcatcaaaatcggctgcaggaaacatgtaggttgttattatggatgtccatactactcggaaaatttggtttcggcctggaaggggctgtgtcaccaacaggatatttttttttcatatttctctgaactaaaaagttccatatttagtttagtttagcgttttggtagtgcatatacggaattaaatgaaaatatgtttagttgtttaggttaattacatcccaacaatcgattgagactatataaaatttaaccactaagaaagtagcttccgatgattagggcaaaaacagactaaccattctgcagcgctacgctgtattctaaatttttatgtaaattaaaagtgccattccacaagagcgacagtggctggccacggtcgccgatcctcgctactgtggcgtccattacaaaatcattggtgctaaaaaatcgcctggttcagccagtttgtgggtccacagagtagcgctgtagagtgattcgtctgttttaaacctagatgttcacgatcaaaatgtagaatagcatatttcgtgggccccttgtggactcttggtgcttcttccaaaatctgcttcggtgattctgttatttttttacttgtataaaaaacaattcgttcagtattgatttactggcgaacttttgtcgatgttatatatgccgtatgacatgtaaggactgattagttttaggtttaacttgttagttgactgttgtgtaacattatgatttatgatttgtttggttctgtttgattgtatatttacgaaataaataagttacaaactcaaaa

SEQ ID NO: 1147 - DNA, 3035 bp, Diabrotica virgifera
  SmartBlast Evalue=1E-68; Info="1-acyl-sn-glycerol-3-phosphate acyltransferase alpha, putative n=1 Tax=Pediculus humanus corporis RepID=E0VLP4_PEDHC"
attcagtaatcgatcgagtaatcagcagtagagtacgagtacggcgatcctcagtaactacgcaggtcgattatgctgtgccggtacgcattgaattcaatcagctgaagaacataatgttttgatatctctttttaattttcgtccaagaacaatatttgtttatttatttgtgttaaaaaagtgcaagttttgcttcaaataaaaattaagtatagatatgggactgctactttacaccttgggatctttaacgctgctggctatattatggacggtcagctccgtagccagatatgtcctgaaatttgcctgttttggagtgttatgcatgatatttgcttgtgcaccgatacctttgatgttgttgaatccaagaaatagcaaaaacgccttaattccatcagctctgctaagatggagcagaaagttttatggactggagtacaaagtcgaaggcctagagaatatcgataaagatagcggttccgtggttcttataaaccatcaaagtgctatagatttacttgttttagcctatttatggcccttaatgccaaactcaactgtgatatcgaagaaggagatcttctacattcagcccttcggattggctgcctggctgtggggaaccatttttatcgacagagttaaagccaaagatgcccaatcggcggtgaacaaaactggtcaaattatcaaaaggcggaaggcgcgagtactgatgttccctgaaggcaccagaaaccttggaaagaagttgctgccgttcaaaaaaggtgccttccatttggcaattgcttcccaagttcctatccagcccgtagcagtatccagatattcgttcatgggtaacgcccgcttcgattcaggtgctgtaactatcaggattcttccaacgattcccacagaaggttgcaccgttgaagacattccaaaattaatagatcaaacgtacaaagcgttatctgaaaacgtggacgaaatttctgcaccaacgagtacgatgaacggaaccgaagccaaaataaaaagcaactgaatccaaagataaaaacttaggcatgtacaaatttgaggcgtctgcgaagtatgcaccgaagctataataaacattcaatataaaagtttgaaatatactacgctgattgaccattccagtaattttctttaataatatactctccaaccggtatctacttccacggttgctatttctaattcgattgatgaaaattgaactgtgacgatcgccaaaagtcagaaagtgctaaatctggccaataaggtggatgctgcaacaattcgtactttattttagtgatttctgaaatagcttatggagcagtgccaattgtgttgatgaaaaatagtcttcttttctgaaaatcaggtattttctcatgaattttcatatccagttgattcataaggttataataataatcggaattttctattttatcagtaatttagctaattatataatccgaataagagaaacccctattctacccatcacatttcgtttggagtcatggcatcttccagaaagttattctacgtactttcttcttgtatgaccatgtaacacgaccatggcagctatataatacattgtgacttatgtgaaaaaaatactttgtaatacagtcaaacctgccatatccggatcaatgtggcgacagaccgatccggatatgaaaaaatccggatatcaaaaccactaccttttttatactctctgaaacgttttctccttcatacattccagtaatcaacgccgtcaataactttcgtcgataggcacgttttatagattctataatacattacttcgccatcttttagttcttctgttagtgcgttgtccaacagcaagactgcctttatcggtagatttcggtagatccggacggcgcagaaccctctggatatggggaggtccggatatgacaggtccggatatggcaggttgtactgtattttgtttgtttttagtgttttagtaaatgttcattctctattcatgatattcattcttctataacattcagaaaattaccataaccagagaaataagaataattaccattaccaataccagagaaataagatttttctcgtgacacatccccctccagactgaaccagtttttgagtagtatggacgtccataataatggcctatatgttcctgctgtcgatttctatgcacgtaagtttatgtatatcatcaaaatcggctgcaggaaacatgtaggttattattgtggatgtccatactactcaaaaagtttggtttcggcctggaaggggctgtgtcactaacaggatattttttttcttatttctctgaactaaaaagttccatatttagtttagtttagcgttttggtagtgcatatacggaattaaatgaaaatatgtttagttgtttaggttaattacatcccaacaatcgattgagactatataaaatttaaccactaagaaagtagcttccgatgattagggcaaaaacagactaaccattctgcagcgctacgctgtattctaaatttttatgtaaattaaaagtgccattccacaagagcgacagtggctggccacggtcgccgatcctcgctactgtggcgtccattacaaaatcattggtgctaaaaaatcgcctggttcagccagtttgtgggtccacagagtagcgctgtagagtgattcgtctgttttaaacctagatgttcacgatcaaaatgtagaatagcatatttcgtgggccccttgtggactcttggtgcttcttccaaaatctgcttcggtgattctgttatttttttacttgtataaaaaacaattcgttcagtattgatttactggcgaacttttgtcgatgttatatatgccgtatgacatgtaaggactgattagttttaggtttaacttgttagttgactgttgtgtaacattatgatttatgatttgtttggttctgtttgattgtatatttacgaaataaataagttacaaactcaaaa

SEQ ID NO: 1148 - DNA, 2906 bp, Diabrotica virgifera
  SmartBlast Evalue=1E-68; Info="1-acyl-sn-glycerol-3-phosphate acyltransferase alpha, putative n=1 Tax=Pediculus humanus corporis RepID=E0VLP4_PEDHC"
gtaagattaaaattgtagtttctaggtaggtcatagtctattttagtcgatgtaatcgagtgtttgctttaacaataagtgcgctagagatatgggactgctactttacaccttgggatctttaacgctgctggctatattatggacggtcagctccgtagccagatatgtcctgaaatttgcctgttttggagtgttatgcatgatatttgcttgtgcaccgatacctttgatgttgttgaatccaagaaatagcaaaaacgccttaattccatcagctctgctaagatggagcagaaagttttatggactggagtacaaagtcgaaggcctagagaatatcgataaagatagcggttccgtggttcttataaaccatcaaagtgctatagatttacttgttttagcctatttatggcccttaatgccaaactcaactgtgatatcgaagaaggagatcttctacattcagcccttcggattggctgcctggctgtggggaaccatttttatcgacagagttaaagccaaagatgcccaatcggcggtgaacaaaactggtcaaattatcaaaaggcggaaggcgcgagtactgatgttccctgaaggcaccagaaaccttggaaagaagttgctgccgttcaaaaaaggtgccttccatttggcaattgcttcccaagttcctatccagcccgtagcagtatccagatattcgttcatgggtaacgcccgcttcgattcaggtgctgtaactatcaggattcttccaacgattcccacagaaggttgcaccgttgaagacattccaaaattaatagatcaaacgtacaaagcgttatctgaaaacgtggacgaaatttctgcaccaacgagtacgatgaacggaaccgaagccaaaataaaaagcaactgaatccaaagataaaaacttaggcatgtacaaatttgaggcgtctgcgaagtatgcaccgaagctataataaacattcaatataaaagtttgaaatatactacgctgattgaccattccagtaattttctttaataatatactctccaaccggtatctacttccacggttgctatttctaattcgattgatgaaaattgaactgtgacgatcgccaaaagtcagaaagtgctaaatctggccaataaggtggatgctgcaacaattcgtactttattttagtgatttctgaaatagcttatggagcagtgccaattgtgttgatgaaaaatagtcttcttttctgaaaatcaggtattttctcatgaattttcatatccagttgattcataaggttataataataatcggaattttctattttatcagtaatttagctaattatataatccgaataagagaaacccctattctacccatcacatttcgtttggagtcatggcatcttccagaaagttattctacgtactttcttcttgtatgaccatgtaacacgaccatggcagctatataatacattgtgacttatgtgaaaaaaatactttgtaatacagtcaaacctgccatatccggatcaatgtggcgacagaccgatccggatatgaaaaaatccggatatcaaaaccactaccttttttatactctctgaaacgttttctccttcatacattccagtaatcaacgccgtcaataactttcgtcgataggcacgttttatagattctataatacattacttcgccatcttttagttcttctgttagtgcgttgtccaacagcaagactgcctttatcggtagatttcggtagatccggacggcgcagaaccctctggatatggggaggtccggatatgacaggtccggatatggcaggttgtactgtattttgtttgtttttagtgttttagtaaatgttcattctctattcatgatattcattcttctataacattcagaaaattaccataaccagagaaataagaataattaccattaccaataccagagaaataagatttttctcgtgacacatccccctccagactgaaccagtttttgagtagtatggacgtccgtaataatggcctatatgttcctgcagtcgatttctatgcacgtaagtttatgtgtatcatcaaaatcggctgcaggaaacatgtaggttgttattatggatgtccatactactcggaaaatttggtttcggcctggaaggggctgtgtcactaacaggatattttttttcttatttctctgaactaaaaagttccatatttagtttagtttagcgttttggtagtgcatatacggaattaaatgaaaatatgtttagttgtttaggttaattacatcccaacaatcgattgagactatataaaatttaaccactaagaaagtagcttccgatgattagggcaaaaacagactaaccattctgcagcgctacgctgtattctaaatttttatgtaaattaaaagtgccattccacaagagcgacagtggctggccacggtcgccgatcctcgctactgtggcgtccattacaaaatcattggtgctaaaaaatcgcctggttcagccagtttgtgggtccacagagtagcgctgtagagtgattcgtctgttttaaacctagatgttcacgatcaaaatgtagaatagcatatttcgtgggccccttgtggactcttggtgcttcttccaaaatctgcttcggtgattctgttatttttttacttgtataaaaaacaattcgttcagtattgatttactggcgaacttttgtcgatgttatatatgccgtatgacatgtaaggactgattagttttaggtttaacttgttagttgactgttgtgtaacattatgatttatgatttgtttggttctgtttgattgtatatttacgaaataaataagttacaaactcaaaa

SEQ ID NO: 1149 - DNA, 2907 bp, Diabrotica virgifera
  SmartBlast Evalue=1E-68; Info="1-acyl-sn-glycerol-3-phosphate acyltransferase alpha, putative n=1 Tax=Pediculus humanus corporis RepID=E0VLP4_PEDHC"
gtaagattaaaattgtagtttctaggtaggtcatagtctattttagtcgatgtaatcgagtgtttgctttaacaataagtgcgctagagatatgggactgctactttacaccttgggatctttaacgctgctggctatattatggacggtcagctccgtagccagatatgtcctgaaatttgcctgttttggagtgttatgcatgatatttgcttgtgcaccgatacctttgatgttgttgaatccaagaaatagcaaaaacgccttaattccatcagctctgctaagatggagcagaaagttttatggactggagtacaaagtcgaaggcctagagaatatcgataaagatagcggttccgtggttcttataaaccatcaaagtgctatagatttacttgttttagcctatttatggcccttaatgccaaactcaactgtgatatcgaagaaggagatcttctacattcagcccttcggattggctgcctggctgtggggaaccatttttatcgacagagttaaagccaaagatgcccaatcggcggtgaacaaaactggtcaaattatcaaaaggcggaaggcgcgagtactgatgttccctgaaggcaccagaaaccttggaaagaagttgctgccgttcaaaaaaggtgccttccatttggcaattgcttcccaagttcctatccagcccgtagcagtatccagatattcgttcatgggtaacgcccgcttcgattcaggtgctgtaactatcaggattcttccaacgattcccacagaaggttgcaccgttgaagacattccaaaattaatagatcaaacgtacaaagcgttatctgaaaacgtggacgaaatttctgcaccaacgagtacgatgaacggaaccgaagccaaaataaaaagcaactgaatccaaagataaaaacttaggcatgtacaaatttgaggcgtctgcgaagtatgcaccgaagctataataaacattcaatataaaagtttgaaatatactacgctgattgaccattccagtaattttctttaataatatactctccaaccggtatctacttccacggttgctatttctaattcgattgatgaaaattgaactgtgacgatcgccaaaagtcagaaagtgctaaatctggccaataaggtggatgctgcaacaattcgtactttattttagtgatttctgaaatagcttatggagcagtgccaattgtgttgatgaaaaatagtcttcttttctgaaaatcaggtattttctcatgaattttcatatccagttgattcataaggttataataataatcggaattttctattttatcagtaatttagctaattatataatccgaataagagaaacccctattctacccatcacatttcgtttggagtcatggcatcttccagaaagttattctacgtactttcttcttgtatgaccatgtaacacgaccatggcagctatataatacattgtgacttatgtgaaaaaaatactttgtaatacagtcaaacctgccatatccggatcaatgtggcgacagaccgatccggatatgaaaaaatccggatatcaaaaccactaccttttttatactctctgaaacgttttctccttcatacattccagtaatcaacgccgtcaataactttcgtcgataggcacgttttatagattctataatacattacttcgccatcttttagttcttctgttagtgcgttgtccaacagcaagactgcctttatcggtagatttcggtagatccggacggcgcagaaccctctggatatggggaggtccggatatgacaggtccggatatggcaggttgtactgtattttgtttgtttttagtgttttagtaaatgttcattctctattcatgatattcattcttctataacattcagaaaattaccataaccagagaaataagaataattaccattaccaataccagagaaataagatttttctcgtgacacatccccctccagactgaaccagtttttgagtagtatggacgtccgtaataatggcctatatgttcctgcagtcgatttctatgcacgtaagtttatgtgtatcatcaaaatcggctgcaggaaacatgtaggttgttattatggatgtccatactactcggaaaatttggtttcggcctggaaggggctgtgtcaccaacaggatatttttttttcatatttctctgaactaaaaagttccatatttagtttagtttagcgttttggtagtgcatatacggaattaaatgaaaatatgtttagttgtttaggttaattacatcccaacaatcgattgagactatataaaatttaaccactaagaaagtagcttccgatgattagggcaaaaacagactaaccattctgcagcgctacgctgtattctaaatttttatgtaaattaaaagtgccattccacaagagcgacagtggctggccacggtcgccgatcctcgctactgtggcgtccattacaaaatcattggtgctaaaaaatcgcctggttcagccagtttgtgggtccacagagtagcgctgtagagtgattcgtctgttttaaacctagatgttcacgatcaaaatgtagaatagcatatttcgtgggccccttgtggactcttggtgcttcttccaaaatctgcttcggtgattctgttatttttttacttgtataaaaaacaattcgttcagtattgatttactggcgaacttttgtcgatgttatatatgccgtatgacatgtaaggactgattagttttaggtttaacttgttagttgactgttgtgtaacattatgatttatgatttgtttggttctgtttgattgtatatttacgaaataaataagttacaaactcaaaa

SEQ ID NO: 1150 - DNA, 2869 bp, Diabrotica virgifera
  SmartBlast Evalue=1E-68; Info="1-acyl-sn-glycerol-3-phosphate acyltransferase alpha, putative n=1 Tax=Pediculus humanus corporis RepID=E0VLP4_PEDHC"
attcagtaatcgatcgagtaatcagcagtagagtacgagtacggcgatcctcagtaactacgcaggtcgattatgctgtgccggtacgcattgaattcaatcagctgaagaacataatgttttgatatctctttttaattttcgtccaagaacaatatttgtttatttatttgtgttaaaaaagtgcaagttttgcttcaaataaaaattaagtatagatatgggactgctactttacaccttgggatctttaacgctgctggctatattatggacggtcagctccgtagccagatatgtcctgaaatttgcctgttttggagtgttatgcatgatatttgcttgtgcaccgatacctttgatgttgttgaatccaagaaatagcaaaaacgccttaattccatcagctctgctaagatggagcagaaagttttatggactggagtacaaagtcgaaggcctagagaatatcgataaagatagcggttccgtggttcttataaaccatcaaagtgctatagatttacttgttttagcctatttatggcccttaatgccaaactcaactgtgatatcgaagaaggagatcttctacattcagcccttcggattggctgcctggctgtggggaaccatttttatcgacagagttaaagccaaagatgcccaatcggcggtgaacaaaactggtcaaattatcaaaaggcggaaggcgcgagtactgatgttccctgaaggcaccagaaaccttggaaagaagttgctgccgttcaaaaaaggtgccttccatttggcaattgcttcccaagttcctatccagcccgtagcagtatccagatattcgttcatgggtaacgcccgcttcgattcaggtgctgtaactatcaggattcttccaacgattcccacagaaggttgcaccgttgaagacattccaaaattaatagatcaaacgtacaaagcgttatctgaaaacgtggacgaaatttctgcaccaacgagtacgatgaacggaaccgaagccaaaataaaaagcaactgaatccaaagataaaaacttaggcatgtacaaatttgaggcgtctgcgaagtatgcaccgaagctataataaacattcaatataaaagtttgaaatatactacgctgattgaccattccagtaattttctttaataatatactctccaaccggtatctacttccacggttgctatttctaattcgattgatgaaaattgaactgtgacgatcgccaaaagtcagaaagtgctaaatctggccaataaggtggatgctgcaacaattcgtactttattttagtgatttctgaaatagcttatggagcagtgccaattgtgttgatgaaaaatagtcttcttttctgaaaatcaggtattttctcatgaattttcatatccagttgattcataaggttataataataatcggaattttctattttatcagtaatttagctaattatataatccgaataagagaaacccctattctacccatcacatttcgtttggagtcatggcatcttccagaaagttattctacgtactttcttcttgtatgaccatgtaacacgaccatggcagctatataatacattgtgacttatgtgaaaaaaatactttgtaatacagtcaaacctgccatatccggatcaatgtggcgacagaccgatccggatatgaaaaaatccggatatcaaaaccactaccttttttatactctctgaaacgttttctccttcatacattccagtaatcaacgccgtcaataactttcgtcgataggcacgttttatagattctataatacattacttcgccatcttttagttcttctgttagtgcgttgtccaacagcaagactgcctttatcggtagatttcggtagatccggacggcgcagaaccctctggatatggggaggtccggatatgacaggtccggatatggcaggttgtactgtattttgtttgtttttagtgttttagtaaatgttcattctctattcatgatattcattcttctataacattcagaaaattaccataaccagagaaataagaataattaccattaccaataccagagaaataagatttttctcgtgacacatccccctccagactgaaccagtttttgagtagtatggacgtccgtaataatggcctatatgttcctgcagtcgattttgatgatatacatagttataaacaagtgaagatcaaaaaatggtaaattttcgattctttcgtctattgctaaagggtgaagcattctagacaagtttgagagtgagaagctcataaatcgtatataagcttcaatgtggcgttcgctgaatatgtctgcccttgtttgttgcttggaaaattgcaaaagtcataaattttgagattttataagtgttcatggcttatgtagaattaagttacaaccttcttattacacggaatgctgagatttcttgtgcttaaattatattttgaatttcaaagtagttggtcaagtggtttagaagttatttaatttgtttatcccaaattccttttgtttgcaacactataattcagaaaattatgaggttacagtaatagttcggactgacagtttatgagagagaacatttatactctaaacttaaaaaaaaatgacaaagagtaattttaacagtgtaaaattattttgcaaaaacatgtcgattttttgcttacttataaacaattagaataactttttaaccgttacccgtagaaaaattatttttccatatttagaaagactgaatttttatacacatttagacagaaatacaattgtcctagggcaattagggatgaagttaggcccc

SEQ ID NO: 1151 - DNA, 2906 bp, Diabrotica virgifera
  SmartBlast Evalue=1E-68; Info="1-acyl-sn-glycerol-3-phosphate acyltransferase alpha, putative n=1 Tax=Pediculus humanus corporis RepID=E0VLP4_PEDHC"
gtaagattaaaattgtagtttctaggtaggtcatagtctattttagtcgatgtaatcgagtgtttgctttaacaataagtgcgctagagatatgggactgctactttacaccttgggatctttaacgctgctggctatattatggacggtcagctccgtagccagatatgtcctgaaatttgcctgttttggagtgttatgcatgatatttgcttgtgcaccgatacctttgatgttgttgaatccaagaaatagcaaaaacgccttaattccatcagctctgctaagatggagcagaaagttttatggactggagtacaaagtcgaaggcctagagaatatcgataaagatagcggttccgtggttcttataaaccatcaaagtgctatagatttacttgttttagcctatttatggcccttaatgccaaactcaactgtgatatcgaagaaggagatcttctacattcagcccttcggattggctgcctggctgtggggaaccatttttatcgacagagttaaagccaaagatgcccaatcggcggtgaacaaaactggtcaaattatcaaaaggcggaaggcgcgagtactgatgttccctgaaggcaccagaaaccttggaaagaagttgctgccgttcaaaaaaggtgccttccatttggcaattgcttcccaagttcctatccagcccgtagcagtatccagatattcgttcatgggtaacgcccgcttcgattcaggtgctgtaactatcaggattcttccaacgattcccacagaaggttgcaccgttgaagacattccaaaattaatagatcaaacgtacaaagcgttatctgaaaacgtggacgaaatttctgcaccaacgagtacgatgaacggaaccgaagccaaaataaaaagcaactgaatccaaagataaaaacttaggcatgtacaaatttgaggcgtctgcgaagtatgcaccgaagctataataaacattcaatataaaagtttgaaatatactacgctgattgaccattccagtaattttctttaataatatactctccaaccggtatctacttccacggttgctatttctaattcgattgatgaaaattgaactgtgacgatcgccaaaagtcagaaagtgctaaatctggccaataaggtggatgctgcaacaattcgtactttattttagtgatttctgaaatagcttatggagcagtgccaattgtgttgatgaaaaatagtcttcttttctgaaaatcaggtattttctcatgaattttcatatccagttgattcataaggttataataataatcggaattttctattttatcagtaatttagctaattatataatccgaataagagaaacccctattctacccatcacatttcgtttggagtcatggcatcttccagaaagttattctacgtactttcttcttgtatgaccatgtaacacgaccatggcagctatataatacattgtgacttatgtgaaaaaaatactttgtaatacagtcaaacctgccatatccggatcaatgtggcgacagaccgatccggatatgaaaaaatccggatatcaaaaccactaccttttttatactctctgaaacgttttctccttcatacattccagtaatcaacgccgtcaataactttcgtcgataggcacgttttatagattctataatacattacttcgccatcttttagttcttctgttagtgcgttgtccaacagcaagactgcctttatcggtagatttcggtagatccggacggcgcagaaccctctggatatggggaggtccggatatgacaggtccggatatggcaggttgtactgtattttgtttgtttttagtgttttagtaaatgttcattctctattcatgatattcattcttctataacattcagaaaattaccataaccagagaaataagaataattaccattaccaataccagagaaataagatttttctcgtgacacatccccctccagactgaaccagtttttgagtagtatggacgtccataataatggcctatatgttcctgctgtcgatttctatgcacgtaagtttatgtatatcatcaaaatcggctgcaggaaacatgtaggttattattgtggatgtccatactactcaaaaagtttggtttcggcctggaaggggctgtgtcactaacaggatattttttttcttatttctctgaactaaaaagttccatatttagtttagtttagcgttttggtagtgcatatacggaattaaatgaaaatatgtttagttgtttaggttaattacatcccaacaatcgattgagactatataaaatttaaccactaagaaagtagcttccgatgattagggcaaaaacagactaaccattctgcagcgctacgctgtattctaaatttttatgtaaattaaaagtgccattccacaagagcgacagtggctggccacggtcgccgatcctcgctactgtggcgtccattacaaaatcattggtgctaaaaaatcgcctggttcagccagtttgtgggtccacagagtagcgctgtagagtgattcgtctgttttaaacctagatgttcacgatcaaaatgtagaatagcatatttcgtgggccccttgtggactcttggtgcttcttccaaaatctgcttcggtgattctgttatttttttacttgtataaaaaacaattcgttcagtattgatttactggcgaacttttgtcgatgttatatatgccgtatgacatgtaaggactgattagttttaggtttaacttgttagttgactgttgtgtaacattatgatttatgatttgtttggttctgtttgattgtatatttacgaaataaataagttacaaactcaaaa

SEQ ID NO: 1152 - DNA, 2740 bp, Diabrotica virgifera
  SmartBlast Evalue=1E-68; Info="1-acyl-sn-glycerol-3-phosphate acyltransferase alpha, putative n=1 Tax=Pediculus humanus corporis RepID=E0VLP4_PEDHC"
gtaagattaaaattgtagtttctaggtaggtcatagtctattttagtcgatgtaatcgagtgtttgctttaacaataagtgcgctagagatatgggactgctactttacaccttgggatctttaacgctgctggctatattatggacggtcagctccgtagccagatatgtcctgaaatttgcctgttttggagtgttatgcatgatatttgcttgtgcaccgatacctttgatgttgttgaatccaagaaatagcaaaaacgccttaattccatcagctctgctaagatggagcagaaagttttatggactggagtacaaagtcgaaggcctagagaatatcgataaagatagcggttccgtggttcttataaaccatcaaagtgctatagatttacttgttttagcctatttatggcccttaatgccaaactcaactgtgatatcgaagaaggagatcttctacattcagcccttcggattggctgcctggctgtggggaaccatttttatcgacagagttaaagccaaagatgcccaatcggcggtgaacaaaactggtcaaattatcaaaaggcggaaggcgcgagtactgatgttccctgaaggcaccagaaaccttggaaagaagttgctgccgttcaaaaaaggtgccttccatttggcaattgcttcccaagttcctatccagcccgtagcagtatccagatattcgttcatgggtaacgcccgcttcgattcaggtgctgtaactatcaggattcttccaacgattcccacagaaggttgcaccgttgaagacattccaaaattaatagatcaaacgtacaaagcgttatctgaaaacgtggacgaaatttctgcaccaacgagtacgatgaacggaaccgaagccaaaataaaaagcaactgaatccaaagataaaaacttaggcatgtacaaatttgaggcgtctgcgaagtatgcaccgaagctataataaacattcaatataaaagtttgaaatatactacgctgattgaccattccagtaattttctttaataatatactctccaaccggtatctacttccacggttgctatttctaattcgattgatgaaaattgaactgtgacgatcgccaaaagtcagaaagtgctaaatctggccaataaggtggatgctgcaacaattcgtactttattttagtgatttctgaaatagcttatggagcagtgccaattgtgttgatgaaaaatagtcttcttttctgaaaatcaggtattttctcatgaattttcatatccagttgattcataaggttataataataatcggaattttctattttatcagtaatttagctaattatataatccgaataagagaaacccctattctacccatcacatttcgtttggagtcatggcatcttccagaaagttattctacgtactttcttcttgtatgaccatgtaacacgaccatggcagctatataatacattgtgacttatgtgaaaaaaatactttgtaatacagtcaaacctgccatatccggatcaatgtggcgacagaccgatccggatatgaaaaaatccggatatcaaaaccactaccttttttatactctctgaaacgttttctccttcatacattccagtaatcaacgccgtcaataactttcgtcgataggcacgttttatagattctataatacattacttcgccatcttttagttcttctgttagtgcgttgtccaacagcaagactgcctttatcggtagatttcggtagatccggacggcgcagaaccctctggatatggggaggtccggatatgacaggtccggatatggcaggttgtactgtattttgtttgtttttagtgttttagtaaatgttcattctctattcatgatattcattcttctataacattcagaaaattaccataaccagagaaataagaataattaccattaccaataccagagaaataagatttttctcgtgacacatccccctccagactgaaccagtttttgagtagtatggacgtccgtaataatggcctatatgttcctgcagtcgattttgatgatatacatagttataaacaagtgaagatcaaaaaatggtaaattttcgattctttcgtctattgctaaagggtgaagcattctagacaagtttgagagtgagaagctcataaatcgtatataagcttcaatgtggcgttcgctgaatatgtctgcccttgtttgttgcttggaaaattgcaaaagtcataaattttgagattttataagtgttcatggcttatgtagaattaagttacaaccttcttattacacggaatgctgagatttcttgtgcttaaattatattttgaatttcaaagtagttggtcaagtggtttagaagttatttaatttgtttatcccaaattccttttgtttgcaacactataattcagaaaattatgaggttacagtaatagttcggactgacagtttatgagagagaacatttatactctaaacttaaaaaaaaatgacaaagagtaattttaacagtgtaaaattattttgcaaaaacatgtcgattttttgcttacttataaacaattagaataactttttaaccgttacccgtagaaaaattatttttccatatttagaaagactgaatttttatacacatttagacagaaatacaattgtcctagggcaattagggatgaagttaggcccc

SEQ ID NO: 1153 - DNA, 2698 bp, Diabrotica virgifera
  SmartBlast Evalue=1E-68; Info="1-acyl-sn-glycerol-3-phosphate acyltransferase alpha, putative n=1 Tax=Pediculus humanus corporis RepID=E0VLP4_PEDHC"
attcagtaatcgatcgagtaatcagcagtagagtacgagtacggcgatcctcagtaactacgcaggtcgattatgctgtgccggtacgcattgaattcaatcagctgaagaacataatgttttgatatctctttttaattttcgtccaagaacaatatttgtttatttatttgtgttaaaaaagtgcaagttttgcttcaaataaaaattaagtatagatatgggactgctactttacaccttgggatctttaacgctgctggctatattatggacggtcagctccgtagccagatatgtcctgaaatttgcctgttttggagtgttatgcatgatatttgcttgtgcaccgatacctttgatgttgttgaatccaagaaatagcaaaaacgccttaattccatcagctctgctaagatggagcagaaagttttatggactggagtacaaagtcgaaggcctagagaatatcgataaagatagcggttccgtggttcttataaaccatcaaagtgctatagatttacttgttttagcctatttatggcccttaatgccaaactcaactgtgatatcgaagaaggagatcttctacattcagcccttcggattggctgcctggctgtggggaaccatttttatcgacagagttaaagccaaagatgcccaatcggcggtgaacaaaactggtcaaattatcaaaaggcggaaggcgcgagtactgatgttccctgaaggcaccagaaaccttggaaagaagttgctgccgttcaaaaaaggtgccttccatttggcaattgcttcccaagttcctatccagcccgtagcagtatccagatattcgttcatgggtaacgcccgcttcgattcaggtgctgtaactatcaggattcttccaacgattcccacagaaggttgcaccgttgaagacattccaaaattaatagatcaaacgtacaaagcgttatctgaaaacgtggacgaaatttctgcaccaacgagtacgatgaacggaaccgaagccaaaataaaaagcaactgaatccaaagataaaaacttaggcatgtacaaatttgaggcgtctgcgaagtatgcaccgaagctataataaacattcaatataaaagtttgaaatatactacgctgattgaccattccagtaattttctttaataatatactctccaaccggtatctacttccacggttgctatttctaattcgattgatgaaaattgaactgtgacgatcaccaaaaatcagaaagtgttaaatctggccaataaggtggatgctgcaacaattcgtactttattttagtgatttctgaaatagcttatggagcagtgccaattgtgttgatgaaaaatagtcttcttttctgtaaaacagctattttctcatgaatttttatatccagttgattcaaaaggttataataataatctgaattttctattttaccagtaatttagctaattatataatctgaataagagaaactcctattctatccatcacatttcgtttggagtcatggcatcttccagaaagttattctacgtactttcttcttgtatgaccatgtaacacgaccatggcagctatatcatacattttaacttatgtgaaaaatactttgtaatattttgtttgttttagtcttttagtatatgttcattctctattcatgatattcattcttctataacatccagaaaattaccataaccagagaaataagaataattaccattgccaataccagagaaataagatttttctcgtgacacatccccctccagactgaaccagtttttgagtagtatggacgtccgtaataatggcctatatgttcctgcagtcgatttctatgcacgtaagtttatgtgtatcatcaaaatcggctgcaggaaacatgtaggttgttattatggatgtccatactactcggaaaatttggtttcggcctggaaggggctgtgtcaccaacaggatatttttttttcatatttctctgaactaaaaagttccatatttagtttagtttagcgttttggtagtgcatatacggaattaaatgaaaatatgtttagttgtttaggttaattacatcccaacaatcgattgagactatataaaatttaaccactaagaaagtagcttccgatgattagggcaaaaacagactaaccattctgcagcgctacgctgtattctaaatttttatgtaaattaaaagtgccattccacaagagcgacagtggctggccacggtcgccgatcctcgctactgtggcgtccattacaaaatcattggtgctaaaaaatcgcctggttcagccagtttgtgggtccacagagtagcgctgtagagtgattcgtctgttttaaacctagatgttcacgatcaaaatgtagaatagcatatttcgtgggccccttgtggactcttggtgcttcttccaaaatctgcttcggtgattctgttatttttttacttgtataaaaaacaattcgttcagtattgatttactggcgaacttttgtcgatgttatatatgccgtatgacatgtaaggactgattagttttaggtttaacttgttagttgactgttgtgtaacattatgatttatgatttgtttggttctgtttgattgtatatttacgaaataaataagttacaaactcaaaa

SEQ ID NO: 1154 - DNA, 1045 bp, Diabrotica virgifera
  misc_feature (63)..(63): n is a, c, g, or t
  SmartBlast Evalue=1E-26; Info=Endonuclease-reverse transcriptase n=1 Tax=Bombyx mori RepID=D5LB38_BOMMO
cttatgacagcttcttgttcataatacagattatttattattcttatatcccgtgtgtcgatnttctttgttctcagtagttttattaatcggattatgtttcaccgtatcgaatgcctttttataatctaggaagcagacatagatgtcctggtttacatctaaacatctctgtattagcacatttactgcaaataatgcttctctggttccttgagcagttctaaattcgaactgtccactgtcttgttctaactttttatatattctacgatgaataatctttagaaatacttttagtgtgtggcacattagactgatggtacggtgttcgcaacattgtctggcgtttctctttttcggtatagtcacgaatgttggtagaagccattctttatagacggagaggcagcgctgaaaaatctctttgaatttactaaagctaaattttcacagttgattactgtgattgtgtagagaaacatactgcggtcggtcaagcgaaacgtagaacaggggttactgagagggtatcaaagttgctttcctacgaaggctaattaaatccatttactaaggctgaaaatcagtacacacattctaaattgaatataaataaaagttattatagtcggtcagctgtatgacgggacagagccggtcggtcggccccaatgaatgtacagggttattcactatattttgacccccttgtaaactgctttatttacagaattagaaaaaaatgtaaaatacaaaagttattcgattttttaattatgattttttaacatatatcgtactagtgacgtcatccatctgggcgtgatgacgtaatcgactattctttaaatgagaataggggtcgtgtgctagctcatttgaaaggttattcaattctctattcagtaatataaacaatctcattttccctttagttatgcaatatgaagtcacttcattattgaagttatttttaaagtgtgactgagtgatgaatagaaagcaaaatattatttcctgtttaattgttatattaacaaac

SEQ ID NO: 1155 - DNA, 1101 bp, Diabrotica virgifera
  misc_feature (63)..(63): n is a, c, g, or t
  SmartBlast Evalue=1E-26; Info=Endonuclease-reverse transcriptase n=1 Tax=Bombyx mori RepID=D5LB38_BOMMO
cttatgacagcttcttgttcataatacagattatttattattcttatatcccgtgtgtcgatnttctttgttctcagtagttttattaatcggattatgtttcaccgtatcgaatgcctttttataatctaggaagcagacatagatgtcctggtttacatctaaacatctctgtattagcacatttactgcaaataatgcttctctggttccttgagcagttctaaattcgaactgtccactgtcttgttctaactttttatatattctacgatgaataatctttagaaatacttttagtgtgtggcacattagactgatggtacggtgttcgcaacattgtctggcgtttctctttttcggtatagtcacgaatgttggtagaagccattctttatagacggagaggcagcgctgaaaaatctctttgaatttactaaagctaaattttcacagttgattactgtgattgtgtagagaaacatactgcggtcggtcaagcgaaacgtagaacaggggttactgagagggtatcaaagttgctttcctacgaaggctaattaaatccatttactaaggctgaaaatcagtacacacattctaaattgaatataaataaaagttattatagtcggtcagctgtatgacgggacagagccggtcggtcggccccaatgaatgtacagggttattcactatattttgacccccttgtaaactgctttatttgcagaattagaaaaaaatacaagaatatatacaaccgtatatacaagaaaaatcaagtaaagctgtatatcatatcggcatcaaaatctatctcttaaaaaatgttttagctgtgactatacaattgacctttttggacaaaagcatccgcctatatctttttcacaaagaattcgactacttgttggatagtcttgatcttgatgatagaggtccaccagaatgttcctcatccctttggtaactgacaagcattcatctcgatgaaataaaactttactcaaaacaggtacacgtatgtttacttctacaaataatgtttaacgttcacaacttatcaactaaaacctagaactgaatatattaactcta

SEQ ID NO: 1156 - DNA, 1008 bp, Diabrotica virgifera
  misc_feature (63)..(63): n is a, c, g, or t
  SmartBlast Evalue=1E-46; Info=Endonuclease-reverse transcriptase n=1 Tax=Bombyx mori RepID=D5LB38_BOMMO
cttatgacagcttcttgttcataatacagattatttattattcttatatcccgtgtgtcgatnttctttgttctcagtagttttattaatcggattatgtttcaccgtatcgaatgcctttttataatctaggaagcagacatagatgtcctggtttacatctaaacatctctgtattagcacatttactgcaaataatgcttctctggttccttgagcatttctaaatccgaactgagtttgtccaatgtcttgttctaactttttgtatattctacgatgaataatctttagaaatactttgagtatgaggcacattagactgatggtacggtgttcgcaacattgtctggcgtttctctttttcggtatagtcaagaatgttgatagaagccattctttaggtaatatacctgttctgtatatcatattaaataattcgacaattaaatgtatattgcagtcggctgtaagttgcaatatttctgtcgttatttcgtccagtcctacagctttcccagttttcagttctttaatggtgtgttttacttcactttctattatttctggtccagtctcctcaacgaaatattcgttatctattgtgtctcggttgtcattaaacagctgttctatatagtttgtccatatatggtttaataaattctaaatatgtattattagaatgtgccagaaatatcatgagatgagattgttgttgggctgaaaaattcttggcctgattttatttttcaacataacctctaatattaataaatttcatccagttgttcccaatcctattatttctccttatggtgttcctgtgcaagtgctgcaacgtactcatcaatgcctttttattgacttccgcaatgatttttaaattggatgaaaagttcaaagcgaaaagcgctgaccagcgatgagggaacttaacttttgagaacagctgggagtaaatctggcaaataggtggatattccagcagttcatagctcatagtcc

SEQ ID NO: 1157 - DNA, 835 bp, Diabrotica virgifera
ccatgatatattattataatctgatcagttcttggccttgcctacgatcacaaacaacactactcgcatgatcactgtctgacaaattcactttgtatttgagatggggcacaaatggaacggagaccgtggaactcataaacgagacaggaaacgaatgtacactctgtgcagatcactctgtatatagtcaagaggcagcgctgaaaaatctctttgaatttactaaagctaaatttttcacagttgattactgtgattgtgtagagaaacatactgcggtcggtcaagcgaaacgtagaacaggggttactgagagggtatcaaagttgctttcctacgaaggctaattaaatccatttactaaggctgaaaatcagtacacacattctaaattgaatataaataaaagttattatagtcggtcagctgtatgacgggacagagccggtcggtcggccccaatgaatgtacagggttattcactatattttgacccccttgtaaactgctttatttacagaattagaaaaaaatgtaaaatacaaaagttattcgattttttaattatgattttttaacatatatcgtactagtgacgtcatccatctgggcgtgatgacgtaatcgactattctttaaatgagaataggggtcgtgtgctagctcatttgaaaggttattcaattctctattcagtaatataaacaatctcattttccctttagttatgcaatatgaagtcacttcattattgaagttatttttaaagtgtgactgagtgatgaatagaaagcaaaatattatttcctgtttaattgttatattaacaaac

SEQ ID NO: 1158 - DNA, 891 bp, Diabrotica virgifera
ccatgatatattattataatctgatcagttcttggccttgcctacgatcacaaacaacactactcgcatgatcactgtctgacaaattcactttgtatttgagatggggcacaaatggaacggagaccgtggaactcataaacgagacaggaaacgaatgtacactctgtgcagatcactctgtatatagtcaagaggcagcgctgaaaaatctctttgaatttactaaagctaaatttttcacagttgattactgtgattgtgtagagaaacatactgcggtcggtcaagcgaaacgtagaacaggggttactgagagggtatcaaagttgctttcctacgaaggctaattaaatccatttactaaggctgaaaatcagtacacacattctaaattgaatataaataaaagttattatagtcggtcagctgtatgacgggacagagccggtcggtcggccccaatgaatgtacagggttattcactatattttgacccccttgtaaactgctttatttgcagaattagaaaaaaatacaagaatatatacaaccgtatatacaagaaaaatcaagtaaagctgtatatcatatcggcatcaaaatctatctcttaaaaaatgttttagctgtgactatacaattgacctttttggacaaaagcatccgcctatatctttttcacaaagaattcgactacttgttggatagtcttgatcttgatgatagaggtccaccagaatgttcctcatccctttggtaactgacaagcattcatctcgatgaaataaaactttactcaaaacaggtacacgtatgtttacttctacaaataatgtttaacgttcacaacttatcaactaaaacctagaactgaatatattaactcta

SEQ ID NO: 1159 - DNA, 650 bp, Diabrotica virgifera
atagtccaagaggcagcgctgaaaaatctctttgaatttactaaagctagatttttcacagttgattactgtgattgtgtagagaaacatactgcggtcggtcaagcgaaacgtagaacaggggttactgagagggtatcaaagttgctttcctacgaaggctaattaaatccatttactaaggctgaaaatcagtacacacattctaaattgaatataaataaaagttattatagtcggtcagctgtatgacgggacagagccggtcggtcggccccaatgaatgtacagggttattcactatattttgacccccttgtaaactgctttatttacagaattagaaaaaaatgtaaaatacaaaagttattcgattttttaattatgattttttaacatatatcgtactagtgacgtcatccatctgggcgtgatgacgtaatcgactattctttaaatgagaataggggtcgtgtgctagctcatttgaaaggttattcaattctctattcagtaatataaacaatctcattttccctttagttatgcaatatgaagtcacttcattattgaagttatttttaaagtgtgactgagtgatgaatagaaagcaaaatattatttcctgtttaattgttatattaacaaac

SEQ ID NO: 1160 - DNA, 706 bp, Diabrotica virgifera
atagtccaagaggcagcgctgaaaaatctctttgaatttactaaagctagatttttcacagttgattactgtgattgtgtagagaaacatactgcggtcggtcaagcgaaacgtagaacaggggttactgagagggtatcaaagttgctttcctacgaaggctaattaaatccatttactaaggctgaaaatcagtacacacattctaaattgaatataaataaaagttattatagtcggtcagctgtatgacgggacagagccggtcggtcggccccaatgaatgtacagggttattcactatattttgacccccttgtaaactgctttatttgcagaattagaaaaaaatacaagaatatatacaaccgtatatacaagaaaaatcaagtaaagctgtatatcatatcggcatcaaaatctatctcttaaaaaatgttttagctgtgactatacaattgacctttttggacaaaagcatccgcctatatctttttcacaaagaattcgactacttgttggatagtcttgatcttgatgatagaggtccaccagaatgttcctcatccctttggtaactgacaagcattcatctcgatgaaataaaactttactcaaaacaggtacacgtatgtttacttctacaaataatgtttaacgttcacaacttatcaactaaaacctagaactgaatatattaactcta

SEQ ID NO: 1161 - DNA, 391 bp, Diabrotica virgifera
  SmartBlast Evalue=2E-12; Info=Cathepsin B-like proteinase n=1 Tax=Diabrotica virgifera virgifera RepID=Q70EW7_DIAVI
ttttaaataaggttacagtgatgtgtgtatcagcaacaaaatggaggatagtaagttactgtttcttgatattaatgtgttagagactcatttaactaaagtgtctggtcgtgctattggaacgctttttgggtacgtctatcgaaacttgtattaaacaaatgtatataattactgtcctttgtgttgtatttaattattggtaacggtaaagcctgtatatatttgtttggttcgatttcaaccgatggcgcaagcagattggtctacaatagtgctgataacatctgaacagtctttccagttttcccttgcatcgaaagaatctggaacttgaatatcttcactgtgcataaatccttttacatctcctaaactccttttctcgctc

SEQ ID NO: 1162 - DNA, 2262 bp, Diabrotica virgifera
atgactacactttatattaccaaccttatattctagtttacaagtctttgcttaaattatctccccatctttcgaaatggtacaaaaatataaaacagtttattatctatcacaacagatattcattataaaatatcaaatttgagcaagctatagatacactagtgttaaaaacacatcgtgggttgtttttgcgcaaatttaaaacgttattcttatatagataggtcaaatgcttatcattgtaactgttattgcaaaaaaatctttttggaaagatgggaggctaaatataatatgaaccgtatttaaaacccgtgaaggagaagaatttttgactgatccagtttacttacattacgaatattctatactttgtgttttgctcaaactattcgtattctttgagacacaaatatgaaatagacgtactcaaaacagttccaaaatgatcttccagatgtgagaacaaggctggtaggtttactttgcattattgccaacattatttgaagtatgtagtttttgtctgttaattttatatatttgaagcagaaatgaaatctaactgaatggatttggaagatgcatctactatttttcaatatactagtagagttatacagagtgagtctgtatttggaatacattcaatatcttaaatattaatcgtttttttttaaatgctcagactcgtcgattagtatttcaaattgtcctttttgacaccctgtatacattgttattgtatgtcaagggggacaatttgaaatactaatcgacgggtctgagcaattttcagaaaaaaacagttggtgtttgagatattgaattaattccaaattacagactcacctgtatatacaaattcagcaatttatagtagttttaaataaggttacagtgatgtgtgtatcagcaacaaaatggaggatagtaagttactgtttcttgatattaatgtgttagagactcatttaacatttaaaaaaagagctaaagtatcattcataaaataccaaaatgtagataccattctaaagtgtcgtcgtgctattggaacgctttttgggtacgtctatcgaaacttgtattaaacaaatgtatataattactgtcctttgtgttgtatttaattattggtaacggtaaagcctgtatatatttgtttggttcgatttcaaccgatggcgcagatgttaatttttttctttgagaatatagttttattttttagttgatgcttcggttttgttgatgagtagcagaagttggtagtagcttcagacatgcaaattattgaatttgagttgacgtgcaccgaaacaacgatttatgttacatgttgccaatatgtaacataaatcgttgttccagtgcacacttcaattatctaaatttaggaaaactacaaattttgaatagaaatcgtgtgttaagaaaatgtaatacaaataaaggacaattcttgtgttaataggaacagtggcttgaaagactgtcgagtcctagactgtgaataaaagtgatctaaatcgccctgaggtcttcaaaatgtggtgctatagtagaattttaaaagtttatggtggagaagattcgaaactccacaatatactctaaggggcagcgctgaaaaatttctctgaatttgctaagctagtttttcacagttgattactgtgattgtgtagagaaacatactgcggtcggtcaaagcgaaacgtagaacaggtggtactgacagcttgtcaaagttgcttacctgcggaggtaattaaatccatttactaaggctgaaaatcagtacacacattctaaattgaatataaataaaagttattatagtcggtcagctgtatgacgggacagagccggtcggtcggccccaatgaatgtacagggttattcactatattttgacccccttgtaaactgctttatttacagaattagaaaaaaatgtaaaatacaaaagttattcgattttttaattatgattttttaacatatatcgtactagtgacgtcatccatctgggcgtgatgacgtaatcgactattctttaaatgagaataggggtcgtgtgctagctcatttgaaaggttattcaattctctattcagtaatataaacaatctcattttccctttagttatgcaatatgaagtcacttcattattgaagttatttttaaagtgtgactgagtgatgaatagaaagcaaaatattatttcctgtttaattgttatattaacaaac

SEQ ID NO: 1163 - DNA, 2318 bp, Diabrotica virgifera
atgactacactttatattaccaaccttatattctagtttacaagtctttgcttaaattatctccccatctttcgaaatggtacaaaaatataaaacagtttattatctatcacaacagatattcattataaaatatcaaatttgagcaagctatagatacactagtgttaaaaacacatcgtgggttgtttttgcgcaaatttaaaacgttattcttatatagataggtcaaatgcttatcattgtaactgttattgcaaaaaaatctttttggaaagatgggaggctaaatataatatgaaccgtatttaaaacccgtgaaggagaagaatttttgactgatccagtttacttacattacgaatattctatactttgtgttttgctcaaactattcgtattctttgagacacaaatatgaaatagacgtactcaaaacagttccaaaatgatcttccagatgtgagaacaaggctggtaggtttactttgcattattgccaacattatttgaagtatgtagtttttgtctgttaattttatatatttgaagcagaaatgaaatctaactgaatggatttggaagatgcatctactatttttcaatatactagtagagttatacagagtgagtctgtatttggaatacattcaatatcttaaatattaatcgtttttttttaaatgctcagactcgtcgattagtatttcaaattgtcctttttgacaccctgtatacattgttattgtatgtcaagggggacaatttgaaatactaatcgacgggtctgagcaattttcagaaaaaaacagttggtgtttgagatattgaattaattccaaattacagactcacctgtatatacaaattcagcaatttatagtagttttaaataaggttacagtgatgtgtgtatcagcaacaaaatggaggatagtaagttactgtttcttgatattaatgtgttagagactcatttaacatttaaaaaaagagctaaagtatcattcataaaataccaaaatgtagataccattctaaagtgtcgtcgtgctattggaacgctttttgggtacgtctatcgaaacttgtattaaacaaatgtatataattactgtcctttgtgttgtatttaattattggtaacggtaaagcctgtatatatttgtttggttcgatttcaaccgatggcgcagatgttaatttttttctttgagaatatagttttattttttagttgatgcttcggttttgttgatgagtagcagaagttggtagtagcttcagacatgcaaattattgaatttgagttgacgtgcaccgaaacaacgatttatgttacatgttgccaatatgtaacataaatcgttgttccagtgcacacttcaattatctaaatttaggaaaactacaaattttgaatagaaatcgtgtgttaagaaaatgtaatacaaataaaggacaattcttgtgttaataggaacagtggcttgaaagactgtcgagtcctagactgtgaataaaagtgatctaaatcgccctgaggtcttcaaaatgtggtgctatagtagaattttaaaagtttatggtggagaagattcgaaactccacaatatactctaaggggcagcgctgaaaaatttctctgaatttgctaagctagtttttcacagttgattactgtgattgtgtagagaaacatactgcggtcggtcaaagcgaaacgtagaacaggtggtactgacagcttgtcaaagttgcttacctgcggaggtaattaaatccatttactaaggctgaaaatcagtacacacattctaaattgaatataaataaaagttattatagtcggtcagctgtatgacgggacagagccggtcggtcggccccaatgaatgtacagggttattcactatattttgacccccttgtaaactgctttatttgcagaattagaaaaaaatacaagaatatatacaaccgtatatacaagaaaaatcaagtaaagctgtatatcatatcggcatcaaaatctatctcttaaaaaatgttttagctgtgactatacaattgacctttttggacaaaagcatccgcctatatctttttcacaaagaattcgactacttgttggatagtcttgatcttgatgatagaggtccaccagaatgttcctcatccctttggtaactgacaagcattcatctcgatgaaataaaactttactcaaaacaggtacacgtatgtttacttctacaaataatgtttaacgttcacaacttatcaactaaaacctagaactgaatatattaactcta

SEQ ID NO: 1164 - DNA, 1672 bp, Diabrotica virgifera
taaatctttatgtagatatattactaaaatatataaatcactacaccatcacatacaaaatctttgtccatagttacctctattttatttagttagtaaatctacctctacatgtacaaaatattcatataactatattaagaaaacgtttttattgtttctcaaggaaaatatagtgcctcactcaaacaaatcctcataagagattcagtacttttttttaaacaagaagtttgtttatttggtcttattaaatggttttgtaaaaaatgtgacgtagtatagaaactcgtactgcattatcatataattaagttcacatttaacgaggaatagtgacttgctctactaagtacaaatatatgatacagtttttaaaaatgacttcgaaaaatattaggttgcagtatacatatatttaatcttgccgagtgggctaaatgaccagataaattctcaaaaagagtataaaaatctacggcagcgaatatttcctaaatatataacccgaatttttatcaaaagtatactctacatcgtgtataacatttacaggatgttccaatgaaaataggcacacattataatatttacaacagtagacactcagtgaaatgatttgagttttttacaaaaatttaattctaaaatgtttatataagtataaaataaatttttttattagatatgtatgatttctttaaaatttataccaaattatcgaccctttgcacagcagacggccgaataaataatttaccgaaatccatttgaaatcatatgatttaatttaattgacttattaatttacagtgtagcccttgttttcattaacagacgtagttcctttttttaacaggttcagtgttagttaccttgtaataaagatgtgtacacaggttaatcaatactgtgaatcctgtgaagcaaaaactgatgtttacaaaaggtaaaaaactgattattgaaagttcaaaataagagaaccagtgcaaacgatttggaaaaaccaaacgtaataaatagacggagaggcagcgctgaataatccctttgaatctactaaagctaaacctttcacagttgatcactgtgagtgtgcagagaaacacactgcggtcggtcaagcgaaacgtagaacaggggttactgagagggtatcaaagttgctttcctacgaaggctaattaaatccatttactaaggctgaaaatcagtacacacattctaaattgaatataaataaaagttattatagtcggtcagctgtatgacgggacagagccggtcggtcggccccaatgaatgtacagggttattcactatattttgacccccttgtaaactgctttatttacagaattagaaaaaaatgtaaaatacaaaagttattcgattttttaattatgattttttaacatatatcgtactagtgacgtcatccatctgggcgtgatgacgtaatcgactattctttaaatgagaataggggtcgtgtgctagctcatttgaaaggttattcaattctctattcagtaatataaacaatctcattttccctttagttatgcaatatgaagtcacttcattattgaagttatttttaaagtgtgactgagtgatgaatagaaagcaaaatattatttcctgtttaattgttatattaacaaac

SEQ ID NO: 1165 - DNA, 1728 bp, Diabrotica virgifera
taaatctttatgtagatatattactaaaatatataaatcactacaccatcacatacaaaatctttgtccatagttacctctattttatttagttagtaaatctacctctacatgtacaaaatattcatataactatattaagaaaacgtttttattgtttctcaaggaaaatatagtgcctcactcaaacaaatcctcataagagattcagtacttttttttaaacaagaagtttgtttatttggtcttattaaatggttttgtaaaaaatgtgacgtagtatagaaactcgtactgcattatcatataattaagttcacatttaacgaggaatagtgacttgctctactaagtacaaatatatgatacagtttttaaaaatgacttcgaaaaatattaggttgcagtatacatatatttaatcttgccgagtgggctaaatgaccagataaattctcaaaaagagtataaaaatctacggcagcgaatatttcctaaatatataacccgaatttttatcaaaagtatactctacatcgtgtataacatttacaggatgttccaatgaaaataggcacacattataatatttacaacagtagacactcagtgaaatgatttgagttttttacaaaaatttaattctaaaatgtttatataagtataaaataaatttttttattagatatgtatgatttctttaaaatttataccaaattatcgaccctttgcacagcagacggccgaataaataatttaccgaaatccatttgaaatcatatgatttaatttaattgacttattaatttacagtgtagcccttgttttcattaacagacgtagttcctttttttaacaggttcagtgttagttaccttgtaataaagatgtgtacacaggttaatcaatactgtgaatcctgtgaagcaaaaactgatgtttacaaaaggtaaaaaactgattattgaaagttcaaaataagagaaccagtgcaaacgatttggaaaaaccaaacgtaataaatagacggagaggcagcgctgaataatccctttgaatctactaaagctaaacctttcacagttgatcactgtgagtgtgcagagaaacacactgcggtcggtcaagcgaaacgtagaacaggggttactgagagggtatcaaagttgctttcctacgaaggctaattaaatccatttactaaggctgaaaatcagtacacacattctaaattgaatataaataaaagttattatagtcggtcagctgtatgacgggacagagccggtcggtcggccccaatgaatgtacagggttattcactatattttgacccccttgtaaactgctttatttgcagaattagaaaaaaatacaagaatatatacaaccgtatatacaagaaaaatcaagtaaagctgtatatcatatcggcatcaaaatctatctcttaaaaaatgttttagctgtgactatacaattgacctttttggacaaaagcatccgcctatatctttttcacaaagaattcgactacttgttggatagtcttgatcttgatgatagaggtccaccagaatgttcctcatccctttggtaactgacaagcattcatctcgatgaaataaaactttactcaaaacaggtacacgtatgtttacttctacaaataatgtttaacgttcacaacttatcaactaaaacctagaactgaatatattaactcta

SEQ ID NO: 1166 - DNA, 1322 bp, Diabrotica virgifera
ttttaaataaggttacagtgatgtgtgtatcagcaacaaaatggaggatagtaagttactgtttcttgatattaatgtgttagagactcatttaactaaagtgtctggtcgtgctattggaacgctttttgggtacgtctatcgaaacttgtattaaacaaatgtatataattactgtcctttgtgttgtatttaattattggtaacggtaaagcctgtatatatttgtttggttcgatttcaaccgatggcgcagatgttaatttttttctttgagaatatagttttattttttagttgatgcttcggttttgttgatgagtagcagaagttggtagtagcttcagacatgcaaattattgaatttgagttgacgtgcaccgaaacaacgatttatgttacatgttgccaatatgtaacataaatcgttgttccagtgcacacttcaattatctaaatttaggaaaactacaaattttgaatagaaatcgtgtgttaagaaaatgtaatacaaataaaggacaattcttgtgttaataggaacagtggcttgaaagactgtcgagtcctagactgtgaataaaagtgatctaaatcgccctgaggtcttcaaaatgtggtgctatagtagaattttaaaagtttatggtggagaagattcgaaactccacaatatactctaaggggcagcgctgaaaaatttctctgaatttgctaagctagtttttcacagttgattactgtgattgtgtagagaaacatactgcggtcggtcaaagcgaaacgtagaacaggtggtactgacagcttgtcaaagttgcttacctgcggaggtaattaaatccatttactaaggctgaaaatcagtacacacattctaaattgaatataaataaaagttattatagtcggtcagctgtatgacgggacagagccggtcggtcggccccaatgaatgtacagggttattcactatattttgacccccttgtaaactgctttatttacagaattagaaaaaaatgtaaaatacaaaagttattcgattttttaattatgattttttaacatatatcgtactagtgacgtcatccatctgggcgtgatgacgtaatcgactattctttaaatgagaataggggtcgtgtgctagctcatttgaaaggttattcaattctctattcagtaatataaacaatctcattttccctttagttatgcaatatgaagtcacttcattattgaagttatttttaaagtgtgactgagtgatgaatagaaagcaaaatattatttcctgtttaattgttatattaacaaac

SEQ ID NO: 1167 - DNA, 1378 bp, Diabrotica virgifera
ttttaaataaggttacagtgatgtgtgtatcagcaacaaaatggaggatagtaagttactgtttcttgatattaatgtgttagagactcatttaactaaagtgtctggtcgtgctattggaacgctttttgggtacgtctatcgaaacttgtattaaacaaatgtatataattactgtcctttgtgttgtatttaattattggtaacggtaaagcctgtatatatttgtttggttcgatttcaaccgatggcgcagatgttaatttttttctttgagaatatagttttattttttagttgatgcttcggttttgttgatgagtagcagaagttggtagtagcttcagacatgcaaattattgaatttgagttgacgtgcaccgaaacaacgatttatgttacatgttgccaatatgtaacataaatcgttgttccagtgcacacttcaattatctaaatttaggaaaactacaaattttgaatagaaatcgtgtgttaagaaaatgtaatacaaataaaggacaattcttgtgttaataggaacagtggcttgaaagactgtcgagtcctagactgtgaataaaagtgatctaaatcgccctgaggtcttcaaaatgtggtgctatagtagaattttaaaagtttatggtggagaagattcgaaactccacaatatactctaaggggcagcgctgaaaaatttctctgaatttgctaagctagtttttcacagttgattactgtgattgtgtagagaaacatactgcggtcggtcaaagcgaaacgtagaacaggtggtactgacagcttgtcaaagttgcttacctgcggaggtaattaaatccatttactaaggctgaaaatcagtacacacattctaaattgaatataaataaaagttattatagtcggtcagctgtatgacgggacagagccggtcggtcggccccaatgaatgtacagggttattcactatattttgacccccttgtaaactgctttatttgcagaattagaaaaaaatacaagaatatatacaaccgtatatacaagaaaaatcaagtaaagctgtatatcatatcggcatcaaaatctatctcttaaaaaatgttttagctgtgactatacaattgacctttttggacaaaagcatccgcctatatctttttcacaaagaattcgactacttgttggatagtcttgatcttgatgatagaggtccaccagaatgttcctcatccctttggtaactgacaagcattcatctcgatgaaataaaactttactcaaaacaggtacacgtatgtttacttctacaaataatgtttaacgttcacaacttatcaactaaaacctagaactgaatatattaactcta

SEQ ID NO: 1168 - DNA, 1238 bp, Diabrotica virgifera
attatgaacactaagtgttacaactgaaagagaaatctctggataattttgggacagactttcctatctttagcacagttacaacctatccatattatggtttgtttcctgatttttttcgtcactctcaactcattttatactttattttgctttctatgctttacttttgaagttcattttttattgatttcttaacttcggatctaaggattgagcttcaatattttgtccaaaatcttctcttttataggtaccaagtgatttattaagagtacctggataattttggaacaatattcctactcttatcgcttttccgtaggatggtttattttccctattgatttttttgtattttatgttttcagtacttttcttcttatggtgtgtttctgagatgttttcctcaatttcatattttatttccttagtctttgctttatttttaagtattttttaattgctttttaaatttgtacctttagattcagctcaactattttgtccacaatttcctctcttcagttatcagtaccgtatgttctcattttatcatttaaccttctcatttcatccgtttaaagttatagtccaagaggcagcgctgaaaaatctctttgaattactaaagctagatttttcacagttgattactgtgattgtgtagagaaacatactgcggtcggtcaagcgaaacgtagaacaggggttactgagagggtatcaaagttgctttcctacgaaggctaattaaatccatttactaaggctgaaaatcagtacacacattctaaattgaatataaataaaagttattatagtcggtcagctgtatgacgggacagagccggtcggtcggccccaatgaatgtacagggttattcactatattttgacccccttgtaaactgctttatttacagaattagaaaaaaatgtaaaatacaaaagttattcgattttttaattatgattttttaacatatatcgtactagtgacgtcatccatctgggcgtgatgacgtaatcgactattctttaaatgagaataggggtcgtgtgctagctcatttgaaaggttattcaattctctattcagtaatataaacaatctcattttccctttagttatgcaatatgaagtcacttcattattgaagttatttttaaagtgtgactgagtgatgaatagaaagcaaaatattatttcctgtttaattgttatattaacaaac

SEQ ID NO: 1169 - DNA, 1294 bp, Diabrotica virgifera
attatgaacactaagtgttacaactgaaagagaaatctctggataattttgggacagactttcctatctttagcacagttacaacctatccatattatggtttgtttcctgatttttttcgtcactctcaactcattttatactttattttgctttctatgctttacttttgaagttcattttttattgatttcttaacttcggatctaaggattgagcttcaatattttgtccaaaatcttctcttttataggtaccaagtgatttattaagagtacctggataattttggaacaatattcctactcttatcgcttttccgtaggatggtttattttccctattgatttttttgtattttatgttttcagtacttttcttcttatggtgtgtttctgagatgttttcctcaatttcatattttatttccttagtctttgctttatttttaagtattttttaattgctttttaaatttgtacctttagattcagctcaactattttgtccacaatttcctctcttcagttatcagtaccgtatgttctcattttatcatttaaccttctcatttcatccgtttaaagttatagtccaagaggcagcgctgaaaaatctctttgaattactaaagctagatttttcacagttgattactgtgattgtgtagagaaacatactgcggtcggtcaagcgaaacgtagaacaggggttactgagagggtatcaaagttgctttcctacgaaggctaattaaatccatttactaaggctgaaaatcagtacacacattctaaattgaatataaataaaagttattatagtcggtcagctgtatgacgggacagagccggtcggtcggccccaatgaatgtacagggttattcactatattttgacccccttgtaaactgctttatttgcagaattagaaaaaaatacaagaatatatacaaccgtatatacaagaaaaatcaagtaaagctgtatatcatatcggcatcaaaatctatctcttaaaaaatgttttagctgtgactatacaattgacctttttggacaaaagcatccgcctatatctttttcacaaagaattcgactacttgttggatagtcttgatcttgatgatagaggtccaccagaatgttcctcatccctttggtaactgacaagcattcatctcgatgaaataaaactttactcaaaacaggtacacgtatgtttacttctacaaataatgtttaacgttcacaacttatcaactaaaacctagaactgaatatattaactcta

SEQ ID NO: 1170 - DNA, 1331 bp, Diabrotica virgifera
  SmartBlast Evalue=1E-11; Info=Cathepsin B-like proteinase n=1 Tax=Diabrotica virgifera virgifera RepID=Q70EW7_DIAVI
atgactacactttatattaccaaccttatattctagtttacaagtctttgcttaaattatctccccatctttcgaaatggtacaaaaatataaaacagtttattatctatcacaacagatattcattataaaatatcaaatttgagcaagctatagatacactagtgttaaaaacacatcgtgggttgtttttgcgcaaatttaaaacgttattcttatatagataggtcaaatgcttatcattgtaactgttattgcaaaaaaatctttttggaaagatgggaggctaaatataatatgaaccgtatttaaaacccgtgaaggagaagaatttttgactgatccagtttacttacattacgaatattctatactttgtgttttgctcaaactattcgtattctttgagacacaaatatgaaatagacgtactcaaaacagttccaaaatgatcttccagatgtgagaacaaggctggtaggtttactttgcattattgccaacattatttgaagtatgtagtttttgtctgttaattttatatatttgaagcagaaatgaaatctaactgaatggatttggaagatgcatctactatttttcaatatactagtagagttatacagagtgagtctgtatttggaatacattcaatatcttaaatattaatcgtttttttttaaatgctcagactcgtcgattagtatttcaaattgtcctttttgacaccctgtatacattgttattgtatgtcaagggggacaatttgaaatactaatcgacgggtctgagcaattttcagaaaaaaacagttggtgtttgagatattgaattaattccaaattacagactcacctgtatatacaaattcagcaatttatagtagttttaaataaggttacagtgatgtgtgtatcagcaacaaaatggaggatagtaagttactgtttcttgatattaatgtgttagagactcatttaacatttaaaaaaagagctaaagtatcattcataaaataccaaaatgtagataccattctaaagtgtcgtcgtgctattggaacgctttttgggtacgtctatcgaaacttgtattaaacaaatgtatataattactgtcctttgtgttgtatttaattattggtaacggtaaagcctgtatatatttgtttggttcgatttcaaccgatggcgcaagcagattggtctacaatagtgctgataacatctgaacagtctttccagttttcccttgcatcgaaagaatctggaacttgaatatcttcactgtgcataaatccttttacatctcctaaactccttttctcgctc

SEQ ID NO: 1171 - DNA, 2479 bp, Diabrotica virgifera
  SmartBlast Evalue=0; Info=Endonuclease-reverse transcriptase n= 1 Tax=Bombyx mori RepID=D7F163_BOMMO
ccgttaaacagtcatttaaacattgactataattattataataaacatggatgtattagatatcacatgaattaagccctgggtactatctgacactctctctctctcttgtcgtttccccattactgaggatcgtgatttcttccaatattcctaacaatgtttctccattggtctctatcttcagctgctctaagagcttcgcagaatgagtttccagctgaattctttatttggtcggaccatctagttggtgatcgtcctcttgatcttttccccggaacgtttccagaaacaaataatctctccaaactgtcgtcacctctgcgaaccacgtgaccaaataattgcagaattcgttgcagacatattgtggacagcctttttttaatattaagttggtttagaatggaaacgtttgtcctatgagctgtccaaggtatgcgcagcattcttctccagcaccacatctcaaaggcatcaattttttggcgctcgcatgcgcgaagagtccaagtctctgctccgtatagaaatattgagaatacaagggcattcaccagtctcatcttgatattttgagagatagatctgtctttccaaactttagttaggcgactcatcgcattttttgccataccaatacgtctccgaacttctgcttcacagttaccatcgttagttatactagacccgagatagacaaaggtgtttactatctggtattcctgtaatatgttagtcagttgaatagtgtcaaatctgtcgaccaccattatttttgtcttagctttattgattttcagaccaactttattgctttcgtactcaactcttcgcagaagatcaaacatttcttgctcatttgctgctataagtgtagtgtcatcagcaaatcttaaattggagattttcctaccagctactgttactccaccggcccatccttctaaaaccatcctcatgacatgttcaccataaatgttaaataagtcaggtgacaacacgcatccttgtctaacacctctctcggtcttgaattggtttgagaacttctgatctagtcgtactgtcgctatattagactggtacagatttttaataagtgtcaccaggtgcattggtgcgcccatttctattaaaattgaccacagatttatccagcttacacaatcaaatgccttttggtagtcaacgaagcatataatcataggtacttgaaattctctagacttttcaatgagttgtctcaggttcaggatttgttcccttgtacctttaccctttacaaaccccgcttgttcctgaggtatttggtaatgtagataggtttttaatctgtttttgatgatatgcaacaagattttactagcatgtgttattagtgacagtgtgcggtagttttcacatctggtagtagttccttttttgtgtagtgggatataaattgaggtacaccaatcagatggccattttcctgaattccaaacagcgacacagatagaatggatgatatgtaatcctttgtcacctagtaactgtagtatttcacatggtattgaatcaatgcctggggatttatttctctttagtgatttaattgcatctttgacttcagcgagtaagacagtaggttctctagggtagtcagaaggccactgattttctgctgatacctcgttatttttatatagctcgccacagtagtttcgccatgtttccaatatttcgtcagtatcggtctttagattaccttccttatctattacagaccacgtttgaggtttaaattctctggtaaggagtttgatctggaataaatccctcggttcatttcgacagccatgttcctctatctctctgcatatttgagagatgtaatcagctttgtctttgcggcactgttttctgatttctttcgataacgctctgtattcatcgtttgttccgtatctagttttatgttcttttctgcgttgaatcacagtccacgtattatcggatatccatggcttacggccagtggaaaccgctgcctcacagtcttttgcagcctcgattaccttatcttatagatagatccaagtgctctcagggtcactatctaacccataggcactagtcgctaattgccaaatagcaaatattcattatcctggaggttataatagtgcatttacacagtgtctcctttcagaatctaagtatcatgcaactgcgcatgcccaaatggtttgcacgtgttctccacaccgaatgaaggatcttcttacttctttaagtattgacagaaccagttagacttgttttaatttgcatgacctttgttcgaataaatccatataaaactatttaaaaatatttttaatttaccagtagaagttaactccacctttgacaattacacaatttgacacctctcattatagggcatttttcttgtttgtcttattgtatagatatttattttatctacaac

SEQ ID NO: 1172 - DNA, 1873 bp, Diabrotica virgifera
  SmartBlast Evalue=1E-141; Info=Endonuclease-reverse transcriptase n=1 Tax=Bombyx mori RepID=D7F163_BOMMO
ccataccattatccaaatatcatttttgccatactaatatgtctccgaacttctgcttcacagttaccatcgttagttatactagacccgagatagacaaaggtgtttactatctggtattcctgtagtcctgtagtcagttgaatagtgtcgaatctgtcgaccaccattatttttgtcttagctttattgattttcagaccaactttattgctttcgtactcaactcttcgcagaagatcaaacatttcttgctcatttgctgctataagtgtagtgtcatcagcaaatcttaaattggagattttcctaccagctactgttactccaccggcccatccttctaaaaccatcctcatgacatgttcaccataaatgttaaataagtcaggtgacaacacgcatccttgtctaacacctctctcggtcttgaattggtttgagaacttctgatctagtcgtactgtcgctatattagactggtacagatttttaataagtgtcaccaggtgcattggtgcgcccatttctattaaaattgaccacagatttatccagcttacacaatcaaatgccttttggtagtcaacgaagcatataatcataggtacttgaaattctctagacttttcaatgagttgtctcaggttcaggatttgttcccttgtacctttaccctttacaaaccccgcttgttcctgaggtatttggtaatgtagataggtttttaatctgtttttgatgatatgcaacaagattttactagcatgtgttattagtgacagtgtgcggtagttttcacatctggtagtagttccttttttgtgtagtgggatataaattgaggtacaccaatcagatggccattttcctgaattccaaacagcgacacagatagaatggatgatatgtaatcctttgtcacctagtaactgtagtatttcacatggtattgaatcaatgcctggggatttatttctctttagtgatttaattgcatctttgacttcagcgagtaagacagtaggttctctagggtagtcagaaggccactgattttctgctgatacctcgttatttttatatagctcgccacagtagtttcgccatgtttccaatatttcgtcagtatcggtctttagattaccttccttatctattacagaccacgtttgaggtttaaattctctggtaaggagtttgatctggaataaatccctcggttcatttcgacagccatgttcctctatctctctgcatatttgagagatgtaatcagctttgtctttgcggcactgttttctgatttctttcgataacgctctgtattcatcgtttgttccgtatctagttttatgttcttttctgcgttgaatcacagtccacgtattatcggatatccatggcttacggccagtggaaaccgctgcctcacagtcttttgcagcctcgattaccttatcttatagatagatccaagtgctctcagggtcactatctaacccataggcactagtcgctaattgccaaatagcaaatattcattatcctggaggttataatagtgcatttacacagtgtctcctttcagaatctaagtatcatgcaactgcgcatgcccaaatggtttgcacgtgttctccacaccgaatgaaggatcttcttacttctttaagtattgacagaaccagttagacttgttttaatttgcatgacctttgttcgaataaatccatataaaactatttaaaaatatttttaatttaccagtagaagttaactccacctttgacaattacacaatttgacacctctcattatagggcatttttcttgtttgtcttattgtatagatatttattttatctacaac

SEQ ID NO: 1173 - DNA, 1623 bp, Diabrotica virgifera
  SmartBlast Evalue=1E-121; Info=Endonuclease-reverse transcriptase n=1 Tax=Bombyx mori RepID=D7F163_BOMMO
cttgttcatttgctgctataagtgtagtgtcatcagcaaatcttaaatcggagattttcctaccagctactgttactccaccggcccatctttctaaagccatcctcatgacatattcaccataaatgttaaataagtctggtgacaacacgcatccttgtctaacacctctctcggtcttgaattgatttgagaacttatgatctagtcgtactgtcgctatattagactggtacagatttttaataagtgtcaccaggtgcattggtgcgcccatttctattaaaattgaccacagatttatccagcttacacaatcaaatgccttttggtagtcaacgaagcatataatcataggtacttgaaattctctagacttttcaatgagttgtctcaggttcaggatttgttcccttgtacctttaccctttacaaaccccgcttgttcctgaggtatttggtaatgtagataggtttttaatctgtttttgatgatatgcaacaagattttactagcatgtgttattagtgacagtgtgcggtagttttcacatctggtagtagttccttttttgtgtagtgggatataaattgaggtacaccaatcagatggccattttcctgaattccaaacagcgacacagatagaatggatgatatgtaatcctttgtcacctagtaactgtagtatttcacatggtattgaatcaatgcctggggatttatttctctttagtgatttaattgcatctttgacttcagcgagtaagacagtaggttctctagggtagtcagaaggccactgattttctgctgatacctcgttatttttatatagctcgccacagtagtttcgccatgtttccaatatttcgtcagtatcggtctttagattaccttccttatctattacagaccacgtttgaggtttaaattctctggtaaggagtttgatctggaataaatccctcggttcatttcgacagccatgttcctctatctctctgcatatttgagagatgtaatcagctttgtctttgcggcactgttttctgatttctttcgataacgctctgtattcatcgtttgttccgtatctagttttatgttcttttctgcgttgaatcacagtccacgtattatcggatatccatggcttacggccagtggaaaccgctgcctcacagtcttttgcagcctcgattaccttatcttatagatagatccaagtgctctcagggtcactatctaacccataggcactagtcgctaattgccaaatagcaaatattcattatcctggaggttataatagtgcatttacacagtgtctcctttcagaatctaagtatcatgcaactgcgcatgcccaaatggtttgcacgtgttctccacaccgaatgaaggatcttcttacttctttaagtattgacagaaccagttagacttgttttaatttgcatgacctttgttcgaataaatccatataaaactatttaaaaatatttttaatttaccagtagaagttaactccacctttgacaattacacaatttgacacctctcattatagggcatttttcttgtttgtcttattgtatagatatttattttatctacaac

SEQ ID NO: 1174 - DNA, 1503 bp, Diabrotica virgifera
  SmartBlast Evalue=1E-75; Info=Endonuclease-reverse transcriptase n=1 Tax=Bombyx mori RepID=D7F172_BOMMO
ctcctcaagaaaactcctacatttatctaatttaaaccgaacacctgtcaaaccataatggagttttgtgtatatttccactgcaatataaaaacagtcctcatatcggcaattttaattgcattgccttaggtcgaaagatgcacagcaaattgtagtagatatgcgaaaccgttcgtcctaggtaatatgaaattgattctaagtaagtctgtttttatttctcttacattcaaaatttgaattattttcttttgtgtacaatattttcttttgaaactttgaaaaatgaatttctaaatcttgttcattgttttatatttttttaaagaagtcaaattattaacttttataaacgtcatcttccacaaatacagtaaattcttaagcggtgtatccatttcgcgaggcagccgcgcgcggcatgttcgttgtcgttgctattctgttatgggatgcaaagcgaatactgccgcagtcgaacgatgttcttgattctaaatagtctataatagacgagtcaaattttgtcggtcttttgaaccgcggcaaaggatgtttcttgttgttattactgccgcgcgaagtgtgaatgattctggacaagtttggttcactgtcgactagaagattaaatacagtgagtgcatatttctttaaatgatcatctctctcttgacgtttcctaacaatgtttctccattggtctctatcttcagctgctctaagagcttcgcagaatgagtttccagctgaattctttatttggtcggaccatctagttggtgatcgtcctcttgatcttttccccggaacgtttccagaaacaaataatctctccaaactgtcgtcacctctgcgaaccacgtgaccaaataattgcagaattcgttgcagacatattgtggacagcctttttttaatattaagttggtttagaatggaaacgtttgtcctatgagctgtccaaggtatgcgcagcattcttctccagcaccacatctcaaaggcatcaattttttggcgctcgcatgcgcgaagagtccaagtctctgctccgtatagaaatattgagaatacaagggcattcaccagtctcatcttgatattttgagagatagatctgtctttccaaactttagttaggcgactcatcgcattttttgccataccaatacgtctccgaacttctgcttcacagttaccatcgttagttatactagacccgagatagacaaaggtgtttactatctggtattcctgtaatatattagtcagttgaatagtgtcagatctgtcgaccaccattatttttgtctttgctttattgattttcagaccaactctattgctttcgtactcaactcttcgcagaagattcaaagagtgtgcttatataaaatttactagaattattcaataaatattattacggtaatttgtaatagactgaaatataaaaaattacgattgatttattacaggaagtaaatagataattaa

SEQ ID NO: 1175 - DNA, 1033 bp, Diabrotica virgifera
  SmartBlast Evalue=2E-71; Info=Endonuclease-reverse transcriptase n=1 Tax=Bombyx mori RepID=D7F163_BOMMO
atggcaaacaaaaattaattacacctgttacttatttaaaaaaaatatttacggctattttaaaatgattggttttatggtattcatcaatatttatgagggaagtacctatacagggtgattgactagtggggcaaaactcaatagatccgctttagtaatctctctctctgtcgtttccccattactgaggatcgtgatttcttccaatattcctaacaatgtttctccattggtctctatcttcagctgctctaagagcttcgcagaatgagtttccagctgaatgctttatttggtcagaccatctagttggtgatcgtcctcttgatcttctccccggaacgtttccagaaacaattaatctctccaaactgtcgtcacctctgcgaaccacgtgaccaaagaattgcagaattcgttgcagacatattgtggacagcctttttttaatattgagttggtttagaatggaaacgtttgtcctatgagctgtccaaggtatgcgcagcattcttctccagcaccacatctcaaaggcatcaattttttggcgctcgcatgcgcgaagagtccaagtctctgctccgtatagaaatattgagaatacaagggcattcaccagtctcatcttgatattttgagagatagatctgtctttccaaactttagttaggcgactcatcgcattttttgccataccaatacgtctccgaacttctgcttcacagttaccatcgttagttatactagacccgagatagacaaaggtgtttactatctggtattcctgtaatatattagtcagttgaatagtgtcagatctgtcgaccaccattatttttgtctttgctttattgattttcagaccaactctattgctttcgtactcaactcttcgcagaagattcaaagagtgtgcttatataaaatttactagaattattcaataaatattattacggtaatttgtaatagactgaaatataaaaaattacgattgatttattacaggaagtaaatagataattaa

SEQ ID NO: 1176 - DNA, 965 bp, Diabrotica virgifera
  SmartBlast Evalue=2E-71; Info=Endonuclease-reverse transcriptase n=1 Tax=Bombyx mori RepID=D7F163_BOMMO
aagcgatagatatgagatatgctatcaatttcgtgttataaacgatttaataacaactattactggactatattttgtcaaacagaatgaattctctctctcctgtcgtttccccattactgaggatcgtgatttcttccaatattcctaacaatgtttctccattggtctctatcttcagctgctctaagagcttcgcagaatgagtttccagctgaatgctttatttggtcagaccatctagttggtgatcgtcctcttgatcttctccccggaacgtttccagaaacaattaatctctccaaactgtcgtcacctctgcgaaccacgtgaccaaagaattgcagaattcgttgcagacatattgtggacagcctttttttaatattgagttggtttagaatggaaacgtttgtcctatgagctgtccaaggtatgcgcagcattcttctccagcaccacatctcaaaggcatcaattttttggcgctcgcatgcgcgaagagtccaagtctctgctccgtatagaaatattgagaatacaagggcattcaccagtctcatcttgatattttgagagatagatctgtctttccaaactttagttaggcgactcatcgcattttttgccataccaatacgtctccgaacttctgcttcacagttaccatcgttagttatactagacccgagatagacaaaggtgtttactatctggtattcctgtaatatattagtcagttgaatagtgtcagatctgtcgaccaccattatttttgtctttgctttattgattttcagaccaactctattgctttcgtactcaactcttcgcagaagattcaaagagtgtgcttatataaaatttactagaattattcaataaatattattacggtaatttgtaatagactgaaatataaaaaattacgattgatttattacaggaagtaaatagataattaa

SEQ ID NO: 1177 - DNA, 971 bp, Diabrotica virgifera
  SmartBlast Evalue=1E-76; Info=Endonuclease-reverse transcriptase n=1 Tax=Bombyx mori RepID=D7F163_BOMMO
ccgttaaacagtcatttaaacattgactataattattataataaacatggatgtattagatatcacatgaattaagccctgggtactatctgacactctctctctctcttgtcgtttccccattactgaggatcgtgatttcttccaatattcctaacaatgtttctccattggtctctatcttcagctgctctaagagcttcgcagaatgagtttccagctgaattctttatttggtcggaccatctagttggtgatcgtcctcttgatcttttccccggaacgtttccagaaacaaataatctctccaaactgtcgtcacctctgcgaaccacgtgaccaaataattgcagaattcgttgcagacatattgtggacagcctttttttaatattaagttggtttagaatggaaacgtttgtcctatgagctgtccaaggtatgcgcagcattcttctccagcaccacatctcaaaggcatcaattttttggcgctcgcatgcgcgaagagtccaagtctctgctccgtatagaaatattgagaatacaagggcattcaccagtctcatcttgatattttgagagatagatctgtctttccaaactttagttaggcgactcatcgcattttttgccataccaatacgtctccgaacttctgcttcacagttaccatcgttagttatactagacccgagatagacaaaggtgtttactatctggtattcctgtaatatattagtcagttgaatagtgtcagatctgtcgaccaccattatttttgtctttgctttattgattttcagaccaactctattgctttcgtactcaactcttcgcagaagattcaaagagtgtgcttatataaaatttactagaattattcaataaatattattacggtaatttgtaatagactgaaatataaaaaattacgattgatttattacaggaagtaaatagataattaa

SEQ ID NO: 1178 - DNA, 3024 bp, Diabrotica virgifera
  SmartBlast Evalue=0; Info=Endonuclease-reverse transcriptase n= 1 Tax=Bombyx mori RepID=D7F163_BOMMO
ctcctcaagaaaactcctacatttatctaatttaaaccgaacacctgtcaaaccataatggagttttgtgtatatttccactgcaatataaaaacagtcctcatatcggcaattttaattgcattgccttaggtcgaaagatgcacagcaaattgtagtagatatgcgaaaccgttcgtcctaggtaatatgaaattgattctaagtaagtctgtttttatttctcttacattcaaaatttgaattattttcttttgtgtacaatattttcttttgaaactttgaaaaatgaatttctaaatcttgttcattgttttatatttttttaaagaagtcaaattattaacttttataaacgtcatcttccacaaatacagtaaattcttaagcggtgtatccatttcgcgaggcagccgcgcgcggcatgttcgttgtcgttgctattctgttatgggatgcaaagcgaatactgccgcagtcgaacgatgttcttgattctaaatagtctataatagacgagtcaaattttgtcggtcttttgaaccgcggcaaaggatgtttcttgttgttattactgccgcgcgaagtgtgaatgattctggacaagtttggttcactgtcgactagaagattaaatacagtgagtgcatatttctttaaatgatcatctctctcttgacgtttcctaacaatgtttctccattggtctctatcttcagctgctctaagagcttcgcagaatgagtttccagctgaattctttatttggtcggaccatctagttggtgatcgtcctcttgatcttttccccggaacgtttccagaaacaaataatctctccaaactgtcgtcacctctgcgaaccacgtgaccaaataattgcagaattcgttgcagacatattgtggacagcctttttttaatattaagttggtttagaatggaaacgtttgtcctatgagctgtccaaggtatgcgcagcattcttctccagcaccacatctcaaaggcatcaattttttggcgctcgcatgcgcgaagagtccaagtctctgctccgtatagaaatattgagaatacaagggcattcaccagtctcatcttgatattttgagagatagatctgtctttccaaactttagttaggcgactcatcgcattttttgccataccaatacgtctccgaacttctgcttcacagttaccatcgttagttatactagacccgagatagacaaaggtgtttactatctggtattcctgtaacatgttcctgtagtcctgtagtcagttgaatagtgtcgaatctgtcgaccaccattatttttgtcttagctttattgattttcagaccaactttattgctttcgtactcaactcttcgcagaagatcaaacatttcttgctcatttgctgctataagtgtagtgtcatcagcaaatcttaaattggagattttcctaccagctactgttactccaccggcccatccttctaaaaccatcctcatgacatgttcaccataaatgttaaataagtcaggtgacaacacgcatccttgtctaacacctctctcggtcttgaattggtttgagaacttctgatctagtcgtactgtcgctatattagactggtacagatttttaataagtgtcaccaggtgcattggtgcgcccatttctattaaaattgaccacagatttatccagcttacacaatcaaatgccttttggtagtcaacgaagcatataatcataggtacttgaaattctctagacttttcaatgagttgtctcaggttcaggatttgttcccttgtacctttaccctttacaaaccccgcttgttcctgaggtatttggtaatgtagataggtttttaatctgtttttgatgatatgcaacaagattttactagcatgtgttattagtgacagtgtgcggtagttttcacatctggtagtagttccttttttgtgtagtgggatataaattgaggtacaccaatcagatggccattttcctgaattccaaacagcgacacagatagaatggatgatatgtaatcctttgtcacctagtaactgtagtatttcacatggtattgaatcaatgcctggggatttatttctctttagtgatttaattgcatctttgacttcagcgagtaagacagtaggttctctagggtagtcagaaggccactgattttctgctgatacctcgttatttttatatagctcgccacagtagtttcgccatgtttccaatatttcgtcagtatcggtctttagattaccttccttatctattacagaccacgtttgaggtttaaattctctggtaaggagtttgatctggaataaatccctcggttcatttcgacagccatgttcctctatctctctgcatatttgagagatgtaatcagctttgtctttgcggcactgttttctgatttctttcgataacgctctgtattcatcgtttgttccgtatctagttttatgttcttttctgcgttgaatcacagtccacgtattatcggatatccatggcttacggccagtggaaaccgctgcctcacagtcttttgcagcctcgattaccttatcttatagatagatccaagtgctctcagggtcactatctaacccataggcactagtcgctaattgccaaatagcaaatattcattatcctggaggttataatagtgcatttacacagtgtctcctttcagaatctaagtatcatgcaactgcgcatgcccaaatggtttgcacgtgttctccacaccgaatgaaggatcttcttacttctttaagtattgacagaaccagttagacttgttttaatttgcatgacctttgttcgaataaatccatataaaactatttaaaaatatttttaatttaccagtagaagttaactccacctttgacaattacacaatttgacacctctcattatagggcatttttcttgtttgtcttattgtatagatatttattttatctacaac

SEQ ID NO: 1179 - DNA, 3380 bp, Diabrotica virgifera
  SmartBlast Evalue=5E-65; Info=Ephrin n=1 Tax=Manduca sexta RepID=Q6VU49_MANSE
ctcctcaagaaaactcctacatttatctaatttaaaccgaacacctgtcaaaccataatggagttttgtgtatatttccactgcaatataaaaacagtcctcatatcggcaattttaattgcattgccttaggtcgaaagatgcacagcaaattgtagtagatatgcgaaaccgttcgtcctaggtaatatgaaattgattctaagtaagtctgtttttatttctcttacattcaaaatttgaattattttcttttgtgtacaatattttcttttgaaactttgaaaaatgaatttctaaatcttgttcattgttttatatttttttaaagaagtcaaattattaacttttataaacgtcatcttccacaaatacagtaaattcttaagcggtgtatccatttcgcgaggcagccgcgcgcggcatgttcgttgtcgttgctattctgttatgggatgcaaagcgaatactgccgcagtcgaacgatgttcttgattctaaatagtctataatagacgagtcaaattttgtcggtcttttgaaccgcggcaaaggatgtttcttgttgttattactgccgcgcgaagtgtgaatgattctggacaagtttggttcactgtcgactagaagattaaatacagtgagtgcatatttctttaaatgatcatctctctcttgacgtttcctaacaatgtttctccattggtctctatcttcagctgctctaagagcttcgcagaatgagtttccagctgaattctttatttggtcggaccatctagttggtgatcgtcctcttgatcttctcccaggaacgtttccagaaacaattaatctctccaaactgtcgtcacctctgcgaaccacgtgaccaaagaattgcagtattcgttgcagacatattgtggacagccttttttaatcttgagttggtttagaatggaaacgtttgtcctatgagctgtccaaggtatgcgcagtattcttctccagcaccacatcacaaaggcatcaattttttggcctccaaaaagcagagtccaagtctctgctccgtatagaaatattgagaatacaagggcattcaccagtctcatctttattttgagagatagatctgtcttttcaaactttagttaggcgactcatcgcattttttgccataccaatccgaacttctgcttcacagttaccatcgttagttatactagaccagagatagacaaaggtgtttactatctggtattcctgtaatatgttagtcagttgaatagtgtcgaatctgtcaaccagcattcaccataaatgatcatggataatgaaaattgtcgtaaattaattaaactttgtgaaagtaaagagttgctattcttacgtttttgttttataaaagttcgttaattagaataaaagcaacagcatcacgtgatacatctatgattaactaaattaactacggcgctacttatacggttgtacgagatggctcgaagtgctgtgcgcggcacaaaataaaatcattgagggtgcgccgcgcgaggcaaatgcaaagcttgcctcgcgagccatgaagcacgcggcagtctcgcaaaataaatacgctgctttacatcattattgataacgactgtgatttatcaccagaacttggcaaagtctctcaaaagaaatcagagaacacaaaacaataactcaataaaagaaaatggaaataaagtaaataatattatcatttccaattttatatgaatttattaaacctttttgtattcgtatactccttcaaatcatgctttttattgtcaacattgttgtttaatgctatttttgtgatgttatgttactgaattcaaaaaataaatgttttagattataattaaaaggtacaaacgaatttcgatcattcttaggcctaccaagagtatttacatttattaaatatttcgattttgcttagaaatcaattctttagagctgcaataagtacccagactatcaacggatctcaaaaatttgtttctatataaattaggataaatttaggtcatatcaagacagtcataaccgtacaaagccacggttgggaataagaacacatcaagtctgataaatagtatactcagaaatagtaccccctgtccaacatacgcgggtcattctgacgtttcatatacatacgggaggaagggttgacaaacaatttgttataaggggtacactcagatatggtttccgagtccttagtacggggggcggtcaaaaatttcatcgtagcgctaacgctgccaaacacgcgagcactattaatttggcggcggtcggagcgccgcctccgagtgtcaattcttcacttttcactacctcgttgggatgcttgttgtaagccttggacttcttggtggtggtggatgacggcgccgtagtagaagtcgtccaagttgtagaggacgtcgtggttcgaggcgacggtaccgaccaccacgacggctttgccgtcaccggcggcggcggtaccgtagcgggagtgggaggtgggccccagactttgaacacgatcttcatgttgtgagttgtacatcgaccacctatcctcctatgagggtcgtcgcttgtagaggttgagatgaagtagtaatcgtgacctggtaagaattcgagtcctccaggttgtggcgtgaacggtcgaaacgttatcgtaaagtacattagtttgtatggtttatcacaaaccgctattatcctagggttgggatttgttatcctacacgtctcgtattcgtctttcgaaacgttgtatattatatatttttctatttcttcgtcccgcgtaccaggcgaatatacgggacagatcaggtcgacctgatcatattcaaatttaacgttatttctattaacatcgatgatattgtcggtattgtcgatgcgaaaaatggggttcgacgaattccaataaatcgtataaaacttggcattgctggcacccggcatcgttgccaatgcaaaccaatgacaagtgaaggcaagaaagatgacggcgtgcaatagcagccggccgggttgacagtgttgccacgccgtggtcgtcatactgcctcctcagccgaggatggtgagggtgtcacaaatgacgtagacgccgccaccgaaggtggtcgtctaactgatgaggtcgccgtcgttagtgttgccaccgcgtcaccctgttgatgagtctccttagcgacatggacactgtttacatgactaaatgaactgtaggttatctttatttgtccacatattattaaacaacaaaacaccaataacaacaaacaacttaatacgtcgcgtccactttacgtcgagtacatatccgcactaaaatcttttgtaacctc

SEQ ID NO: 1180 - DNA, 3011 bp, Diabrotica virgifera
  SmartBlast Evalue=0; Info=Endonuclease-reverse transcriptase n= 1 Tax=Bombyx mori RepID=D7F163_BOMMO
ctcctcaagaaaactcctacatttatctaatttaaaccgaacacctgtcaaaccataatggagttttgtgtatatttccactgcaatataaaaacagtcctcatatcggcaattttaattgcattgccttaggtcgaaagatgcacagcaaattgtagtagatatgcgaaaccgttcgtcctaggtaatatgaaattgattctaagtaagtctgtttttatttctcttacattcaaaatttgaattattttcttttgtgtacaatattttcttttgaaactttgaaaaatgaatttctaaatcttgttcattgttttatatttttttaaagaagtcaaattattaacttttataaacgtcatcttccacaaatacagtaaattcttaagcggtgtatccatttcgcgaggcagccgcgcgcggcatgttcgttgtcgttgctattctgttatgggatgcaaagcgaatactgccgcagtcgaacgatgttcttgattctaaatagtctataatagacgagtcaaattttgtcggtcttttgaaccgcggcaaaggatgtttcttgttgttattactgccgcgcgaagtgtgaatgattctggacaagtttggttcactgtcgactagaagattaaatacagtgagtgcatatttctttaaatgatcatctctctcttgacgtttcctaacaatgtttctccattggtctctatcttcagctgctctaagagcttcgcagaatgagtttccagctgaattctttatttggtcggaccatctagttggtgatcgtcctcttgatcttttccccggaacgtttccagaaacaaataatctctccaaactgtcgtcacctctgcgaaccacgtgaccaaataattgcagaattcgttgcagacatattgtggacagcctttttttaatattaagttggtttagaatggaaacgtttgtcctatgagctgtccaaggtatgcgcagcattcttctccagcaccacatctcaaaggcatcaattttttggcgctcgcatgcgcgaagagtccaagtctctgctccgtatagaaatattgagaatacaagggcattcaccagtctcatcttgatattttgagagatagatctgtctttccaaactttagttaggcgactcatcgcattttttgccataccaatacgtctccgaacttctgcttcacagttaccatcgttagttatactagacccgagatagacaaaggtgtttactatctggtattcctgtaatatgttagtcagttgaatagtgtcaaatctgtcgaccaccattatttttgtcttagctttattgattttcagaccaactttattgctttcgtactcaactcttcgcagaagatcaaacatttcttgctcatttgctgctataagtgtagtgtcatcagcaaatcttaaattggagattttcctaccagctactgttactccaccggcccatccttctaaaaccatcctcatgacatgttcaccataaatgttaaataagtcaggtgacaacacgcatccttgtctaacacctctctcggtcttgaattggtttgagaacttctgatctagtcgtactgtcgctatattagactggtacagatttttaataagtgtcaccaggtgcattggtgcgcccatttctattaaaattgaccacagatttatccagcttacacaatcaaatgccttttggtagtcaacgaagcatataatcataggtacttgaaattctctagacttttcaatgagttgtctcaggttcaggatttgttcccttgtacctttaccctttacaaaccccgcttgttcctgaggtatttggtaatgtagataggtttttaatctgtttttgatgatatgcaacaagattttactagcatgtgttattagtgacagtgtgcggtagttttcacatctggtagtagttccttttttgtgtagtgggatataaattgaggtacaccaatcagatggccattttcctgaattccaaacagcgacacagatagaatggatgatatgtaatcctttgtcacctagtaactgtagtatttcacatggtattgaatcaatgcctggggatttatttctctttagtgatttaattgcatctttgacttcagcgagtaagacagtaggttctctagggtagtcagaaggccactgattttctgctgatacctcgttatttttatatagctcgccacagtagtttcgccatgtttccaatatttcgtcagtatcggtctttagattaccttccttatctattacagaccacgtttgaggtttaaattctctggtaaggagtttgatctggaataaatccctcggttcatttcgacagccatgttcctctatctctctgcatatttgagagatgtaatcagctttgtctttgcggcactgttttctgatttctttcgataacgctctgtattcatcgtttgttccgtatctagttttatgttcttttctgcgttgaatcacagtccacgtattatcggatatccatggcttacggccagtggaaaccgctgcctcacagtcttttgcagcctcgattaccttatcttatagatagatccaagtgctctcagggtcactatctaacccataggcactagtcgctaattgccaaatagcaaatattcattatcctggaggttataatagtgcatttacacagtgtctcctttcagaatctaagtatcatgcaactgcgcatgcccaaatggtttgcacgtgttctccacaccgaatgaaggatcttcttacttctttaagtattgacagaaccagttagacttgttttaatttgcatgacctttgttcgaataaatccatataaaactatttaaaaatatttttaatttaccagtagaagttaactccacctttgacaattacacaatttgacacctctcattatagggcatttttcttgtttgtcttattgtatagatatttattttatctacaac

SEQ ID NO: 1181 - DNA, 2554 bp, Diabrotica virgifera
  SmartBlast Evalue=0; Info=Endonuclease-reverse transcriptase n= 1 Tax=Bombyx mori RepID=D7F163_BOMMO
atggcaaacaaaaattaattacacctgttacttatttaaaaaaaatatttacggctattttaaaatgattggttttatggtattcatcaatatttatgagggaagtacctatacagggtgattgactagtggggcaaaactcaatagatccgctttagtaatctctctctctgtcgtttccccattactgaggatcgtgatttcttccaatattcctaacaatgtttctccattggtctctatcttcagctgctctaagagcttcgcagaatgagtttccagctgaatgctttatttggtcagaccatctagttggtgatcgtcctcttgatcttctccccggaacgtttccagaaacaattaatctctccaaactgtcgtcacctctgcgaaccacgtgaccaaagaattgcagaattcgttgcagacatattgtggacagcctttttttaatattgagttggtttagaatggaaacgtttgtcctatgagctgtccaaggtatgcgcagcattcttctccagcaccacatctcaaaggcatcaattttttggcgctcgcatgcgcgaagagtccaagtctctgctccgtatagaaatattgagaatacaagggcattcaccagtctcatcttgatattttgagagatagatctgtctttccaaactttagttaggcgactcatcgcattttttgccataccaatacgtctccgaacttctgcttcacagttaccatcgttagttatactagacccgagatagacaaaggtgtttactatctggtattcctgtaacatgttcctgtagtcctgtagtcagttgaatagtgtcgaatctgtcgaccaccattatttttgtcttagctttattgattttcagaccaactttattgctttcgtactcaactcttcgcagaagatcaaacatttcttgctcatttgctgctataagtgtagtgtcatcagcaaatcttaaattggagattttcctaccagctactgttactccaccggcccatccttctaaaaccatcctcatgacatgttcaccataaatgttaaataagtcaggtgacaacacgcatccttgtctaacacctctctcggtcttgaattggtttgagaacttctgatctagtcgtactgtcgctatattagactggtacagatttttaataagtgtcaccaggtgcattggtgcgcccatttctattaaaattgaccacagatttatccagcttacacaatcaaatgccttttggtagtcaacgaagcatataatcataggtacttgaaattctctagacttttcaatgagttgtctcaggttcaggatttgttcccttgtacctttaccctttacaaaccccgcttgttcctgaggtatttggtaatgtagataggtttttaatctgtttttgatgatatgcaacaagattttactagcatgtgttattagtgacagtgtgcggtagttttcacatctggtagtagttccttttttgtgtagtgggatataaattgaggtacaccaatcagatggccattttcctgaattccaaacagcgacacagatagaatggatgatatgtaatcctttgtcacctagtaactgtagtatttcacatggtattgaatcaatgcctggggatttatttctctttagtgatttaattgcatctttgacttcagcgagtaagacagtaggttctctagggtagtcagaaggccactgattttctgctgatacctcgttatttttatatagctcgccacagtagtttcgccatgtttccaatatttcgtcagtatcggtctttagattaccttccttatctattacagaccacgtttgaggtttaaattctctggtaaggagtttgatctggaataaatccctcggttcatttcgacagccatgttcctctatctctctgcatatttgagagatgtaatcagctttgtctttgcggcactgttttctgatttctttcgataacgctctgtattcatcgtttgttccgtatctagttttatgttcttttctgcgttgaatcacagtccacgtattatcggatatccatggcttacggccagtggaaaccgctgcctcacagtcttttgcagcctcgattaccttatcttatagatagatccaagtgctctcagggtcactatctaacccataggcactagtcgctaattgccaaatagcaaatattcattatcctggaggttataatagtgcatttacacagtgtctcctttcagaatctaagtatcatgcaactgcgcatgcccaaatggtttgcacgtgttctccacaccgaatgaaggatcttcttacttctttaagtattgacagaaccagttagacttgttttaatttgcatgacctttgttcgaataaatccatataaaactatttaaaaatatttttaatttaccagtagaagttaactccacctttgacaattacacaatttgacacctctcattatagggcatttttcttgtttgtcttattgtatagatatttattttatctacaac

SEQ ID NO: 1182 - DNA, 2541 bp, Diabrotica virgifera
  SmartBlast Evalue=0; Info=Endonuclease-reverse transcriptase n= 1 Tax=Bombyx mori RepID=D7F163_BOMMO
atggcaaacaaaaattaattacacctgttacttatttaaaaaaaatatttacggctattttaaaatgattggttttatggtattcatcaatatttatgagggaagtacctatacagggtgattgactagtggggcaaaactcaatagatccgctttagtaatctctctctctgtcgtttccccattactgaggatcgtgatttcttccaatattcctaacaatgtttctccattggtctctatcttcagctgctctaagagcttcgcagaatgagtttccagctgaatgctttatttggtcagaccatctagttggtgatcgtcctcttgatcttctccccggaacgtttccagaaacaattaatctctccaaactgtcgtcacctctgcgaaccacgtgaccaaagaattgcagaattcgttgcagacatattgtggacagcctttttttaatattgagttggtttagaatggaaacgtttgtcctatgagctgtccaaggtatgcgcagcattcttctccagcaccacatctcaaaggcatcaattttttggcgctcgcatgcgcgaagagtccaagtctctgctccgtatagaaatattgagaatacaagggcattcaccagtctcatcttgatattttgagagatagatctgtctttccaaactttagttaggcgactcatcgcattttttgccataccaatacgtctccgaacttctgcttcacagttaccatcgttagttatactagacccgagatagacaaaggtgtttactatctggtattcctgtaatatgttagtcagttgaatagtgtcaaatctgtcgaccaccattatttttgtcttagctttattgattttcagaccaactttattgctttcgtactcaactcttcgcagaagatcaaacatttcttgctcatttgctgctataagtgtagtgtcatcagcaaatcttaaattggagattttcctaccagctactgttactccaccggcccatccttctaaaaccatcctcatgacatgttcaccataaatgttaaataagtcaggtgacaacacgcatccttgtctaacacctctctcggtcttgaattggtttgagaacttctgatctagtcgtactgtcgctatattagactggtacagatttttaataagtgtcaccaggtgcattggtgcgcccatttctattaaaattgaccacagatttatccagcttacacaatcaaatgccttttggtagtcaacgaagcatataatcataggtacttgaaattctctagacttttcaatgagttgtctcaggttcaggatttgttcccttgtacctttaccctttacaaaccccgcttgttcctgaggtatttggtaatgtagataggtttttaatctgtttttgatgatatgcaacaagattttactagcatgtgttattagtgacagtgtgcggtagttttcacatctggtagtagttccttttttgtgtagtgggatataaattgaggtacaccaatcagatggccattttcctgaattccaaacagcgacacagatagaatggatgatatgtaatcctttgtcacctagtaactgtagtatttcacatggtattgaatcaatgcctggggatttatttctctttagtgatttaattgcatctttgacttcagcgagtaagacagtaggttctctagggtagtcagaaggccactgattttctgctgatacctcgttatttttatatagctcgccacagtagtttcgccatgtttccaatatttcgtcagtatcggtctttagattaccttccttatctattacagaccacgtttgaggtttaaattctctggtaaggagtttgatctggaataaatccctcggttcatttcgacagccatgttcctctatctctctgcatatttgagagatgtaatcagctttgtctttgcggcactgttttctgatttctttcgataacgctctgtattcatcgtttgttccgtatctagttttatgttcttttctgcgttgaatcacagtccacgtattatcggatatccatggcttacggccagtggaaaccgctgcctcacagtcttttgcagcctcgattaccttatcttatagatagatccaagtgctctcagggtcactatctaacccataggcactagtcgctaattgccaaatagcaaatattcattatcctggaggttataatagtgcatttacacagtgtctcctttcagaatctaagtatcatgcaactgcgcatgcccaaatggtttgcacgtgttctccacaccgaatgaaggatcttcttacttctttaagtattgacagaaccagttagacttgttttaatttgcatgacctttgttcgaataaatccatataaaactatttaaaaatatttttaatttaccagtagaagttaactccacctttgacaattacacaatttgacacctctcattatagggcatttttcttgtttgtcttattgtatagatatttattttatctacaac

SEQ ID NO: 1183 - DNA, 2486 bp, Diabrotica virgifera
  SmartBlast Evalue=0; Info=Endonuclease-reverse transcriptase n= 1 Tax=Bombyx mori RepID=D7F163_BOMMO
aagcgatagatatgagatatgctatcaatttcgtgttataaacgatttaataacaactattactggactatattttgtcaaacagaatgaattctctctctcctgtcgtttccccattactgaggatcgtgatttcttccaatattcctaacaatgtttctccattggtctctatcttcagctgctctaagagcttcgcagaatgagtttccagctgaatgctttatttggtcagaccatctagttggtgatcgtcctcttgatcttctccccggaacgtttccagaaacaattaatctctccaaactgtcgtcacctctgcgaaccacgtgaccaaagaattgcagaattcgttgcagacatattgtggacagcctttttttaatattgagttggtttagaatggaaacgtttgtcctatgagctgtccaaggtatgcgcagcattcttctccagcaccacatctcaaaggcatcaattttttggcgctcgcatgcgcgaagagtccaagtctctgctccgtatagaaatattgagaatacaagggcattcaccagtctcatcttgatattttgagagatagatctgtctttccaaactttagttaggcgactcatcgcattttttgccataccaatacgtctccgaacttctgcttcacagttaccatcgttagttatactagacccgagatagacaaaggtgtttactatctggtattcctgtaacatgttcctgtagtcctgtagtcagttgaatagtgtcgaatctgtcgaccaccattatttttgtcttagctttattgattttcagaccaactttattgctttcgtactcaactcttcgcagaagatcaaacatttcttgctcatttgctgctataagtgtagtgtcatcagcaaatcttaaattggagattttcctaccagctactgttactccaccggcccatccttctaaaaccatcctcatgacatgttcaccataaatgttaaataagtcaggtgacaacacgcatccttgtctaacacctctctcggtcttgaattggtttgagaacttctgatctagtcgtactgtcgctatattagactggtacagatttttaataagtgtcaccaggtgcattggtgcgcccatttctattaaaattgaccacagatttatccagcttacacaatcaaatgccttttggtagtcaacgaagcatataatcataggtacttgaaattctctagacttttcaatgagttgtctcaggttcaggatttgttcccttgtacctttaccctttacaaaccccgcttgttcctgaggtatttggtaatgtagataggtttttaatctgtttttgatgatatgcaacaagattttactagcatgtgttattagtgacagtgtgcggtagttttcacatctggtagtagttccttttttgtgtagtgggatataaattgaggtacaccaatcagatggccattttcctgaattccaaacagcgacacagatagaatggatgatatgtaatcctttgtcacctagtaactgtagtatttcacatggtattgaatcaatgcctggggatttatttctctttagtgatttaattgcatctttgacttcagcgagtaagacagtaggttctctagggtagtcagaaggccactgattttctgctgatacctcgttatttttatatagctcgccacagtagtttcgccatgtttccaatatttcgtcagtatcggtctttagattaccttccttatctattacagaccacgtttgaggtttaaattctctggtaaggagtttgatctggaataaatccctcggttcatttcgacagccatgttcctctatctctctgcatatttgagagatgtaatcagctttgtctttgcggcactgttttctgatttctttcgataacgctctgtattcatcgtttgttccgtatctagttttatgttcttttctgcgttgaatcacagtccacgtattatcggatatccatggcttacggccagtggaaaccgctgcctcacagtcttttgcagcctcgattaccttatcttatagatagatccaagtgctctcagggtcactatctaacccataggcactagtcgctaattgccaaatagcaaatattcattatcctggaggttataatagtgcatttacacagtgtctcctttcagaatctaagtatcatgcaactgcgcatgcccaaatggtttgcacgtgttctccacaccgaatgaaggatcttcttacttctttaagtattgacagaaccagttagacttgttttaatttgcatgacctttgttcgaataaatccatataaaactatttaaaaatatttttaatttaccagtagaagttaactccacctttgacaattacacaatttgacacctctcattatagggcatttttcttgtttgtcttattgtatagatatttattttatctacaac

SEQ ID NO: 1184 - DNA, 2473 bp, Diabrotica virgifera
  SmartBlast Evalue=0; Info=Endonuclease-reverse transcriptase n= 1 Tax=Bombyx mori RepID=D7F163_BOMMO
aagcgatagatatgagatatgctatcaatttcgtgttataaacgatttaataacaactattactggactatattttgtcaaacagaatgaattctctctctcctgtcgtttccccattactgaggatcgtgatttcttccaatattcctaacaatgtttctccattggtctctatcttcagctgctctaagagcttcgcagaatgagtttccagctgaatgctttatttggtcagaccatctagttggtgatcgtcctcttgatcttctccccggaacgtttccagaaacaattaatctctccaaactgtcgtcacctctgcgaaccacgtgaccaaagaattgcagaattcgttgcagacatattgtggacagcctttttttaatattgagttggtttagaatggaaacgtttgtcctatgagctgtccaaggtatgcgcagcattcttctccagcaccacatctcaaaggcatcaattttttggcgctcgcatgcgcgaagagtccaagtctctgctccgtatagaaatattgagaatacaagggcattcaccagtctcatcttgatattttgagagatagatctgtctttccaaactttagttaggcgactcatcgcattttttgccataccaatacgtctccgaacttctgcttcacagttaccatcgttagttatactagacccgagatagacaaaggtgtttactatctggtattcctgtaatatgttagtcagttgaatagtgtcaaatctgtcgaccaccattatttttgtcttagctttattgattttcagaccaactttattgctttcgtactcaactcttcgcagaagatcaaacatttcttgctcatttgctgctataagtgtagtgtcatcagcaaatcttaaattggagattttcctaccagctactgttactccaccggcccatccttctaaaaccatcctcatgacatgttcaccataaatgttaaataagtcaggtgacaacacgcatccttgtctaacacctctctcggtcttgaattggtttgagaacttctgatctagtcgtactgtcgctatattagactggtacagatttttaataagtgtcaccaggtgcattggtgcgcccatttctattaaaattgaccacagatttatccagcttacacaatcaaatgccttttggtagtcaacgaagcatataatcataggtacttgaaattctctagacttttcaatgagttgtctcaggttcaggatttgttcccttgtacctttaccctttacaaaccccgcttgttcctgaggtatttggtaatgtagataggtttttaatctgtttttgatgatatgcaacaagattttactagcatgtgttattagtgacagtgtgcggtagttttcacatctggtagtagttccttttttgtgtagtgggatataaattgaggtacaccaatcagatggccattttcctgaattccaaacagcgacacagatagaatggatgatatgtaatcctttgtcacctagtaactgtagtatttcacatggtattgaatcaatgcctggggatttatttctctttagtgatttaattgcatctttgacttcagcgagtaagacagtaggttctctagggtagtcagaaggccactgattttctgctgatacctcgttatttttatatagctcgccacagtagtttcgccatgtttccaatatttcgtcagtatcggtctttagattaccttccttatctattacagaccacgtttgaggtttaaattctctggtaaggagtttgatctggaataaatccctcggttcatttcgacagccatgttcctctatctctctgcatatttgagagatgtaatcagctttgtctttgcggcactgttttctgatttctttcgataacgctctgtattcatcgtttgttccgtatctagttttatgttcttttctgcgttgaatcacagtccacgtattatcggatatccatggcttacggccagtggaaaccgctgcctcacagtcttttgcagcctcgattaccttatcttatagatagatccaagtgctctcagggtcactatctaacccataggcactagtcgctaattgccaaatagcaaatattcattatcctggaggttataatagtgcatttacacagtgtctcctttcagaatctaagtatcatgcaactgcgcatgcccaaatggtttgcacgtgttctccacaccgaatgaaggatcttcttacttctttaagtattgacagaaccagttagacttgttttaatttgcatgacctttgttcgaataaatccatataaaactatttaaaaatatttttaatttaccagtagaagttaactccacctttgacaattacacaatttgacacctctcattatagggcatttttcttgtttgtcttattgtatagatatttattttatctacaac

SEQ ID NO: 1185 - DNA, 2492 bp, Diabrotica virgifera
  SmartBlast Evalue=0; Info=Endonuclease-reverse transcriptase n= 1 Tax=Bombyx mori RepID=D7F163_BOMMO
ccgttaaacagtcatttaaacattgactataattattataataaacatggatgtattagatatcacatgaattaagccctgggtactatctgacactctctctctctcttgtcgtttccccattactgaggatcgtgatttcttccaatattcctaacaatgtttctccattggtctctatcttcagctgctctaagagcttcgcagaatgagtttccagctgaattctttatttggtcggaccatctagttggtgatcgtcctcttgatcttttccccggaacgtttccagaaacaaataatctctccaaactgtcgtcacctctgcgaaccacgtgaccaaataattgcagaattcgttgcagacatattgtggacagcctttttttaatattaagttggtttagaatggaaacgtttgtcctatgagctgtccaaggtatgcgcagcattcttctccagcaccacatctcaaaggcatcaattttttggcgctcgcatgcgcgaagagtccaagtctctgctccgtatagaaatattgagaatacaagggcattcaccagtctcatcttgatattttgagagatagatctgtctttccaaactttagttaggcgactcatcgcattttttgccataccaatacgtctccgaacttctgcttcacagttaccatcgttagttatactagacccgagatagacaaaggtgtttactatctggtattcctgtaacatgttcctgtagtcctgtagtcagttgaatagtgtcgaatctgtcgaccaccattatttttgtcttagctttattgattttcagaccaactttattgctttcgtactcaactcttcgcagaagatcaaacatttcttgctcatttgctgctataagtgtagtgtcatcagcaaatcttaaattggagattttcctaccagctactgttactccaccggcccatccttctaaaaccatcctcatgacatgttcaccataaatgttaaataagtcaggtgacaacacgcatccttgtctaacacctctctcggtcttgaattggtttgagaacttctgatctagtcgtactgtcgctatattagactggtacagatttttaataagtgtcaccaggtgcattggtgcgcccatttctattaaaattgaccacagatttatccagcttacacaatcaaatgccttttggtagtcaacgaagcatataatcataggtacttgaaattctctagacttttcaatgagttgtctcaggttcaggatttgttcccttgtacctttaccctttacaaaccccgcttgttcctgaggtatttggtaatgtagataggtttttaatctgtttttgatgatatgcaacaagattttactagcatgtgttattagtgacagtgtgcggtagttttcacatctggtagtagttccttttttgtgtagtgggatataaattgaggtacaccaatcagatggccattttcctgaattccaaacagcgacacagatagaatggatgatatgtaatcctttgtcacctagtaactgtagtatttcacatggtattgaatcaatgcctggggatttatttctctttagtgatttaattgcatctttgacttcagcgagtaagacagtaggttctctagggtagtcagaaggccactgattttctgctgatacctcgttatttttatatagctcgccacagtagtttcgccatgtttccaatatttcgtcagtatcggtctttagattaccttccttatctattacagaccacgtttgaggtttaaattctctggtaaggagtttgatctggaataaatccctcggttcatttcgacagccatgttcctctatctctctgcatatttgagagatgtaatcagctttgtctttgcggcactgttttctgatttctttcgataacgctctgtattcatcgtttgttccgtatctagttttatgttcttttctgcgttgaatcacagtccacgtattatcggatatccatggcttacggccagtggaaaccgctgcctcacagtcttttgcagcctcgattaccttatcttatagatagatccaagtgctctcagggtcactatctaacccataggcactagtcgctaattgccaaatagcaaatattcattatcctggaggttataatagtgcatttacacagtgtctcctttcagaatctaagtatcatgcaactgcgcatgcccaaatggtttgcacgtgttctccacaccgaatgaaggatcttcttacttctttaagtattgacagaaccagttagacttgttttaatttgcatgacctttgttcgaataaatccatataaaactatttaaaaatatttttaatttaccagtagaagttaactccacctttgacaattacacaatttgacacctctcattatagggcatttttcttgtttgtcttattgtatagatatttattttatctacaac

SEQ ID NO: 1186 - DNA, 2848 bp, Diabrotica virgifera
  SmartBlast Evalue=4E-65; Info=Ephrin n=1 Tax=Manduca sexta RepID=Q6VU49_MANSE
ccgttaaacagtcatttaaacattgactataattattataataaacatggatgtattagatatcacatgaattaagccctgggtactatctgacactctctctctctcttgtcgtttccccattactgaggatcgtgatttcttccaatattcctaacaatgtttctccattggtctctatcttcagctgctctaagagcttcgcagaatgagtttccagctgaattctttatttggtcggaccatctagttggtgatcgtcctcttgatcttctcccaggaacgtttccagaaacaattaatctctccaaactgtcgtcacctctgcgaaccacgtgaccaaagaattgcagtattcgttgcagacatattgtggacagccttttttaatcttgagttggtttagaatggaaacgtttgtcctatgagctgtccaaggtatgcgcagtattcttctccagcaccacatcacaaaggcatcaattttttggcctccaaaaagcagagtccaagtctctgctccgtatagaaatattgagaatacaagggcattcaccagtctcatctttattttgagagatagatctgtcttttcaaactttagttaggcgactcatcgcattttttgccataccaatccgaacttctgcttcacagttaccatcgttagttatactagaccagagatagacaaaggtgtttactatctggtattcctgtaatatgttagtcagttgaatagtgtcgaatctgtcaaccagcattcaccataaatgatcatggataatgaaaattgtcgtaaattaattaaactttgtgaaagtaaagagttgctattcttacgtttttgttttataaaagttcgttaattagaataaaagcaacagcatcacgtgatacatctatgattaactaaattaactacggcgctacttatacggttgtacgagatggctcgaagtgctgtgcgcggcacaaaataaaatcattgagggtgcgccgcgcgaggcaaatgcaaagcttgcctcgcgagccatgaagcacgcggcagtctcgcaaaataaatacgctgctttacatcattattgataacgactgtgatttatcaccagaacttggcaaagtctctcaaaagaaatcagagaacacaaaacaataactcaataaaagaaaatggaaataaagtaaataatattatcatttccaattttatatgaatttattaaacctttttgtattcgtatactccttcaaatcatgctttttattgtcaacattgttgtttaatgctatttttgtgatgttatgttactgaattcaaaaaataaatgttttagattataattaaaaggtacaaacgaatttcgatcattcttaggcctaccaagagtatttacatttattaaatatttcgattttgcttagaaatcaattctttagagctgcaataagtacccagactatcaacggatctcaaaaatttgtttctatataaattaggataaatttaggtcatatcaagacagtcataaccgtacaaagccacggttgggaataagaacacatcaagtctgataaatagtatactcagaaatagtaccccctgtccaacatacgcgggtcattctgacgtttcatatacatacgggaggaagggttgacaaacaatttgttataaggggtacactcagatatggtttccgagtccttagtacggggggcggtcaaaaatttcatcgtagcgctaacgctgccaaacacgcgagcactattaatttggcggcggtcggagcgccgcctccgagtgtcaattcttcacttttcactacctcgttgggatgcttgttgtaagccttggacttcttggtggtggtggatgacggcgccgtagtagaagtcgtccaagttgtagaggacgtcgtggttcgaggcgacggtaccgaccaccacgacggctttgccgtcaccggcggcggcggtaccgtagcgggagtgggaggtgggccccagactttgaacacgatcttcatgttgtgagttgtacatcgaccacctatcctcctatgagggtcgtcgcttgtagaggttgagatgaagtagtaatcgtgacctggtaagaattcgagtcctccaggttgtggcgtgaacggtcgaaacgttatcgtaaagtacattagtttgtatggtttatcacaaaccgctattatcctagggttgggatttgttatcctacacgtctcgtattcgtctttcgaaacgttgtatattatatatttttctatttcttcgtcccgcgtaccaggcgaatatacgggacagatcaggtcgacctgatcatattcaaatttaacgttatttctattaacatcgatgatattgtcggtattgtcgatgcgaaaaatggggttcgacgaattccaataaatcgtataaaacttggcattgctggcacccggcatcgttgccaatgcaaaccaatgacaagtgaaggcaagaaagatgacggcgtgcaatagcagccggccgggttgacagtgttgccacgccgtggtcgtcatactgcctcctcagccgaggatggtgagggtgtcacaaatgacgtagacgccgccaccgaaggtggtcgtctaactgatgaggtcgccgtcgttagtgttgccaccgcgtcaccctgttgatgagtctccttagcgacatggacactgtttacatgactaaatgaactgtaggttatctttatttgtccacatattattaaacaacaaaacaccaataacaacaaacaacttaatacgtcgcgtccactttacgtcgagtacatatccgcactaaaatcttttgtaacctc

SEQ ID NO: 1187 - DNA, 929 bp, Diabrotica virgifera
aaaaaagaatgtgtgtgtactttgtacgcacgtaagaagttatacttctattatataatttcaacgaaataaatatacttaacagtttatttgtattttatttaaatattaaactaactttcttacctaccactttcaaaaaatttttattaaaacaatagcaataaaaaaatgaatatgaatcgtccgggatttgaacccgggacctctcgatctctggtccaatgctctaccaaccaagctatcaagccccgtgtaagtgacgtctcggatataattacacatcacggtgacaaatagatcaagtgaagtataaaaatgttataatagatactttattatcttactcccgaggaagacaaatccaaagacacaaaaattataataaataatacatttactaaaaacactaatatattcttttaatgacgtatttgcgctgatatatacatacctatcttgaaagattagcaacgaactatactgtctgtgtgcgcatgcgccagggaattataaaattttactctcaatcgtaaagaagtataacttcaaaaaaagcaaagaaaatatctccgacaagaaatgacatggacatggctatgatgaaaagtcacattctaaagttttaacagtgctctgacgtcagaaattttgactgatgtaagcgtgcctttgtactaaaaagactgtatgtttttggctacaactttgattttaaatataatttattgccaattttcgcgtattctggttattttagtaattgtctaagtcgctatttaattagtatcagtgtaattgtgcttatgttacttattcttgattttaataataggtaggtactattaactccatgaacaatatattaatacaataatgtatagaaacttagttttatagtaagcttaagcttacattatacttataca

SEQ ID NO: 1188 - DNA, 590 bp, Diabrotica virgifera
tataaaatataaatttcacctaattttatcacgacttggaataatcgaggtatctgacatctgacaacttttttagttgttattgtagacatatacaaagaaacctaccggcttctgccaagagttcggagccgttttttaattattaacaatgcagtacaagaacgcttgcactgcaaatcttaaaagattataacttaattcttgttctctatttcttaagtttttacttatttacattgaatattaatttgttttgttgtataatccacgtttacaataattatgtgatctatttgatttaaaatggattcaggatttttttatactttggcaactatgtcaacttagatctctggcgtagataatgacgtgcaacggtaagtaaattagacggactgtaggttatatttggttcttgggacatcaaagtatattttttagacattccctggatatagtcacagatgtgacatacctccgatttgttttttcatgagttttgtaagagagactaaaaacttttttttatagtcacctcctgttttcatatattttttgacatgttttgtagtaaattcaactatcta

SEQ ID NO: 1189 - DNA, 543 bp, Diabrotica virgifera
tataaaatataaatttcacctaattttatcacgacttggaataatcgaggtatctgacatctgacaacttttttagttgttattgtagacatatacaaagaaacctaccggcttctgccaagagttcggagccgttttttaattattaacaatgcagtacaagaacgcttgcactgcaaatcttaaaagattataacttaattcttgttctctatttcttaagtttttacttatttacattgaatattaatttgttttgttgtataatccacgtttacaataattatgtgatctatttgatttaaaatggattcaggatttttttatactttggcaactatgtcaacttagatctctggcgtagataatgacgtgcaacggtaagtaaattagacggactgtaatttgaaagattagcaacaaactacatgctgtctgtctgcgcatgcgccagggaattataaaatttcactctcgatcgtaaagaagtataacttcaaaaataaaacttagcgcaatttgaaccatccctccccctttcac

SEQ ID NO: 1190 - DNA, 428 bp, Diabrotica virgifera
aaatagattggttacaatgaaacggatggtagagtggatactgtagataagatttgtgttgcttactctgccactaggataacaaagggatggccgttctacagtatgatacatattggcggcataattgttgaaattttatacaaattggcctgtccagcgaaggctcctaaatatcgaagagttttcctgaaaaatttgtcagatcaactgtttgacagatatgtactgcatgatataagtgccctcctcaaggtgacttattgtcgggaggttggatctactgaagaaaaaaaaaaccttataaagcgcggtgtttgctgagaatatgtaatggagaaaaaatatccttaggttcaatgaagtgttgccatcaggcaacatgaagtgttttccgtcatttacaggcaagatgctttctgtggttg

SEQ ID NO: 1191 - DNA, 1434 bp, Diabrotica virgifera
aaaaaagaatgtgtgtgtactttgtacgcacgtaagaagttatacttctattatataatttcaacgaaataaatatacttaacagtttatttgtattttatttaaatattaaactaactttcttacctaccactttcaaaaaatttttattaaaacaatagcaataaaaaaatgaatatgaaatcaagctatcaagccccgtgttatatatatacttatataattacacatcacggtgacaaatagatcaagtgaagtataaaaataaatattttattatcttacgcccgaggaagacaaatccaaagacacaaaaattataataaataatacatttactaaaaacactaatatattcttttaatgacttatttgcgctgatacatacatattatacttcgtctaatttactaaccgttgcactcatctgcgtcatagcctgtgacgtcgcatgataccaacacgaaatatttaggcggtaggtgtgttcttttttagaatcactttgccgagtacactggaattacagccactagacatattttattatatacgcgtagaaataatatttgaagatttctattaatgttaacctaaagaaatacacaataatatgtttcatttaatttgtataaatggattataaagcgtttttatgaagcacatttgttcggaacacactgtaactgtaatcgaacgaaggtgacattttagaataaattggtaacatttatttgacagttgcggtgatgacacttcatatttgtttatattctttactataagtatctgttttatttattatatttactgtttttattatttactttactataaaaagatcctctactataaaaatataaatttcacctaattttatcacgacttggaataatcgaggtatctgacaacttttttagttgttattgtagacatatacaaagaaacctaccggcttcatgccaagagttcggagccgttttttaattattaacaatgcagtgcaaaaacgcttcactgcaaatcttaaaagattataacttaattcttgttctctatttcttaagtttttacttatttacattgaatattaatttgttttgttgtataatccacgtttacaataattatgtgatctatttgatttaaaatggattcaggatttttttatactttggcaactatgtcaacttagatctctggcgtagataatgacgtgcaacggtaagtaaattagacggactgtaggttatatttggttcttgggacatcaaagtatattttttagacattccctggatatagtcacagatgtgacatacctccgatttgttttttcatgagttttgtaagagagactaaaaacttttttttatagtcacctcctgttttcatatattttttgacatgttttgtagtaaattcaactatcta

SEQ ID NO: 1192 - DNA, 1501 bp, Diabrotica virgifera
tcctcttaacaaaattcattaatgaacatttaacacaccaaaagattagttttgtgtataactcaacaatattaaaaataactaacaataaaagcacttaaaacttacaaaaagtaaaatgataagatttttacaccgtttcgtttcattacatttacatatatacaataacacaatattataaaaagcgtattatgcgttttcgaacagaataacataaatttctgtagaaaaataagtttttaaaggtctatatggatcccactctaaacggatttcgatatatatctatgaattatcatttcatatgatttttaagtatgtaaagtgtactaaaacatgccaaaaatttgttagacctttattataaagaagtaaacatcaaaattttgatatgtttttgcgttagataacaaatatatttataggtgtagtgctttccctataattattcaatatgaactataaaaatgaaaatctaacctaaaaatgcaggtctgtacttaagactaaataaaaatcgtaagctataacaaatattcaaagagtgactgtagagtcaaagtgaactcatcaagaagctattttttaagattcagaacattcgtttaactcatgtaaattacttgtatcttgtatacttcattttcaataataactgtggatgtcattattctctactgcccatatatgtatatccatatccatattttgtgcaaaccatggactagtttttgaagttatacttctttaggtgcgagggcgaaattttattattctgggcgcatgcgcacacatacagtatgtagtttgttgctaatctttcaagttatgtatgtatcagcgcaaataagtcattaaaagaatatattagtgtttttagtaaatgtattattaataataatttttgtgtctttggatttgtcttcctcggagtaagataataaagtatctattataacatttttatacttcacttgatctatttgtcaccgtgatgtgtaattatatccgagacgtcactacacaggggcttgatagcttggttggtagagcattggaccagagatcgagaggtcccgggttcaaatcccggacgattcatatatatttttttataatttttggtattgttttaataaaaaatttttgaaagtggtaggtaagtattaaagttagtttaatatttaaataaaatacaaataaactgtgaagtatatttatttcgttgaaattatatgaagtataacttcttacgtgcgtacaaagtacacacacattcgtttttttatcaatcactcatcatcattttttaaatatttaagcataatatgcttaaatattattatattataataatttcactgccaaaatattttcttatgtacccaacatcttacggtactacagtgactgtatgtagatgtgtctgcaaaacctgaacactgtctcatcataaacacaagttttgaaggcataacaacaatatgctgttttttaa

SEQ ID NO: 1193 - DNA, 1387 bp, Diabrotica virgifera
aaaaaagaatgtgtgtgtactttgtacgcacgtaagaagttatacttctattatataatttcaacgaaataaatatacttaacagtttatttgtattttatttaaatattaaactaactttcttacctaccactttcaaaaaatttttattaaaacaatagcaataaaaaaatgaatatgaaatcaagctatcaagccccgtgttatatatatacttatataattacacatcacggtgacaaatagatcaagtgaagtataaaaataaatattttattatcttacgcccgaggaagacaaatccaaagacacaaaaattataataaataatacatttactaaaaacactaatatattcttttaatgacttatttgcgctgatacatacatattatacttcgtctaatttactaaccgttgcactcatctgcgtcatagcctgtgacgtcgcatgataccaacacgaaatatttaggcggtaggtgtgttcttttttagaatcactttgccgagtacactggaattacagccactagacatattttattatatacgcgtagaaataatatttgaagatttctattaatgttaacctaaagaaatacacaataatatgtttcatttaatttgtataaatggattataaagcgtttttatgaagcacatttgttcggaacacactgtaactgtaatcgaacgaaggtgacattttagaataaattggtaacatttatttgacagttgcggtgatgacacttcatatttgtttatattctttactataagtatctgttttatttattatatttactgtttttattatttactttactataaaaagatcctctactataaaaatataaatttcacctaattttatcacgacttggaataatcgaggtatctgacaacttttttagttgttattgtagacatatacaaagaaacctaccggcttcatgccaagagttcggagccgttttttaattattaacaatgcagtgcaaaaacgcttcactgcaaatcttaaaagattataacttaattcttgttctctatttcttaagtttttacttatttacattgaatattaatttgttttgttgtataatccacgtttacaataattatgtgatctatttgatttaaaatggattcaggatttttttatactttggcaactatgtcaacttagatctctggcgtagataatgacgtgcaacggtaagtaaattagacggactgtaatttgaaagattagcaacaaactacatgctgtctgtctgcgcatgcgccagggaattataaaatttcactctcgatcgtaaagaagtataacttcaaaaataaaacttagcgcaatttgaaccatccctccccctttcac

SEQ ID NO: 1194 - DNA, 1363 bp, Diabrotica virgifera
aaaaaagaatgtgtgtgtactttgtacgcacgtaagaagttatacttctattatataatttcaacgaaataaatatacttaacagtttatttgtattttatttaaatattaaactaactttcttacctaccactttcaaaaaatttttattaaaacaatagcaataaaaaaatgaatatgaaatcaagctatcaagccccgtgttatatatatacttatataattacacatcacggtgacaaatagatcaagtgaagtataaaaataaatattttattatcttacgcccgaggaagacaaatccaaagacacaaaaattataataaataatacatttactaaaaacactaatatattcttttaatgacttatttgcgctgatacatacatattatacttcgtctaatttactaaccgttgcactcatctgcgtcatagcctgtgacgtcgcatgataccaacacgaaatatttaggcggtaggtgtgttcttttttagaatcactttgccgagtacactggaattacagccactagacatattttattatatacgcgtagaaataatatttgaagatttctattaatgttaacctaaagaaatacacaataatatgtttcatttaatttgtataaatggattataaagcgtttttatgaagcacatttgttcggacacactgtaactgtaatcgaacgaaggtgatattttggcataaattggtaacatttatttgacagttgcggtgatgacacttcatatttgtttatattctttactataaaaatataaatttcacctaattttatcacgacttggaataatcgaggtatctgacaacttttttagttgttattgtagacatatacaaagaaacctaccggcttcatgccaagagttcggagccgttttttaattattaacaatgcagtgcaaaaacgcttcactgcaaatcttaaaagattataacttaattcttgttctctatttcttaagtttttacttatttacattgaatattaatttgttttgttgtataatccacgtttacaataattatgtgatctatttgatttaaaatggattcaggatttttttatactttggcaactatgtcaacttagatctctggcgtagataatgacgtgcaacggtaagtaaattagacggactgtaggttatatttggttcttgggacatcaaagtatattttttagacattccctggatatagtcacagatgtgacatacctccgatttgttttttcatgagttttgtaagagagactaaaaacttttttttatagtcacctcctgttttcatatattttttgacatgttttgtagtaaattcaactatcta

SEQ ID NO: 1195 - DNA, 1316 bp, Diabrotica virgifera
aaaaaagaatgtgtgtgtactttgtacgcacgtaagaagttatacttctattatataatttcaacgaaataaatatacttaacagtttatttgtattttatttaaatattaaactaactttcttacctaccactttcaaaaaatttttattaaaacaatagcaataaaaaaatgaatatgaaatcaagctatcaagccccgtgttatatatatacttatataattacacatcacggtgacaaatagatcaagtgaagtataaaaataaatattttattatcttacgcccgaggaagacaaatccaaagacacaaaaattataataaataatacatttactaaaaacactaatatattcttttaatgacttatttgcgctgatacatacatattatacttcgtctaatttactaaccgttgcactcatctgcgtcatagcctgtgacgtcgcatgataccaacacgaaatatttaggcggtaggtgtgttcttttttagaatcactttgccgagtacactggaattacagccactagacatattttattatatacgcgtagaaataatatttgaagatttctattaatgttaacctaaagaaatacacaataatatgtttcatttaatttgtataaatggattataaagcgtttttatgaagcacatttgttcggacacactgtaactgtaatcgaacgaaggtgatattttggcataaattggtaacatttatttgacagttgcggtgatgacacttcatatttgtttatattctttactataaaaatataaatttcacctaattttatcacgacttggaataatcgaggtatctgacaacttttttagttgttattgtagacatatacaaagaaacctaccggcttcatgccaagagttcggagccgttttttaattattaacaatgcagtgcaaaaacgcttcactgcaaatcttaaaagattataacttaattcttgttctctatttcttaagtttttacttatttacattgaatattaatttgttttgttgtataatccacgtttacaataattatgtgatctatttgatttaaaatggattcaggatttttttatactttggcaactatgtcaacttagatctctggcgtagataatgacgtgcaacggtaagtaaattagacggactgtaatttgaaagattagcaacaaactacatgctgtctgtctgcgcatgcgccagggaattataaaatttcactctcgatcgtaaagaagtataacttcaaaaataaaacttagcgcaatttgaaccatccctccccctttcac

SEQ ID NO: 1196 - DNA, 1348 bp, Diabrotica virgifera
aaatagattggttacaatgaaacggatggtagagtggatactgtagataagatttgtgttgcttactctgccactaggataacaaagggatggccgttctacagtatgatacatattggcggcataattgttgaaattttatacaaattggcctgtccagcgaaggctcctaaatatcgaagagttttcctgaaaaatttgtcagatcaactgtttgacagatatgtactgcatgatataagtgccctcctcaaggtgacttattgtcgggaggtttttttttatatctactgaagaaaaaaaaatagaaaccttataaagcgcggtgtttgctgagaatatgtaatggaaaaaaatatccttaggttcaatgaagtgttgccattaggcaacatgaagtgttttcagtcatttacaggcaagatgctttctgtggttgagattgtttgcaattattgaaagaatgggagcattaattcggaccaatagtcagattcttttgaaatattatatttttaaagtatggtttggttctttgtaaacataaataagaaaatattggtttaaaatacataatttttgaagttatacttctttacgattgagagtgaaattttataattctgagcgcatgcgcacatagacagtatgtagttcgttgctaatctttcaagttatgtacgtatccgcgcaaataagtcattaaaagaatatatattagtgtttttagtaaatgtattatttattataatttttgtgtctttggatttgtcttcctcggagtaagataataaagtatctattataacatttttatacttcacttgatctatttgtcaccgtgatgtgtaattatatccgagacgtcactacacaggggcttgatagcttggttggtagagcattggaccagagatcgagaggtcccgggttcaaatcccggacgattcatatatatttttttataatttttggtattgttttaataaaaaatttttgaaagtggtaggtaagtattaaagttagtttaatatttaaataaaatacaaataaactgtgaagtatatttatttcgttgaaattatatgaagtataacttcttacgtgcgtacaaagtacacacacattcgtttttttatcaatcactcatcatcattttttaaatatttaagcataatatgcttaaatattattatattataataatttcactgccaaaatattttcttatgtacccaacatcttacggtactacagtgactgtatgtagatgtgtctgcaaaacctgaacactgtctcatcataaacacaagttttgaaggcataacaacaatatgctgttttttaa

SEQ ID NO: 1197 - DNA, 1282 bp, Diabrotica virgifera
aaaaaagaatgtgtgtgtactttgtacgcacgtaagaagttatacttctattatataatttcaacgaaataaatatacttaacagtttatttgtattttatttaaatattaaactaactttcttacctaccactttcaaaaaatttttattaaaacaatagcaataaaaaaatgaatatgaatcgtccgggatttgaacccgggacctctcgatctctggtccaatgctctaccaaccaagctatcaagccccgtgtaagtgacgtctcggatataattacacatcacggtgacaaatagatcaagtgaagtataaaaatgttataatagatactttattatcttactccgaggaagacaaatccaaagacacaaaaattattattaataatacatttactaaaaacactaatatattcttttaatgacttatttgcgctgatacatacataacttgaaagattagcaacaaactacatactgtatgtgtgcgcatgcgcccagaataataaaatttcgccctcgcacctaaagaagtataacttcaaaaactagtccatggtttgcacaaaatatggatatggatatacatatatgggcagtagagaataatgacatccacagttattattgaaaatgaagtatacaagatacaagtaatttacatgagttaaacgaatgttctgaatcttaaaaaatagcttcttgatgagttcactttgactctacagtcactctttgaatatttgttatagcttacgatttttatttagtcttaagtacagacctgcatttttaggttagattttcatttttatagttcatattgaataattatagggaaagcactacacctataaatatatttgttatctaacgcaaaaacatatcaaaattttgatgtttacttctttataataaaggtctaacaaatttttggcatgttttagtacactttacatacttaaaaatcatatgaaatgataattcatagatatatatcgaaatccgtttagagtgggatccatatagacctttaaaaacttatttttctacagaaatttatgttattctgttcgaaaacgcataatacgctttttataatattgtgttattgtatatatgtaaatgtaatgaaacgaaacggtgtaaaaatcttatcattttactttttgtaagttttaagtgcttttattgttagttatttttaatattgttgagttatacacaaaactaatcttttggtgtgttaaatgttcattaatgaattttgttaagagga

SEQ ID NO: 1198 - DNA, 1148 bp, Diabrotica virgifera
tgtataagtataatgtaagcttaagcttactataaaactaagtttctatacattattgtattaatatattgttcatggagttaatagtacctacctattattaaaatcaagaataagtaacataagcacaattacactgatactaattaaatagcgacttagacaattactaaaataaccagaatacgcgaaaattggcaataaattatatttaaaatcaaagttgtagccaaaaacatacagtctttttagtacaaaggcacgcttacatcagtcaaaatttctgacgtcagagcactgttaaaactttagaatgtgacttttcatcatagccatgtccatgtcatttcttgtcggagatattttctttgctttttttgaagttatacttctttacgattgagagtaaaattttataattccctggcgcatgcgcacacagacagtatagttcgttgctaatctttcaagataggtatgtatatatcagcgcaaatacgtcattaaaagaatatattagtgtttttagtaaatgtattatttattataatttttgtgtctttggatttgtcttcctcgggagtaagataataaagtatctattataacatttttatacttcacttgatctatttgtcaccgtgatgtgtaattatatccgagacgtcactacacaggggcttgatagcttggttggtagagcattggaccagagatcgagaggtcccgggttcaaatcccggacgattcatatatatttttttataatttttggtattgttttaataaaaaatttttgaaagtggtaggtaagtattaaagttagtttaatatttaaataaaatacaaataaactgtgaagtatatttatttcgttgaaattatatgaagtataacttcttacgtgcgtacaaagtacacacacattcgtttttttatcaatcactcatcatcattttttaaatatttaagcataatatgcttaaatattattatattataataatttcactgccaaaatattttcttatgtacccaacatcttacggtactacagtgactgtatgtagatgtgtctgcaaaacctgaacactgtctcatcataaacacaagttttgaaggcataacaacaatatgctgttttttaa

SEQ ID NO: 1199 - DNA, 1134 bp, Diabrotica virgifera
aaatagattggttacaatgaaacggatggtagagtggatactgtagataagatttgtgttgcttactctgccactaggataacaaagggatggccgttctacagtatgatacatattggcggcataattgttgaaattttatacaaattggcctgtccagcgaaggctcctaaatatcgaagagttttcctgaaaaatttgtcagatcaactgtttgacagatatgtactgcatgatataagtgccctcctcaaggtgacttattgtcgggaggtttttttttatatctactgaagaaaaaaaaatagaaaccttataaagcgcggtgtttgctgagaatatgtaatggaaaaaaatatccttaggttcaatgaagtgttgccattaggcaacatgaagtgttttcagtcatttacaggcaagatgctttctgtggttgagattgtttgcaattattgaaagaatgggagcattaattcggaccaatagtcagattcttttgaaatattatatttttaaagtatggtttggttctttgtaaacataaataagaaaatattggtttaaaatacataatttttgaagttatacttctttacgattgagagtgaaattttataattctgagcgcatgcgcacatagacagtatgtagttcgttgctaatctttcaagttatgtacgtatccgcgcaaataagtcattaaaagaatatatattagtgtttttagtaaatgtattatttattataatttttgtgtctttggatttgtcttcctcggagtaagataataaagtatctattataacatttttatacttcacttgatctatttgtcaccgtgatgtgtaattatatccgagacgtcactacacaggggcttgatagcttggttggtagagcattggaccagagatcgagaggtcccgggttcaaatcccggacgattcatattcatatttttttttatttgctattgttttaataaaaattttttgaaagtggtaggtaagaaagttagtttaatatttaaataaaatacaaataaactgttaagtatatttatttcgttgaaattatataatagaagtataacttcttacgtgcgtacaaagtacacacacattctttttt

SEQ ID NO: 1200 - DNA, 2880 bp, Diabrotica virgifera
aatctcacattttatccttttcgcgataatttgatgaaattttttgtaattttgaaaaaaattcataagtgcctcgaggaagggtgtagtaatgcgtaggtacttttttttgttaatgtatggatttggggagagccaattagctttaataattgttagaaataatatttctaacataacaagtaaataaaaatactatagaataaaaatttgttgtaaattcgtatttaaattcgtattgtgagatgaaattaacacgccattattcacgttacagaagtgagcgcgactactcccgggttaatacacaagaactacaccgaatagagttaacctatttggaagtaaagtattgttgacacctctcactttcattatggcaactctgacgtcagttgccaattgttactaaactatctctcacctgtctgtttagtttgtcatatacaatacttaattgttataattagttaatgaataatattatttaatctgaattttatgggagttaaacactgtgtaaaatttaaatacgcaagtagacattccaagttaccttgagacgatgtaatgctacatgctacccgaatcttcacttaattaatatggtttttgtccaatttcgtaaaaattttaaaccgaatttaccattaaaatctgaagaattcacaaatatttcgacgattcatagtaacatattaaaaatacatttttctacagctacagaaaccccattaaatagaaacatatatttaatacgttacaaatcgttacatcttagataaatttctacacttatattaaatgtaactatatagaaaatgttgcacggagtatttatataacaattgaagcctggtaggcctaagtttacgtatacaatcaaatgagcaataattgattctttccattttatagtgaagtacttaagatattactgtaatgttgtttcagaggtttgaggtatctatttagatgtagagttgaactaatgtgccaagttttgaaatcctacatatacatttttaatttatgacataaacgtttttaaaaatagctttaattcttttagctctttattgttacgaattaacaaaacttgcgtggatttgcaaaaatcaaaatgcactatttacgaaccctcagctaatctctaaacctaacaaagctcaaaactgggtatcggtaacaatattacatctaagatacccaaaaactttgaaaaattttgtttttaatctattttaatttgggaagtggtacacgacttaaaatggcagctacgattgtacaattgatacattgtttaaattatttggatttaatccacgttttgactactgggcacgaaaagtactgctctcgtttctttacatttatacaagattcaaatttacaacctccagttcgtagcttaaccatggtacatcggcgatagacttaaaatcagtatttattatcaaatttattttataaaagtattaccacttcccagcattattttacttattttttataaaatgttgtctacaggaaaactagttttgatctcgtctgttgaaattgaaagagcaattccacaatttggtgcacgccatagagactaaaccataagtgtgtcacttatttcacgttgcttagcaggcatgttcaaataattaaacaaatcgtcctattagaggtaaaactacactttttagaaagtggagaaaaatcgatttaaaggtacaaattgttttttaaattcacctgacttgaatattggaattttttaaaggcaactttaaagaataaataaaaacaaatatctaagccatgtttcgtcacaggaactatgatataatcaatattagatcaatttttgtaattgatgagtttttccatgaacacaatttttggatattgatatcctattagagataaaactcactaactacactttatacttgatgaatttttccatgaacacaattattggatattgagaagttaatgaatttgtctccataaactatcatgactgaagttatgattcaaaataaaagaaataagtaacaaaaaattatattacaaaatgttaaacctaaaacagattgtctaacctctaacggaactaaagctgagaatctggtaatggtaatgaatgataatgaacaaaatgtaaataaacaattaaataaagtttctacaaaacagttccctctaggtatcaaaaacagaagtaaattattgttgaaagatcacaaagtaccgatccggcacttcatattgtaaggaaaaattcactaagtgcaataataagttttaatgagttttaccctgaaaccaaaattcaaacgaatgcattccagattataaggaaaattcactaagtgcaataataagttttgatgaattttaccctgaaaccgaaattcacaataatgcacttagtgaattgtaccataaattatctcagcaattagaagagttagagcctcacgtgacttctccagggctgggcagtaccgtattgagttcaaatcgatgaaaatgtcaaaatcttcaaaaaagtgcacttagtgagttttacctcttataggacgaaatattgactgaattcttttgaaatgttttttgtgaatcactgtttataacaatataatcattgtttataatccaaccaagctattttgaccagtctgtaatttccgtcttctttgaatattcttaaaatatttatatcgtaaaatgttttcatttataaacatgattttttagtgctgcccaaacaagctcttcttcttctttagggggccgtcttcttagcgatggctggcgataagttctgcaaagtctgaaaagtctaatcctgttcattttttgatgttgcgcacccag

SEQ ID NO: 1201 - DNA, 2759 bp, Diabrotica virgifera
aatctcacattttatccttttcgcgataatttgatgaaattttttgtaattttgaaaaaaattcataagtgcctcgaggaagggtgtagtaatgcgtaggtacttttttttgttaatgtatggatttggggagagccaattagctttaataattgttagaaataatatttctaacataacaagtaaataaaaatactatagaataaaaatttgttgtaaattcgtatttaaattcgtattgtgagatgaaattaacacgccattattcacgttacagaagtgagcgcgactactcccgggttaatacacaagaactacaccgaatagagttaacctatttggaagtaaagtattgttgacacctctcactttcattatggcaactctgacgtcagttgccaattgttactaaactatctctcacctgtctgtttagtttgtcatatacaatacttaattgttataattagttaatgaataatattatttaatctgaattttatgggagttaaacactgtgtaaaatttaaatacgcaagtagacattccaagttaccttgagacgatgtaatgctacatgctacccgaatcttcacttaattaatatggtttttgtccaatttcgtaaaaattttaaaccgaatttaccattaaaatctgaagaattcacaaatatttcgacgattcatagtaacatattaaaaatacatttttctacagctacagaaaccccattaaatagaaacatatatttaatacgttacaaatcgttacatcttagataaatttctacacttatattaaatgtaactatatagaaaatgttgcacggagtatttatataacaattgaagcctggtaggcctaagtttacgtatacaatcaaatgagcaataattgattctttccattttatagtgaagtacttaagatattactgtaatgttgtttcagaggtttgaggtatctatttagatgtagagttgaactaatgtgccaagttttgaaatcctacatatacatttttaatttatgacataaacgtttttaaaaatagctttaattcttttagctctttattgttacgaattaacaaaacttgcgtggatttgcaaaaatcaaaatgcactatttacgaaccctcagctaatctctaaacctaacaaagctcaaaactgggtatcggtaacaatattacatctaagatacccaaaaactttgaaaaattttgtttttaatctattttaatttgggaagtggtacacgacttaaaatggcagctacgattgtacaattgatacattgtttaaattatttggatttaatccacgttttgactactgggcacgaaaagtactgctctcgtttctttacatttatacaagattcaaatttacaacctccagttcgtagcttaaccatggtacatcggcgatagacttaaaatcagtatttattatcaaatttattttataaaagtattaccacttcccagcattattttacttattttttataaaatgttgtctacaggaaaactagttttgatctcgtctgttgaaattgaaagagcaattccacaatttggtgcacgccatagagactaaaccataagtgtgtcacttatttcacgttgcttagcaggcatgttcaaataattaaacaaatcgtcctattagaggtaaaactacactttttagaaagtggagaaaaatcgatttaaaggtacaaattgttttttaaattcacctgacttgaatattggaattttttaaaggcaactttaaagaataaataaaaacaaatatctaagccatgtttcgtcacaggaactatgatataatcaatattagatcaatttttgtaattgatgagtttttccatgaacacaatttttggatattgatatcctattagagataaaactcactaactacactttatacttgatgaatttttccatgaacacaattattggatattgagaagttaatgaatttgtctccataaactatcatgactgaagttatgattcaaaataaaagaaataagtaacaaaaaattatattacaaaatgttaaacctaaaacagattgtctaacctctaacggaactaaagctgagaatctggtaatggtaatgaatgataatgaacaaaatgtaaataaacaattaaataaagtttctacaaaacaaaactctaggtataaaaaatcacatgcgataggaacagaagtaaattattgttgaaatatcaacatccatttttatagtttctaatttattgtttgaaagatcactaagtaccgatccggcactccagattgtaaggaaaaattcactaagtgcaataataagttttaatgaataaaacgggataatacccgaaggtttgctgtataccatctaagtggttaaataaaatttaacttaaagtaaaacactccttggtgtagttggtatattttaataaaaatttaaaaatccaaaaggattacgttcagatcgttttcggacttaccagtccatcatcagtgaactctctgtccttgctaaatagccacaatgccaaacaatggtcaagatgtatgttctaactacatggtgaaatctgttaaacaatttggcttacattggatgccaacggattagtactaggtacatgatgctctactccattaattaagagattttttattattaggtctacattgaactacgtttagtctgtcaatgattgacagactaaacgtagataa

SEQ ID NO: 1202 - DNA, 766 bp, Diabrotica virgifera
aattttagtgcatttgatatttttaattaaataaacctccaaagcactgtttttatttacagctcttacaacaaaagagacactcggacaattcaaaaaacaaaaccctagtagtgatacctcgaggacgatacaaaagtagtataaaacaaaatcagccctccaatttttccacagaattttttaaagttaggaaaaaaaacaagagttccattcaccccgtctaatgccatccaagcaaaaaaatgttgttaccgggacaacaccaaacgacatcaatacatgcacctacaaactgatgcaagaatcttgaaaatcagagcacaaataataaagttatagattgtcaaacttaatcaaaaaccctgggttgcggaattttgtgccggtgagtgtatatagagtgcatagattattgcatatgatattgaaaattacagaatatacaacatatctaatgagaattagaaactggaatgtgactatatttctccagtgaatactctctttgaagaaaggagaaagtcatgatggagctactacaaagtcataaaagattaaatcgggaatagaatggataaatttaaacaaaggaaagcaccataaaccgattacgtggtcctttataagtacataacacgtaccagcgaacaagggaatatattatcataggcacccatatcatacaattgagaatatttgaaaggaaaatcctcagacggatgatggcctcgataagaatggacaaagaagaaatgagaagaat

SEQ ID NO: 1203 - DNA, 10359 bp, Diabrotica virgifera
  SmartBlast Evalue=6E-32; Info=Painless n=1 Tax=Tribolium castaneum RepID=D2A388_TRICA
aatctcacattttatccttttcgcgataatttgatgaaattttttgtaattttgaaaaaaattcataagtgcctcgaggaagggtgtagtaatgcgtaggtacttttttttgttaatgtatggatttggggagagccaattagctttaataattgttagaaataatatttctaacataacaagtaaataaaaatactatagaataaaaatttgttgtaaattcgtatttaaattcgtattgtgagatgaaattaacacgccattattcacgttacagaagtgagcgcgactactcccgggttaatacacaagaactacaccgaatagagttaacctatttggaagtaaagtattgttgacacctctcactttcattatggcaactctgacgtcagttgccaattgttactaaactatctctcacctgtctgtttagtttgtcatatacaatacttaattgttataattagttaatgaataatattatttaatctgaattttatgggagttaaacactgtgtaaaatttaaatacgcaagtagacattccaagttaccttgagacgatgtaatgctacatgctacccgaatcttcacttaattaatatggtttttgtccaatttcgtaaaaattttaaaccgaatttaccattaaaatctgaagaattcacaaatatttcgacgattcatagtaacatattaaaaatacatttttctacagctacagaaaccccattaaatagaaacatatatttaatacgttacaaatcgttacatcttagataaatttctacacttatattaaatgtaactatatagaaaatgttgcacggagtatttatataacaattgaagcctggtaggcctaagtttacgtatacaatcaaatgagcaataattgattctttccattttatagtgaagtacttaagatattactgtaatgttgtttcagaggtttgaggtatctatttagatgtagagttgaactaatgtgccaagttttgaaatcctacatatacatttttaatttatgacataaacgtttttaaaaatagctttaattcttttagctctttattgttacgaattaacaaaacttgcgtggatttgcaaaaatcaaaatgcactatttacgaaccctcagctaatctctaaacctaacaaagctcaaaactgggtatcggtaacaatattacatctaagatacccaaaaactttgaaaaattttgtttttaatctattttaatttgggaagtggtacacgacttaaaatggcagctacgattgtacaattgatacattgtttaaattatttggatttaatccacgttttgactactgggcacgaaaagtactgctctcgtttctttacatttatacaagattcaaatttacaacctccagttcgtagcttaaccatggtacatcggcgatagacttaaaatcagtatttattatcaaatttattttataaaagtattaccacttcccagcattattttacttattttttataaaatgttgtctacaggaaaactagttttgatctcgtctgttgaaattgaaagagcaattccacaatttggtgcacgccatagagactaaaccataagtgtgtcacttatttcacgttgcttagcaggcatgttcaaataattaaacaaatcgtcctattagaggtaaaactacactttttagaaagtggagaaaaatcgatttaaaggtacaaattgttttttaaattcacctgacttgaatattggaattttttaaaggcaactttaaagaataaataaaaacaaatatctaagccatgtttcgtcacaggaactatgatataatcaatattagatcaatttttgtaattgatgagtttttccatgaacacaatttttggatattgatatcctattagagataaaactcactaactacactttatacttgatgaatttttccatgaacacaattattggatattgagaagttaatgaatttgtctccataaactatcatgactgaagttatgattcaaaataaaagaaataagtaacaaaaaattatattacaaaatgttaaacctaaaacagattgtctaacctctaacggaactaaagctgagaatctggtaatggtaatgaatgataatgaacaaaatgtaaataaacaattaaataaagtttctacaaaacaaaactctaggtataaaaaatcacatgcgataggaacagaagtaaattattgttgaaatatcaacatccatttttatagtttctaatttattgtttgaaagatcactaagtaccgatccggcactccagattgtaaggaaaaattcactaagtgcaataataagttttaatgaataaaacgggataatacccgaaggtttgctgtataccatctaagtggttaaataaaatttaacttaaagtaaaacactccttggtgtagttggtatattttaataaaaatttaaaaatccaaaaggattacgttcagatcgttttcggacttaccagtccatcatcagtgaactctctgtccttgctaaatagccacaatgccaaacactggttaagttgtatgttccaactacatagtaaagattgtaaaagaatatggcctaaattggatgccaatggattacttccagcaacacgatgctctactacattacattaaaagattttttatgtgattaggtcttcattgaaccacgtttagtctgtcaatgatccaagttttgatgaattttaccctgaaaccgaaattcacaataatgcacttagtgaattgtaccataaattatctcagcaattagaagagttagagcctcacgtgacttctccagggctgggcagtaccgtattgagttcaaatcgatgaaaatgtcaaaatcttcaaaaaagtgcacttagtgagttttacctcttataggacgaaatgatgattagtttttgaaaaaatatgtaaagatacttttggtataaaacacaccgagaagtaatcaaaaacatttgataacaagtagccgtttaaaacggaataccttatggacatatttacagatgatgatagatgacgttagaaaccgactgaataataataataccaaacatgtgatacaaaaataaccttttaacacggaatgcatgtctatattgacagctgataacatttgatcaaaagtagtcatttagtagacagatgacgttaggactgactgaataataatacaataaaacatgtgaataaaaaataaccgtctaacacggaatgcatgcctatattacaagccgatgacagatgacgtcagactactttgaattttaatgtttatgtatcttttgaaaattattgtatttgtctacacaccaaggtgggattgtaacaaattaccaagattgtgtccatgatgtaccaaagtttctgctaacaatgacataaaatactttagttcgattgatatatccaaaaatagtttttatgtagaacaatagttttagaatgaactgagaatatattattttaatcacaaacattattttagtgccttacttttttaattcaaatatgtttgttttttttttaattcgttgactgccaatacggtatagaaagtaagcaaaggacaccgcacacatcttatggaaggtatggtgtcgctcaaattgaataaattggtatgaatggattcgtttcggattgacggtcgattcttatcattgcgccaactctgaattttcaataataagagcagaaattgatataaatcaatctgaaatcaaatgggtaggtacataagttagagagagaaaaaatattttaaaatacccaaattatgggtacttcataaatcttctcgggctattaagcatcttattataatagtttcactaatccgcttaggcccagcggggtttaagctgttttgaataacacccagagcaatagtgattataactgacacgtttatagactccaaaaatgtgatttcgataaactttaattgtaatttgcgccgtaattaatcataattaagagttggcgcaatgataagattgaccgtaatcaaaacgaatccactcgtataaatccttattgaatttgagcgacatacattttccacaagatgtgcgcgatgtcctttaaacaaaggaaagcaccataaaccgattacgtggtcctttataagtacataacacgtaccagcgaacaagggaatatattatcataggcacccatatcatacaattgagaatatttgaaaggaaaatcctcagacggattatggcctcgataagaatggacaaagaataaatgagaagaataatgaaccatgaactaagagacataatgaaaggagaagagatagttaggtttattaaagtgtagatactgagatgactaggacacatagagaaaaggaaaaacgacctattgattaagaagatcactagatggaaaccagaaattgaaagacaaaggggaagacccagatagaaatgggaggaccaggtcatgagagatatcaaagttctgaaagtgagaaacgggagggaactatgcacatagtaaagtgatttgaagaaaattgtatcgaaaactaagtcatataacaaactttgacaacatacaagtggaatgcggagttattcaccgcaataaacgaatcagagagctctacgtaagggcggccaacattccatccggattgaatagccttgttgatgcagaaatgacaataacttcgaggtggtcaaagaattttaataactaggagcaatgactaacgacaagaatgtagaacgggaagttgaaatgcgagtaatcgcgggaaatatatctttctttgcaattcaacatctaatgtggtcaaaatttaactggtgatgtatcagaatcaaaatatactaaaagagctgaagaaaatgagggcatatagtggaaaatagtgccacagaacccacaagactagatggcttttaattttaaaaacatgctataacaaattgataaatggattaacgaacttagtggggaatacatatgaagggtcaggtcagggggaagaacaatgaatgtcatcttgaagcattttcggtaaaatgagaaacaaagttacatatacaatgtttttcccccttgcgttcaatcgtgtgacgtgcttttgaaacgaatctcatccttatttccccttggccattcacaggttgatagtactctttctaagctaacatattgcacaaaaatcacaaaatgaccaaaaattaacattcatcgtttttctctctggcccttcatatagttagttattcttttaacgaaagatacaagtcccttaacatgtgtcttttaaatggctgatactttttgatttccctaaggtatgctttattgtcgtcatcaaagtggttaaggtcaacatatttaagtacttttggcttacctttatgaaaaatatttacgtgattaataatttgttttacaaaatccatatactttaaagtgtgcaatcgttttgcaaaagtgttcgtacttttaataaaactaaccaatttgatctgtttgtgtaacctactcgtcttttgtatcttatccatatcggccactattaaacccaccaggagattgttgaggataatggtcatagcaatgataaaaatggtcatgatgaatcttccaaaaattggataatcaataggttctagaacattttcattaaattcccctgtaaagtaaatcaaggtgtaaaagaggcttttgaatataccagcccaatctggcgatttgcctttactgtctttaaaaggtgtaacaatgtagaaacagagagcgaaacatacgaataatataaaataaaatccagtatactggaagaaatattttatggaactgaatatgatggtgtatttagtaaagaaaggaagctgtcctaacataacaaaaaatatgaacgttgcaataagcatggcaagaatggacgtgtaaatgttggggtatataatagtccataaacagctgacaatagttgtaacttctagaatatttgaaagatccatgaaatacttccacctgtacaagaaaaatagttgtaaaccttcttttattgcatgaaacccgattgaaaaataatacaaccagtttaaaaaagtgtaaaaatagttaaaacgtaaagagatcatataagcataaatatttataagaagaatagcgtaaaatatcaagtcagcataaaagaaccagcgaactttataccatttattcttaactagttgtattaataacggatggcaaagtaaatgttttttgtgttcgtcttttgccaaaaaatgtagtgtcctattttcgttataaaccttgtcatcatcttgtataatagtgtcatacttaaattttcttccgtttatggaatcatccaaatgcatttttaaaatatgttgatttattcgttctatcgccattttcttttcttcgattgtagcattagagtccttgttaaacgtaacattgattccattagatacatcatggttattatttttcgtttctttggttgaagtcagactcgcacccaagtgcaatacttgacagattatttcggaatcgtccaccctcttgtcattggcttcaagatttagctgatgaagaagcttatttaatatggcaagtcgtttggatgttaacttttcttgatttagtctaaccagatatactaacctatttagaagtaaatataagacgcaatatctatagaagtcgtagttatataagggcattttttgtttattgtacattttggatagaaccgggaagattccgttagagttgattttggtgaatttgtgttgcaaaagaacagctacgaaagggtaatatcctcgtaaggaagcatactccagaaggtttgttggaaattttcttgatgttttgaatggatcggcaccattatccagcaagtatatgatgcaccttaagtaacctttagacttgaaaaccgtaagcattggagtatcatttatatcataattagttagccgcttaagcttactgcgttcatcctgtaaatattccagaaatccttttcgcatacaaagctgtagcatgtttccgcacgtcgtgtaatcgtcatatccatcaaaatagtttgtattgttcattatactttctgcgttatactgtataaaattttctacatcacctgccttcaaaagattgaatttaatcactgcgggatcctcttgaacataggactgaggtagatcggtaaacaagttaagttttaggtattctcgaatagtttttcccgtttctatacacgtatctatatctatataatctattttcagtagcagctgtatcaagtgagtatatctatatcttacagctaaacagattggagtttcattccaaaagttagtgtgattaacttcagcaccatttgtaataagaagatcagcacaagctactatatcttttggttccggtccaataattgtagttagtttaggctcaataccgttatgtaatacgacctcaaaaggcgacaccgattttttatattgtaataagatatgtaaaggattttccgagaagtatgttaaagaattggtagattctggtatttgcttcaaaataactttaagtttttctacatctgcagatttggctacataatgtattggctcccacccgtaataaaggtcatctatataatcaattttgttgtatctagcttttattgcagaacatagtacgtccagagtttcgggggtgacacttttttcaatacatgctagaatcaaaattgttttcttattgtgtttgtcatatctgtagtttattaacccatcctcgggatgattttccaaatcttccgtgtagtacctaactgtttcttctattccttctttggagttctgtaggactttttccaatatttgagccttaaagtcaataatgctgcttcttgtatggtgaaagtgcttgatcatcttttgtctctcctcgggaattccatccacttctattactgcgtcacccatatcttaactttttttgattaaacaccttcacaacacaagtcacagcaccgcaaaatgttgatataaatttagaacattccctcacaaatcaccaacggagataaacatgaacaaagtgtggttttattattatttaagataagattagtcagtcgaatccacagcgcgacattataaaggttgtttgatttttatatcgataaacaatgaataaattcatttatggccactcgtagttaatgaaaatttctgaaatatggtggacgtgagtgtttctgccgacccgatcgtgctgtcaactgacgatcctgaaagacgagattgtgaactctgtggtataaaatatattcacataaatgacgtggagaaacatatcaacagtagaaagcataaactcaaccaaaggaaattaactgagccggaggcccagaacagatacaactgtaaggactgcaacaagaccttgaccagtgaagaattcttgcgaagacatgttgagagtaaatctcacaagaaagaagttgaaaaacatttacccaaaatcgaagaatataaggagaaaactcaatcaatatggatgcaaaaatggcagctacggtcaatgtcaattattgactctactatgtctccttccaaacttgacgaggcgaccgttacaataaatgaagcagaggaagaaacatttgatagaaagaaatataaagttcgcagtgacaacttggcgttcgacagacttgaaccatacgtatattccttggtgtcatacttgagtataaggttagcgttagacccaaatacaacagatttcaacatatcagtcaacaacagaaactggcccacatttggagacataatagtagaacaaacttttagtgataaatttgtgacttatgctatcagatgtaaaaatatatccgaaacaccccaaactatcgataatttaaaggatgcaaaaatatttctggaaaaagagtatacttatgttactcaacacaaaaattattcatcgacaaccttcttgatatttacgacatgcaatacaagctcgaaatttccagaacaaatagaaattaaaccagaattgattaaacatttcataaaaccttcggaggagacacccccacctataaaagtaaaaatatttccaatgacaaagaaaaattacatcttgaatgtgtctactgataacgacaacgtgtttttaatgtcgcctgaacacagcagcggcctacctccaatatatctttatactaatcaaaggtcatatccgcattcaattaatgatttaattaaaaagctgttccccaatttaaaacctgagtttgctagacaatacaaaaattatattgaaaactgggctgaaggtaaactaggaggaaattacatgttatccaaaaaagatgttatcttgaaaattggtgaactactgcttagtccatacactattttgccaaagctggtcaacttcaaatctggtaactttgacatttggaacaaggttattaataacactgacgtggttattataaaaaatgaaccgtttattttaagcaaactctgtgagccttttaaccagctaatcgagaactctttatcaaccgtagaagaaaaatttaaaatagatcctctaacaaaaattgtaactatgtctgacacagctttcaacaaaatatctgatcaccaaattaaagcttatcttttggaagaaggtttttgcagagattttcatcttacaatattgtataaagtgttttggaaagcagggaaaatatcacttttaatttcacttgaagataacgaagattgtaaagactatattttagatgttatttcttatatgaagcaggaaggtgtaaggaaaaaatttatgttaaaaacggagactccttttgaatttacatcaattccaaaaaacctaaaagttttttcatgtctcaacgatgtcaaagaactagttaatttagatcttttaaaaatctgggtggatagaaaatacagtctatctgcaaaagatatttgtaaaacagatccattctttctaaaatgggtgacacccagtgcctttttcgatatgattatggaaaggattactatgatcaaagaggagggtacaaaaatggatgtgcagactgattttaagattattttagatgacactgacagaaacaagataaagagttctctttatggtgcagagtcgattccagagagttgggatagattggcaggaattgatccggtattattttagacttgtcaaaatactttttggtatttttttatattttaatatacatactattttacct

SEQ ID NO: 1204 - DNA, 10359 bp, Diabrotica virgifera
  SmartBlast Evalue=6E-32; Info=Painless n=1 Tax=Tribolium castaneum RepID=D2A388_TRICA
aatctcacattttatccttttcgcgataatttgatgaaattttttgtaattttgaaaaaaattcataagtgcctcgaggaagggtgtagtaatgcgtaggtacttttttttgttaatgtatggatttggggagagccaattagctttaataattgttagaaataatatttctaacataacaagtaaataaaaatactatagaataaaaatttgttgtaaattcgtatttaaattcgtattgtgagatgaaattaacacgccattattcacgttacagaagtgagcgcgactactcccgggttaatacacaagaactacaccgaatagagttaacctatttggaagtaaagtattgttgacacctctcactttcattatggcaactctgacgtcagttgccaattgttactaaactatctctcacctgtctgtttagtttgtcatatacaatacttaattgttataattagttaatgaataatattatttaatctgaattttatgggagttaaacactgtgtaaaatttaaatacgcaagtagacattccaagttaccttgagacgatgtaatgctacatgctacccgaatcttcacttaattaatatggtttttgtccaatttcgtaaaaattttaaaccgaatttaccattaaaatctgaagaattcacaaatatttcgacgattcatagtaacatattaaaaatacatttttctacagctacagaaaccccattaaatagaaacatatatttaatacgttacaaatcgttacatcttagataaatttctacacttatattaaatgtaactatatagaaaatgttgcacggagtatttatataacaattgaagcctggtaggcctaagtttacgtatacaatcaaatgagcaataattgattctttccattttatagtgaagtacttaagatattactgtaatgttgtttcagaggtttgaggtatctatttagatgtagagttgaactaatgtgccaagttttgaaatcctacatatacatttttaatttatgacataaacgtttttaaaaatagctttaattcttttagctctttattgttacgaattaacaaaacttgcgtggatttgcaaaaatcaaaatgcactatttacgaaccctcagctaatctctaaacctaacaaagctcaaaactgggtatcggtaacaatattacatctaagatacccaaaaactttgaaaaattttgtttttaatctattttaatttgggaagtggtacacgacttaaaatggcagctacgattgtacaattgatacattgtttaaattatttggatttaatccacgttttgactactgggcacgaaaagtactgctctcgtttctttacatttatacaagattcaaatttacaacctccagttcgtagcttaaccatggtacatcggcgatagacttaaaatcagtatttattatcaaatttattttataaaagtattaccacttcccagcattattttacttattttttataaaatgttgtctacaggaaaactagttttgatctcgtctgttgaaattgaaagagcaattccacaatttggtgcacgccatagagactaaaccataagtgtgtcacttatttcacgttgcttagcaggcatgttcaaataattaaacaaatcgtcctattagaggtaaaactacactttttagaaagtggagaaaaatcgatttaaaggtacaaattgttttttaaattcacctgacttgaatattggaattttttaaaggcaactttaaagaataaataaaaacaaatatctaagccatgtttcgtcacaggaactatgatataatcaatattagatcaatttttgtaattgatgagtttttccatgaacacaatttttggatattgatatcctattagagataaaactcactaactacactttatacttgatgaatttttccatgaacacaattattggatattgagaagttaatgaatttgtctccataaactatcatgactgaagttatgattcaaaataaaagaaataagtaacaaaaaattatattacaaaatgttaaacctaaaacagattgtctaacctctaacggaactaaagctgagaatctggtaatggtaatgaatgataatgaacaaaatgtaaataaacaattaaataaagtttctacaaaacaaaactctaggtataaaaaatcacatgcgataggaacagaagtaaattattgttgaaatatcaacatccatttttatagtttctaatttattgtttgaaagatcactaagtaccgatccggcactccagattgtaaggaaaaattcactaagtgcaataataagttttaatgaataaaacgggataatacccgaaggtttgctgtataccatctaagtggttaaataaaatttaacttaaagtaaaacactccttggtgtagttggtatattttaataaaaatttaaaaatccaaaaggattacgttcagatcgttttcggacttaccagtccatcatcagtgaactctctgtccttgctaaatagccacaatgccaaacactggttaagttgtatgttccaactacatagtaaagattgtaaaagaatatggcctaaattggatgccaatggattacttccagcaacacgatgctctactacattacattaaaagattttttatgtgattaggtcttcattgaaccacgtttagtctgtcaatgatccaagttttgatgaattttaccctgaaaccgaaattcacaataatgcacttagtgaattgtaccataaattatctcagcaattagaagagttagagcctcacgtgacttctccagggctgggcagtaccgtattgagttcaaatcgatgaaaatgtcaaaatcttcaaaaaagtgcacttagtgagttttacctcttataggacgaaatgatgattagtttttgaaaaaatatgtaaagatacttttggtataaaacacaccgagaagtaatcaaaaacatttgataacaagtagccgtttaaaacggaataccttatggacatatttacagatgatgatagatgacgttagaaaccgactgaataataataataccaaacatgtgatacaaaaataaccttttaacacggaatgcatgtctatattgacagctgataacatttgatcaaaagtagtcatttagtagacagatgacgttaggactgactgaataataatacaataaaacatgtgaataaaaaataaccgtctaacacggaatgcatgcctatattacaagccgatgacagatgacgtcagactactttgaattttaatgtttatgtatcttttgaaaattattgtatttgtctacacaccaaggtgggattgtaacaaattaccaagattgtgtccatgatgtaccaaagtttctgctaacaatgacataaaatactttagttcgattgatatatccaaaaatagtttttatgtagaacaatagttttagaatgaactgagaatatattattttaatcacaaacattattttagtgccttacttttttaattcaaatatgtttgttttttttttaattcgttgactgccaatacggtatagaaagtaagcaaaggacaccgcacacatcttatggaaggtatggtgtcgctcaaattgaataaattggtatgaatggattcgtttcggattgacggtcgattcttatcattgcgccaactctgaattttcaataataagagcagaaattgatataaatcaatctgaaatcaaatgggtaggtacataagttagagagagaaaaaatattttaaaatacccaaattatgggtacttcataaatcttctcgggctattaagcatcttattataatagtttcactaatccgcttaggcccagcggggtttaagctgttttgaataacacccagagcaatagtgattataactgacacgtttatagactccaaaaatgtgatttcgataaactttaattgtaatttgcgccgtaattaatcataattaagagttggcgcaatgataagattgaccgtaatcaaaacgaatccactcgtataaatccttattgaatttgagcgacatacattttccacaagatgtgcgcgatgtcctttaaacaaaggaaagcaccataaaccgattacgtggtcctttataagtacataacacgtaccagcgaacaagggaatatattatcataggcacccatatcatacaattgagaatatttgaaaggaaaatcctcagacggattatggcctcgataagaatggacaaagaataaatgagaagaataatgaaccatgaactaagagacataatgaaaggagaagagatagttaggtttattaaagtgtagatactgagatgactaggacacatagagaaaaggaaaaacgacctattgattaagaagatcactagatggaaaccagaaattgaaagacaaaggggaagacccagatagaaatgggaggaccaggtcatgagagatatcaaagttctgaaagtgagaaacgggagggaactatgcacatagtaaagtgatttgaagaaaattgtatcgaaaactaagtcatataacaaactttgacaacatacaagtggaatgcggagttattcaccgcaataaacgaatcagagagctctacgtaagggcggccaacattccatccggattgaatagccttgttgatgcagaaatgacaataacttcgaggtggtcaaagaattttaataactaggagcaatgactaacgacaagaatgtagaacgggaagttgaaatgcgagtaatcgcgggaaatatatctttctttgcaattcaacatctaatgtggtcaaaatttaactggtgatgtatcagaatcaaaatatactaaaagagctgaagaaaatgagggcatatagtggaaaatagtgccacagaacccacaagactagatggcttttaattttaaaaacatgctataacaaattgataaatggattaacgaacttagtggggaatacatatgaagggtcaggtcagggggaagaacaatgaatgtcatcttgaagcattttcggtaaaatgagaaacaaagttacatatacaatgtttttcccccttgcgttcaatcgtgtgacgtgcttttgaaacgaatctcatccttatttccccttggccattcacaggttgatagtactctttctaagctaacatattgcacaaaaatcacaaaatgaccaaaaattaacattcatcgtttttctctctggcccttcatatagttagttattcttttaacgaaagatacaagtcccttaacatgtgtcttttaaatggctgatactttttgatttccctaaggtatgctttattgtcgtcatcaaagtggttaaggtcaacatatttaagtacttttggcttacctttatgaaaaatatttacgtgattaataatttgttttacaaaatccatatactttaaagtgtgcaatcgttttgcaaaagtgttcgtacttttaataaaactaaccaatttgatctgtttgtgtaacctactcgtcttttgtatcttatccatatcggccactattaaacccaccaggagattgttgaggataatggtcatagcaatgataaaaatggtcatgatgaatcttccaaaaattggataatcaataggttctagaacattttcattaaattcccctgtaaagtaaatcaaggtgtaaaagaggcttttgaatataccagcccaatctggcgatttgcctttactgtctttaaaaggtgtaacaatgtagaaacagagagcgaaacatacgaataatataaaataaaatccagtatactggaagaaatattttatggaactgaatatgatggtgtatttagtaaagaaaggaagctgtcctaacataacaaaaaatatgaacgttgcaataagcatggcaagaatggacgtgtaaatgttggggtatataatagtccataaacagctgacaatagttgtaacttctagaatatttgaaagatccatgaaatacttccacctgtacaagaaaaatagttgtaaaccttcttttattgcatgaaacccgattgaaaaataatacaaccagtttaaaaaagtgtaaaaatagttaaaacgtaaagagatcatataagcataaatatttataagaagaatagcgtaaaatatcaagtcagcataaaagaaccagcgaactttataccatttattcttaactagttgtattaataacggatggcaaagtaaatgttttttgtgttcgtcttttgccaaaaaatgtagtgtcctattttcgttataaaccttgtcatcatcttgtataatagtgtcatacttaaattttcttccgtttatggaatcatccaaatgcatttttaaaatatgttgatttattcgttctatcgccattttcttttcttcgattgtagcattagagtccttgttaaacgtaacattgattccattagatacatcatggttattatttttcgtttctttggttgaagtcagactcgcacccaagtgcaatacttgacagattatttcggaatcgtccaccctcttgtcattggcttcaagatttagctgatgaagaagcttatttaatatggcaagtcgtttggatgttaacttttcttgatttagtctaaccagatatactaacctatttagaagtaaatataagacgcaatatctatagaagtcgtagttatataagggcattttttgtttattgtacattttggatagaaccgggaagattccgttagagttgattttggtgaatttgtgttgcaaaagaacagctacgaaagggtaatatcctcgtaaggaagcatactccagaaggtttgttggaaattttcttgatgttttgaatggatcggcaccattatccagcaagtatatgatgcaccttaagtaacctttagacttgaaaaccgtaagcattggagtatcatttatatcataattagttagccgcttaagcttactgcgttcatcctgtaaatattccagaaatccttttcgcatacaaagctgtagcatgtttccgcacgtcgtgtaatcgtcatatccatcaaaatagtttgtattgttcattatactttctgcgttatactgtataaaattttctacatcacctgccttcaaaagattgaatttaatcactgcgggatcctcttgaacataggactgaggtagatcggtaaacaagttaagttttaggtattctcgaatagtttttcccgtttctatacacgtatctatatctatataatctattttcagtagcagctgtatcaagtgagtatatctatatcttacagctaaacagattggagtttcattccaaaagttagtgtgattaacttcagcaccatttgtaataagaagatcagcacaagctactatatcttttggttccggtccaataattgtagttagtttaggctcaataccgttatgtaatacgacctcaaaaggcgacaccgattttttatattgtaataagatatgtaaaggattttccgagaagtatgttaaagaattggtagattctggtatttgcttcaaaataactttaagtttttctacatctgcagatttggctacataatgtattggctcccacccgtaataaaggtcatctatataatcaattttgttgtatctagcttttattgcagaacatagtacgtccagagtttcgggggtgacacttttttcaatacatgctagaatcaaaattgttttcttattgtgtttgtcatatctgtagtttattaacccatcctcgggatgattttccaaatcttccgtgtagtacctaactgtttcttctattccttctttggagttctgtaggactttttccaatatttgagccttaaagtcaataatgctgcttcttgtatggtgaaagtgcttgatcatcttttgtctctcctcgggaattccatccacttctattactgcgtcacccatatcttaactttttttgattaaacaccttcacaacacaagtcacagcaccgcaaaatgttgatataaatttagaacattccctcacaaatcaccaacggagataaacatgaacaaagtgtggttttattattatttaagataagattagtcagtcgaatccacagcgcgacattataaaggttgtttgatttttatatcgataaacaatgaataaattcatttatggccactcgtagttaatgaaaatttctgaaatatggtggacgtgagtgtttctgccgacccgatcgtgctgtcaactgacgatcctgaaagacgagattgtgaactctgtggtataaaatatattcacataaatgacgtggagaaacatatcaacagtagaaagcataaactcaaccaaaggaaattaactgagccggaggcccagaacagatacaactgtaaggactgcaacaagaccttgaccagtgaagaattcttgcgaagacatgttgagagtaaatctcacaagaaagaagttgaaaaacatttacccaaaatcgaagaatataaggagaaaactcaatcaatatggatgcaaaaatggcagctacggtcaatgtcaattattgactctactatgtctccttccaaacttgacgaggcgaccgttacaataaatgaagcagaggaagaaacatttgatagaaagaaatataaagttcgcagtgacaacttggcgttcgacagacttgaaccatacgtatattccttggtgtcatacttgagtataaggttagcgttagacccaaatacaacagatttcaacatatcagtcaacaacagaaactggcccacatttggagacataatagtagaacaaacttttagtgataaatctgtgacttacgctatcagatgtaaaaatatatctgaaacaccccaaactatcgataatttaaaggacgcaaaaatatttctcgaaaaggagtatacttatgttactcaacacaaaaattatttgtcaacatccttcttgatatttacgacatgcaatacaagctcgaaatttccagaacaaatagaaattaaaccagaattgattaaacatttcataaaaccttcggaggagacaccaccacctataaaagtgaaaatatttccaatgacaaagaaaaattacatcttgaatgtgtctactgataacgacaacgtgtttttaatgtcgcctgaacacagcagcggcctacctccaatatatctttatactaatcaaaggtcatatccgcattcaattaatgatttaattaaaaagctgttccccaatttaaaacctgagtttgctagacaatacaaaaattatattgaaaactgggctgaaggtaaactaggaggaaattacatgttatccaaaaaagatgttatcttgaaaattggtgaactactgcttagtccatacactattttgccaaagctggtcaacttcaaatctggtaactttgacatttggaacaaggttattaataacactgacgtggttattataaaaaatgaaccgtttattttaagcaaactctgtgagccttttaaccagctaatcgagaactctttatcaaccgtagaagaaaaatttaaaatagatcctctaacaaaaattgtaactatgtctgacacagctttcaacaaaatatctgatcaccaaattaaagcttatcttttggaagaaggtttttgcagagattttcatcttacaatattgtataaagtgttttggaaagcagggaaaatatcacttttaatttcacttgaagataacgaagattgtaaagactatattttagatgttatttcttatatgaagcaggaaggtgtaaggaaaaaatttatgttaaaaacggagactccttttgaatttacatcaattccaaaaaacctaaaagttttttcatgtctcaacgatgtcaaagaactagttaatttagatcttttaaaaatctgggtggatagaaaatacagtctatctgcaaaagatatttgtaaaacagatccattctttctaaaatgggtgacacccagtgcctttttcgatatgattatggaaaggattactatgatcaaagaggagggtacaaaaatggatgtgcagactgattttaagattattttagatgacactgacagaaacaagataaagagttctctttatggtgcagagtcgattccagagagttgggatagattggcaggaattgatccggtattattttagacttgtcaaaatactttttggtatttttttatattttaatatacatactattttacct

SEQ ID NO: 1205 - DNA, 9998 bp, Diabrotica virgifera
  SmartBlast Evalue=6E-32; Info=Painless n=1 Tax=Tribolium castaneum RepID=D2A388_TRICA
aatctcacattttatccttttcgcgataatttgatgaaattttttgtaattttgaaaaaaattcataagtgcctcgaggaagggtgtagtaatgcgtaggtacttttttttgttaatgtatggatttggggagagccaattagctttaataattgttagaaataatatttctaacataacaagtaaataaaaatactatagaataaaaatttgttgtaaattcgtatttaaattcgtattgtgagatgaaattaacacgccattattcacgttacagaagtgagcgcgactactcccgggttaatacacaagaactacaccgaatagagttaacctatttggaagtaaagtattgttgacacctctcactttcattatggcaactctgacgtcagttgccaattgttactaaactatctctcacctgtctgtttagtttgtcatatacaatacttaattgttataattagttaatgaataatattatttaatctgaattttatgggagttaaacactgtgtaaaatttaaatacgcaagtagacattccaagttaccttgagacgatgtaatgctacatgctacccgaatcttcacttaattaatatggtttttgtccaatttcgtaaaaattttaaaccgaatttaccattaaaatctgaagaattcacaaatatttcgacgattcatagtaacatattaaaaatacatttttctacagctacagaaaccccattaaatagaaacatatatttaatacgttacaaatcgttacatcttagataaatttctacacttatattaaatgtaactatatagaaaatgttgcacggagtatttatataacaattgaagcctggtaggcctaagtttacgtatacaatcaaatgagcaataattgattctttccattttatagtgaagtacttaagatattactgtaatgttgtttcagaggtttgaggtatctatttagatgtagagttgaactaatgtgccaagttttgaaatcctacatatacatttttaatttatgacataaacgtttttaaaaatagctttaattcttttagctctttattgttacgaattaacaaaacttgcgtggatttgcaaaaatcaaaatgcactatttacgaaccctcagctaatctctaaacctaacaaagctcaaaactgggtatcggtaacaatattacatctaagatacccaaaaactttgaaaaattttgtttttaatctattttaatttgggaagtggtacacgacttaaaatggcagctacgattgtacaattgatacattgtttaaattatttggatttaatccacgttttgactactgggcacgaaaagtactgctctcgtttctttacatttatacaagattcaaatttacaacctccagttcgtagcttaaccatggtacatcggcgatagacttaaaatcagtatttattatcaaatttattttataaaagtattaccacttcccagcattattttacttattttttataaaatgttgtctacaggaaaactagttttgatctcgtctgttgaaattgaaagagcaattccacaatttggtgcacgccatagagactaaaccataagtgtgtcacttatttcacgttgcttagcaggcatgttcaaataattaaacaaatcgtcctattagaggtaaaactacactttttagaaagtggagaaaaatcgatttaaaggtacaaattgttttttaaattcacctgacttgaatattggaattttttaaaggcaactttaaagaataaataaaaacaaatatctaagccatgtttcgtcacaggaactatgatataatcaatattagatcaatttttgtaattgatgagtttttccatgaacacaatttttggatattgatatcctattagagataaaactcactaactacactttatacttgatgaatttttccatgaacacaattattggatattgagaagttaatgaatttgtctccataaactatcatgactgaagttatgattcaaaataaaagaaataagtaacaaaaaattatattacaaaatgttaaacctaaaacagattgtctaacctctaacggaactaaagctgagaatctggtaatggtaatgaatgataatgaacaaaatgtaaataaacaattaaataaagtttctacaaaacagttccctctaggtatcaaaaacagaagtaaattattgttgaaagatcacaaagtaccgatccggcacttcatattgtaaggaaaaattcactaagtgcaataataagttttaatgagttttaccctgaaaccaaaattcaaacgaatgcattccagattataaggaaaattcactaagtgcaataataagttttgatgaattttaccctgaaaccgaaattcacaataatgcacttagtgaattgtaccataaattatctcagcaattagaagagttagagcctcacgtgacttctccagggctgggcagtaccgtattgagttcaaatcgatgaaaatgtcaaaatcttcaaaaaagtgcacttagtgagttttacctcttataggacgaaatgatgattagtttttgaaaaaatatgtaaagatacttttggtataaaacacaccgagaagtaatcaaaaacatttgataacaagtagccgtttaaaacggaataccttatggacatatttacagatgatgatagatgacgttagaaaccgactgaataataataataccaaacatgtgatacaaaaataaccttttaacacggaatgcatgtctatattgacagctgataacatttgatcaaaagtagtcatttagtagacagatgacgttaggactgactgaataataatacaataaaacatgtgaataaaaaataaccgtctaacacggaatgcatgcctatattacaagccgatgacagatgacgtcagactactttgaattttaatgtttatgtatcttttgaaaattattgtatttgtctacacaccaaggtgggattgtaacaaattaccaagattgtgtccatgatgtaccaaagtttctgctaacaatgacataaaatactttagttcgattgatatatccaaaaatagtttttatgtagaacaatagttttagaatgaactgagaatatattattttaatcacaaacattattttagtgccttacttttttaattcaaatatgtttgttttttttttaattcgttgactgccaatacggtatagaaagtaagcaaaggacaccgcacacatcttatggaaggtatggtgtcgctcaaattgaataaattggtatgaatggattcgtttcggattgacggtcgattcttatcattgcgccaactctgaattttcaataataagagcagaaattgatataaatcaatctgaaatcaaatgggtaggtacataagttagagagagaaaaaatattttaaaatacccaaattatgggtacttcataaatcttctcgggctattaagcatcttattataatagtttcactaatccgcttaggcccagcggggtttaagctgttttgaataacacccagagcaatagtgattataactgacacgtttatagactccaaaaatgtgatttcgataaactttaattgtaatttgcgccgtaattaatcataattaagagttggcgcaatgataagattgaccgtaatcaaaacgaatccactcgtataaatccttattgaatttgagcgacatacattttccacaagatgtgcgcgatgtcctttaaacaaaggaaagcaccataaaccgattacgtggtcctttataagtacataacacgtaccagcgaacaagggaatatattatcataggcacccatatcatacaattgagaatatttgaaaggaaaatcctcagacggattatggcctcgataagaatggacaaagaataaatgagaagaataatgaaccatgaactaagagacataatgaaaggagaagagatagttaggtttattaaagtgtagatactgagatgactaggacacatagagaaaaggaaaaacgacctattgattaagaagatcactagatggaaaccagaaattgaaagacaaaggggaagacccagatagaaatgggaggaccaggtcatgagagatatcaaagttctgaaagtgagaaacgggagggaactatgcacatagtaaagtgatttgaagaaaattgtatcgaaaactaagtcatataacaaactttgacaacatacaagtggaatgcggagttattcaccgcaataaacgaatcagagagctctacgtaagggcggccaacattccatccggattgaatagccttgttgatgcagaaatgacaataacttcgaggtggtcaaagaattttaataactaggagcaatgactaacgacaagaatgtagaacgggaagttgaaatgcgagtaatcgcgggaaatatatctttctttgcaattcaacatctaatgtggtcaaaatttaactggtgatgtatcagaatcaaaatatactaaaagagctgaagaaaatgagggcatatagtggaaaatagtgccacagaacccacaagactagatggcttttaattttaaaaacatgctataacaaattgataaatggattaacgaacttagtggggaatacatatgaagggtcaggtcagggggaagaacaatgaatgtcatcttgaagcattttcggtaaaatgagaaacaaagttacatatacaatgtttttcccccttgcgttcaatcgtgtgacgtgcttttgaaacgaatctcatccttatttccccttggccattcacaggttgatagtactctttctaagctaacatattgcacaaaaatcacaaaatgaccaaaaattaacattcatcgtttttctctctggcccttcatatagttagttattcttttaacgaaagatacaagtcccttaacatgtgtcttttaaatggctgatactttttgatttccctaaggtatgctttattgtcgtcatcaaagtggttaaggtcaacatatttaagtacttttggcttacctttatgaaaaatatttacgtgattaataatttgttttacaaaatccatatactttaaagtgtgcaatcgttttgcaaaagtgttcgtacttttaataaaactaaccaatttgatctgtttgtgtaacctactcgtcttttgtatcttatccatatcggccactattaaacccaccaggagattgttgaggataatggtcatagcaatgataaaaatggtcatgatgaatcttccaaaaattggataatcaataggttctagaacattttcattaaattcccctgtaaagtaaatcaaggtgtaaaagaggcttttgaatataccagcccaatctggcgatttgcctttactgtctttaaaaggtgtaacaatgtagaaacagagagcgaaacatacgaataatataaaataaaatccagtatactggaagaaatattttatggaactgaatatgatggtgtatttagtaaagaaaggaagctgtcctaacataacaaaaaatatgaacgttgcaataagcatggcaagaatggacgtgtaaatgttggggtatataatagtccataaacagctgacaatagttgtaacttctagaatatttgaaagatccatgaaatacttccacctgtacaagaaaaatagttgtaaaccttcttttattgcatgaaacccgattgaaaaataatacaaccagtttaaaaaagtgtaaaaatagttaaaacgtaaagagatcatataagcataaatatttataagaagaatagcgtaaaatatcaagtcagcataaaagaaccagcgaactttataccatttattcttaactagttgtattaataacggatggcaaagtaaatgttttttgtgttcgtcttttgccaaaaaatgtagtgtcctattttcgttataaaccttgtcatcatcttgtataatagtgtcatacttaaattttcttccgtttatggaatcatccaaatgcatttttaaaatatgttgatttattcgttctatcgccattttcttttcttcgattgtagcattagagtccttgttaaacgtaacattgattccattagatacatcatggttattatttttcgtttctttggttgaagtcagactcgcacccaagtgcaatacttgacagattatttcggaatcgtccaccctcttgtcattggcttcaagatttagctgatgaagaagcttatttaatatggcaagtcgtttggatgttaacttttcttgatttagtctaaccagatatactaacctatttagaagtaaatataagacgcaatatctatagaagtcgtagttatataagggcattttttgtttattgtacattttggatagaaccgggaagattccgttagagttgattttggtgaatttgtgttgcaaaagaacagctacgaaagggtaatatcctcgtaaggaagcatactccagaaggtttgttggaaattttcttgatgttttgaatggatcggcaccattatccagcaagtatatgatgcaccttaagtaacctttagacttgaaaaccgtaagcattggagtatcatttatatcataattagttagccgcttaagcttactgcgttcatcctgtaaatattccagaaatccttttcgcatacaaagctgtagcatgtttccgcacgtcgtgtaatcgtcatatccatcaaaatagtttgtattgttcattatactttctgcgttatactgtataaaattttctacatcacctgccttcaaaagattgaatttaatcactgcgggatcctcttgaacataggactgaggtagatcggtaaacaagttaagttttaggtattctcgaatagtttttcccgtttctatacacgtatctatatctatataatctattttcagtagcagctgtatcaagtgagtatatctatatcttacagctaaacagattggagtttcattccaaaagttagtgtgattaacttcagcaccatttgtaataagaagatcagcacaagctactatatcttttggttccggtccaataattgtagttagtttaggctcaataccgttatgtaatacgacctcaaaaggcgacaccgattttttatattgtaataagatatgtaaaggattttccgagaagtatgttaaagaattggtagattctggtatttgcttcaaaataactttaagtttttctacatctgcagatttggctacataatgtattggctcccacccgtaataaaggtcatctatataatcaattttgttgtatctagcttttattgcagaacatagtacgtccagagtttcgggggtgacacttttttcaatacatgctagaatcaaaattgttttcttattgtgtttgtcatatctgtagtttattaacccatcctcgggatgattttccaaatcttccgtgtagtacctaactgtttcttctattccttctttggagttctgtaggactttttccaatatttgagccttaaagtcaataatgctgcttcttgtatggtgaaagtgcttgatcatcttttgtctctcctcgggaattccatccacttctattactgcgtcacccatatcttaactttttttgattaaacaccttcacaacacaagtcacagcaccgcaaaatgttgatataaatttagaacattccctcacaaatcaccaacggagataaacatgaacaaagtgtggttttattattatttaagataagattagtcagtcgaatccacagcgcgacattataaaggttgtttgatttttatatcgataaacaatgaataaattcatttatggccactcgtagttaatgaaaatttctgaaatatggtggacgtgagtgtttctgccgacccgatcgtgctgtcaactgacgatcctgaaagacgagattgtgaactctgtggtataaaatatattcacataaatgacgtggagaaacatatcaacagtagaaagcataaactcaaccaaaggaaattaactgagccggaggcccagaacagatacaactgtaaggactgcaacaagaccttgaccagtgaagaattcttgcgaagacatgttgagagtaaatctcacaagaaagaagttgaaaaacatttacccaaaatcgaagaatataaggagaaaactcaatcaatatggatgcaaaaatggcagctacggtcaatgtcaattattgactctactatgtctccttccaaacttgacgaggcgaccgttacaataaatgaagcagaggaagaaacatttgatagaaagaaatataaagttcgcagtgacaacttggcgttcgacagacttgaaccatacgtatattccttggtgtcatacttgagtataaggttagcgttagacccaaatacaacagatttcaacatatcagtcaacaacagaaactggcccacatttggagacataatagtagaacaaacttttagtgataaatttgtgacttatgctatcagatgtaaaaatatatccgaaacaccccaaactatcgataatttaaaggatgcaaaaatatttctggaaaaagagtatacttatgttactcaacacaaaaattattcatcgacaaccttcttgatatttacgacatgcaatacaagctcgaaatttccagaacaaatagaaattaaaccagaattgattaaacatttcataaaaccttcggaggagacacccccacctataaaagtaaaaatatttccaatgacaaagaaaaattacatcttgaatgtgtctactgataacgacaacgtgtttttaatgtcgcctgaacacagcagcggcctacctccaatatatctttatactaatcaaaggtcatatccgcattcaattaatgatttaattaaaaagctgttccccaatttaaaacctgagtttgctagacaatacaaaaattatattgaaaactgggctgaaggtaaactaggaggaaattacatgttatccaaaaaagatgttatcttgaaaattggtgaactactgcttagtccatacactattttgccaaagctggtcaacttcaaatctggtaactttgacatttggaacaaggttattaataacactgacgtggttattataaaaaatgaaccgtttattttaagcaaactctgtgagccttttaaccagctaatcgagaactctttatcaaccgtagaagaaaaatttaaaatagatcctctaacaaaaattgtaactatgtctgacacagctttcaacaaaatatctgatcaccaaattaaagcttatcttttggaagaaggtttttgcagagattttcatcttacaatattgtataaagtgttttggaaagcagggaaaatatcacttttaatttcacttgaagataacgaagattgtaaagactatattttagatgttatttcttatatgaagcaggaaggtgtaaggaaaaaatttatgttaaaaacggagactccttttgaatttacatcaattccaaaaaacctaaaagttttttcatgtctcaacgatgtcaaagaactagttaatttagatcttttaaaaatctgggtggatagaaaatacagtctatctgcaaaagatatttgtaaaacagatccattctttctaaaatgggtgacacccagtgcctttttcgatatgattatggaaaggattactatgatcaaagaggagggtacaaaaatggatgtgcagactgattttaagattattttagatgacactgacagaaacaagataaagagttctctttatggtgcagagtcgattccagagagttgggatagattggcaggaattgatccggtattattttagacttgtcaaaatactttttggtatttttttatattttaatatacatactattttacct

SEQ ID NO: 1206 - DNA, 9998 bp, Diabrotica virgifera
  SmartBlast Evalue=6E-32; Info=Painless n=1 Tax=Tribolium castaneum RepID=D2A388_TRICA
aatctcacattttatccttttcgcgataatttgatgaaattttttgtaattttgaaaaaaattcataagtgcctcgaggaagggtgtagtaatgcgtaggtacttttttttgttaatgtatggatttggggagagccaattagctttaataattgttagaaataatatttctaacataacaagtaaataaaaatactatagaataaaaatttgttgtaaattcgtatttaaattcgtattgtgagatgaaattaacacgccattattcacgttacagaagtgagcgcgactactcccgggttaatacacaagaactacaccgaatagagttaacctatttggaagtaaagtattgttgacacctctcactttcattatggcaactctgacgtcagttgccaattgttactaaactatctctcacctgtctgtttagtttgtcatatacaatacttaattgttataattagttaatgaataatattatttaatctgaattttatgggagttaaacactgtgtaaaatttaaatacgcaagtagacattccaagttaccttgagacgatgtaatgctacatgctacccgaatcttcacttaattaatatggtttttgtccaatttcgtaaaaattttaaaccgaatttaccattaaaatctgaagaattcacaaatatttcgacgattcatagtaacatattaaaaatacatttttctacagctacagaaaccccattaaatagaaacatatatttaatacgttacaaatcgttacatcttagataaatttctacacttatattaaatgtaactatatagaaaatgttgcacggagtatttatataacaattgaagcctggtaggcctaagtttacgtatacaatcaaatgagcaataattgattctttccattttatagtgaagtacttaagatattactgtaatgttgtttcagaggtttgaggtatctatttagatgtagagttgaactaatgtgccaagttttgaaatcctacatatacatttttaatttatgacataaacgtttttaaaaatagctttaattcttttagctctttattgttacgaattaacaaaacttgcgtggatttgcaaaaatcaaaatgcactatttacgaaccctcagctaatctctaaacctaacaaagctcaaaactgggtatcggtaacaatattacatctaagatacccaaaaactttgaaaaattttgtttttaatctattttaatttgggaagtggtacacgacttaaaatggcagctacgattgtacaattgatacattgtttaaattatttggatttaatccacgttttgactactgggcacgaaaagtactgctctcgtttctttacatttatacaagattcaaatttacaacctccagttcgtagcttaaccatggtacatcggcgatagacttaaaatcagtatttattatcaaatttattttataaaagtattaccacttcccagcattattttacttattttttataaaatgttgtctacaggaaaactagttttgatctcgtctgttgaaattgaaagagcaattccacaatttggtgcacgccatagagactaaaccataagtgtgtcacttatttcacgttgcttagcaggcatgttcaaataattaaacaaatcgtcctattagaggtaaaactacactttttagaaagtggagaaaaatcgatttaaaggtacaaattgttttttaaattcacctgacttgaatattggaattttttaaaggcaactttaaagaataaataaaaacaaatatctaagccatgtttcgtcacaggaactatgatataatcaatattagatcaatttttgtaattgatgagtttttccatgaacacaatttttggatattgatatcctattagagataaaactcactaactacactttatacttgatgaatttttccatgaacacaattattggatattgagaagttaatgaatttgtctccataaactatcatgactgaagttatgattcaaaataaaagaaataagtaacaaaaaattatattacaaaatgttaaacctaaaacagattgtctaacctctaacggaactaaagctgagaatctggtaatggtaatgaatgataatgaacaaaatgtaaataaacaattaaataaagtttctacaaaacagttccctctaggtatcaaaaacagaagtaaattattgttgaaagatcacaaagtaccgatccggcacttcatattgtaaggaaaaattcactaagtgcaataataagttttaatgagttttaccctgaaaccaaaattcaaacgaatgcattccagattataaggaaaattcactaagtgcaataataagttttgatgaattttaccctgaaaccgaaattcacaataatgcacttagtgaattgtaccataaattatctcagcaattagaagagttagagcctcacgtgacttctccagggctgggcagtaccgtattgagttcaaatcgatgaaaatgtcaaaatcttcaaaaaagtgcacttagtgagttttacctcttataggacgaaatgatgattagtttttgaaaaaatatgtaaagatacttttggtataaaacacaccgagaagtaatcaaaaacatttgataacaagtagccgtttaaaacggaataccttatggacatatttacagatgatgatagatgacgttagaaaccgactgaataataataataccaaacatgtgatacaaaaataaccttttaacacggaatgcatgtctatattgacagctgataacatttgatcaaaagtagtcatttagtagacagatgacgttaggactgactgaataataatacaataaaacatgtgaataaaaaataaccgtctaacacggaatgcatgcctatattacaagccgatgacagatgacgtcagactactttgaattttaatgtttatgtatcttttgaaaattattgtatttgtctacacaccaaggtgggattgtaacaaattaccaagattgtgtccatgatgtaccaaagtttctgctaacaatgacataaaatactttagttcgattgatatatccaaaaatagtttttatgtagaacaatagttttagaatgaactgagaatatattattttaatcacaaacattattttagtgccttacttttttaattcaaatatgtttgttttttttttaattcgttgactgccaatacggtatagaaagtaagcaaaggacaccgcacacatcttatggaaggtatggtgtcgctcaaattgaataaattggtatgaatggattcgtttcggattgacggtcgattcttatcattgcgccaactctgaattttcaataataagagcagaaattgatataaatcaatctgaaatcaaatgggtaggtacataagttagagagagaaaaaatattttaaaatacccaaattatgggtacttcataaatcttctcgggctattaagcatcttattataatagtttcactaatccgcttaggcccagcggggtttaagctgttttgaataacacccagagcaatagtgattataactgacacgtttatagactccaaaaatgtgatttcgataaactttaattgtaatttgcgccgtaattaatcataattaagagttggcgcaatgataagattgaccgtaatcaaaacgaatccactcgtataaatccttattgaatttgagcgacatacattttccacaagatgtgcgcgatgtcctttaaacaaaggaaagcaccataaaccgattacgtggtcctttataagtacataacacgtaccagcgaacaagggaatatattatcataggcacccatatcatacaattgagaatatttgaaaggaaaatcctcagacggattatggcctcgataagaatggacaaagaataaatgagaagaataatgaaccatgaactaagagacataatgaaaggagaagagatagttaggtttattaaagtgtagatactgagatgactaggacacatagagaaaaggaaaaacgacctattgattaagaagatcactagatggaaaccagaaattgaaagacaaaggggaagacccagatagaaatgggaggaccaggtcatgagagatatcaaagttctgaaagtgagaaacgggagggaactatgcacatagtaaagtgatttgaagaaaattgtatcgaaaactaagtcatataacaaactttgacaacatacaagtggaatgcggagttattcaccgcaataaacgaatcagagagctctacgtaagggcggccaacattccatccggattgaatagccttgttgatgcagaaatgacaataacttcgaggtggtcaaagaattttaataactaggagcaatgactaacgacaagaatgtagaacgggaagttgaaatgcgagtaatcgcgggaaatatatctttctttgcaattcaacatctaatgtggtcaaaatttaactggtgatgtatcagaatcaaaatatactaaaagagctgaagaaaatgagggcatatagtggaaaatagtgccacagaacccacaagactagatggcttttaattttaaaaacatgctataacaaattgataaatggattaacgaacttagtggggaatacatatgaagggtcaggtcagggggaagaacaatgaatgtcatcttgaagcattttcggtaaaatgagaaacaaagttacatatacaatgtttttcccccttgcgttcaatcgtgtgacgtgcttttgaaacgaatctcatccttatttccccttggccattcacaggttgatagtactctttctaagctaacatattgcacaaaaatcacaaaatgaccaaaaattaacattcatcgtttttctctctggcccttcatatagttagttattcttttaacgaaagatacaagtcccttaacatgtgtcttttaaatggctgatactttttgatttccctaaggtatgctttattgtcgtcatcaaagtggttaaggtcaacatatttaagtacttttggcttacctttatgaaaaatatttacgtgattaataatttgttttacaaaatccatatactttaaagtgtgcaatcgttttgcaaaagtgttcgtacttttaataaaactaaccaatttgatctgtttgtgtaacctactcgtcttttgtatcttatccatatcggccactattaaacccaccaggagattgttgaggataatggtcatagcaatgataaaaatggtcatgatgaatcttccaaaaattggataatcaataggttctagaacattttcattaaattcccctgtaaagtaaatcaaggtgtaaaagaggcttttgaatataccagcccaatctggcgatttgcctttactgtctttaaaaggtgtaacaatgtagaaacagagagcgaaacatacgaataatataaaataaaatccagtatactggaagaaatattttatggaactgaatatgatggtgtatttagtaaagaaaggaagctgtcctaacataacaaaaaatatgaacgttgcaataagcatggcaagaatggacgtgtaaatgttggggtatataatagtccataaacagctgacaatagttgtaacttctagaatatttgaaagatccatgaaatacttccacctgtacaagaaaaatagttgtaaaccttcttttattgcatgaaacccgattgaaaaataatacaaccagtttaaaaaagtgtaaaaatagttaaaacgtaaagagatcatataagcataaatatttataagaagaatagcgtaaaatatcaagtcagcataaaagaaccagcgaactttataccatttattcttaactagttgtattaataacggatggcaaagtaaatgttttttgtgttcgtcttttgccaaaaaatgtagtgtcctattttcgttataaaccttgtcatcatcttgtataatagtgtcatacttaaattttcttccgtttatggaatcatccaaatgcatttttaaaatatgttgatttattcgttctatcgccattttcttttcttcgattgtagcattagagtccttgttaaacgtaacattgattccattagatacatcatggttattatttttcgtttctttggttgaagtcagactcgcacccaagtgcaatacttgacagattatttcggaatcgtccaccctcttgtcattggcttcaagatttagctgatgaagaagcttatttaatatggcaagtcgtttggatgttaacttttcttgatttagtctaaccagatatactaacctatttagaagtaaatataagacgcaatatctatagaagtcgtagttatataagggcattttttgtttattgtacattttggatagaaccgggaagattccgttagagttgattttggtgaatttgtgttgcaaaagaacagctacgaaagggtaatatcctcgtaaggaagcatactccagaaggtttgttggaaattttcttgatgttttgaatggatcggcaccattatccagcaagtatatgatgcaccttaagtaacctttagacttgaaaaccgtaagcattggagtatcatttatatcataattagttagccgcttaagcttactgcgttcatcctgtaaatattccagaaatccttttcgcatacaaagctgtagcatgtttccgcacgtcgtgtaatcgtcatatccatcaaaatagtttgtattgttcattatactttctgcgttatactgtataaaattttctacatcacctgccttcaaaagattgaatttaatcactgcgggatcctcttgaacataggactgaggtagatcggtaaacaagttaagttttaggtattctcgaatagtttttcccgtttctatacacgtatctatatctatataatctattttcagtagcagctgtatcaagtgagtatatctatatcttacagctaaacagattggagtttcattccaaaagttagtgtgattaacttcagcaccatttgtaataagaagatcagcacaagctactatatcttttggttccggtccaataattgtagttagtttaggctcaataccgttatgtaatacgacctcaaaaggcgacaccgattttttatattgtaataagatatgtaaaggattttccgagaagtatgttaaagaattggtagattctggtatttgcttcaaaataactttaagtttttctacatctgcagatttggctacataatgtattggctcccacccgtaataaaggtcatctatataatcaattttgttgtatctagcttttattgcagaacatagtacgtccagagtttcgggggtgacacttttttcaatacatgctagaatcaaaattgttttcttattgtgtttgtcatatctgtagtttattaacccatcctcgggatgattttccaaatcttccgtgtagtacctaactgtttcttctattccttctttggagttctgtaggactttttccaatatttgagccttaaagtcaataatgctgcttcttgtatggtgaaagtgcttgatcatcttttgtctctcctcgggaattccatccacttctattactgcgtcacccatatcttaactttttttgattaaacaccttcacaacacaagtcacagcaccgcaaaatgttgatataaatttagaacattccctcacaaatcaccaacggagataaacatgaacaaagtgtggttttattattatttaagataagattagtcagtcgaatccacagcgcgacattataaaggttgtttgatttttatatcgataaacaatgaataaattcatttatggccactcgtagttaatgaaaatttctgaaatatggtggacgtgagtgtttctgccgacccgatcgtgctgtcaactgacgatcctgaaagacgagattgtgaactctgtggtataaaatatattcacataaatgacgtggagaaacatatcaacagtagaaagcataaactcaaccaaaggaaattaactgagccggaggcccagaacagatacaactgtaaggactgcaacaagaccttgaccagtgaagaattcttgcgaagacatgttgagagtaaatctcacaagaaagaagttgaaaaacatttacccaaaatcgaagaatataaggagaaaactcaatcaatatggatgcaaaaatggcagctacggtcaatgtcaattattgactctactatgtctccttccaaacttgacgaggcgaccgttacaataaatgaagcagaggaagaaacatttgatagaaagaaatataaagttcgcagtgacaacttggcgttcgacagacttgaaccatacgtatattccttggtgtcatacttgagtataaggttagcgttagacccaaatacaacagatttcaacatatcagtcaacaacagaaactggcccacatttggagacataatagtagaacaaacttttagtgataaatctgtgacttacgctatcagatgtaaaaatatatctgaaacaccccaaactatcgataatttaaaggacgcaaaaatatttctcgaaaaggagtatacttatgttactcaacacaaaaattatttgtcaacatccttcttgatatttacgacatgcaatacaagctcgaaatttccagaacaaatagaaattaaaccagaattgattaaacatttcataaaaccttcggaggagacaccaccacctataaaagtgaaaatatttccaatgacaaagaaaaattacatcttgaatgtgtctactgataacgacaacgtgtttttaatgtcgcctgaacacagcagcggcctacctccaatatatctttatactaatcaaaggtcatatccgcattcaattaatgatttaattaaaaagctgttccccaatttaaaacctgagtttgctagacaatacaaaaattatattgaaaactgggctgaaggtaaactaggaggaaattacatgttatccaaaaaagatgttatcttgaaaattggtgaactactgcttagtccatacactattttgccaaagctggtcaacttcaaatctggtaactttgacatttggaacaaggttattaataacactgacgtggttattataaaaaatgaaccgtttattttaagcaaactctgtgagccttttaaccagctaatcgagaactctttatcaaccgtagaagaaaaatttaaaatagatcctctaacaaaaattgtaactatgtctgacacagctttcaacaaaatatctgatcaccaaattaaagcttatcttttggaagaaggtttttgcagagattttcatcttacaatattgtataaagtgttttggaaagcagggaaaatatcacttttaatttcacttgaagataacgaagattgtaaagactatattttagatgttatttcttatatgaagcaggaaggtgtaaggaaaaaatttatgttaaaaacggagactccttttgaatttacatcaattccaaaaaacctaaaagttttttcatgtctcaacgatgtcaaagaactagttaatttagatcttttaaaaatctgggtggatagaaaatacagtctatctgcaaaagatatttgtaaaacagatccattctttctaaaatgggtgacacccagtgcctttttcgatatgattatggaaaggattactatgatcaaagaggagggtacaaaaatggatgtgcagactgattttaagattattttagatgacactgacagaaacaagataaagagttctctttatggtgcagagtcgattccagagagttgggatagattggcaggaattgatccggtattattttagacttgtcaaaatactttttggtatttttttatattttaatatacatactattttacct

SEQ ID NO: 1207 - DNA, 7289 bp, Diabrotica virgifera
  SmartBlast Evalue=4E-32; Info=Painless n=1 Tax=Tribolium castaneum RepID=D2A388_TRICA
aattttagtgcatttgatatttttaattaaataaacctccaaagcactgtttttatttacagctcttacaacaaaagagacactcggacaattcaaaaaacaaaaccctagtagtgatacctcgaggacgatacaaaagtagtataaaacaaaatcagccctccaatttttccacagaattttttaaagttaggaaaaaaaacaagagttccattcaccccgtctaatgccatccaagcaaaaaaatgttgttaccgggacaacaccaaacgacatcaatacatgcacctacaaactgatgcaagaatcttgaaaatcagagcacaaataataaagttatagattgtcaaacttaatcaaaaaccctgggttgcggaattttgtgccggtgagtgtatatagagtgcatagattattgcatatgatattgaaaattacagaatatacaacatatctaatgagaattagaaactggaatgtgactatatttctccagtgaatactctctttgaagaaaggagaaagtcatgatggagctactacaaagtcataaaagattaaatcgggaatagaatggataaaggacatcgcacacatcttatggaaaatataatgtcactcaaattcaataaaatttataccgaatagattcgttttaaatcaacgatcaaatcttatcattgcgccaactctctattttcaataataagagcagaaattgatataaataaatctgaaatcaaatgggtaggtacataagttagagagagaaaaaatattttaaaatacccagattttcggtactccataaatcagcggattagtttcactaatccgcttaggcccagcgggatttaagctgttttgaatagcacccagagcaatagtaattgtaactgacagttttactgactccaaaaatgtgatttcgataaactttaattgcaatttgcgccgtaattaatcataattaagagttggcgcaatgataagattgaccgtaatccaaaacgaatccactcgtataaatccttattgaatttgagcgacactacattttccacaagatgtgcgcgatgtcctttaaacaaaggaaagcaccataaaccgattacgtggtcctttataagtacataacacgtaccagcgaacaagggaatatattatcataggcacccatatcatacaattgagaatatttgaaaggaaaatcctcagacggattatggcctcgataagaatggacaaagaataaatgagaagaataatgaaccatgaactaagagacataatgaaaggagaagagatagttaggtttattaaagtgtagatactgagatgactaggacacatagagaaaaggaaaaacgacctattgattaagaagatcactagatggaaaccagaaattgaaagacaaaggggaagacccagatagaaatgggaggaccaggtcatgagagatatcaaagttctgaaagtgagaaacgggagggaactatgcacatagtaaagtgatttgaagaaaattgtatcgaaaactaagtcatataacaaactttgacaacatacaagtggaatgcggagttattcaccgcaataaacgaatcagagagctctacgtaagggcggccaacattccatccggattgaatagccttgttgatgcagaaatgacaataacttcgaggtggtcaaagaattttaataactaggagcaatgactaacgacaagaatgtagaacgggaagttgaaatgcgagtaatcgcgggaaatatatctttctttgcaattcaacatctaatgtggtcaaaatttaactggtgatgtatcagaatcaaaatatactaaaagagctgaagaaaatgagggcatatagtggaaaatagtgccacagaacccacaagactagatggcttttaattttaaaaacatgctataacaaattgataaatggattaacgaacttagtggggaatacatatgaagggtcaggtcagggggaagaacaatgaatgtcatcttgaagcattttcggtaaaatgagaaacaaagttacatatacaatgtttttcccccttgcgttcaatcgtgtgacgtgcttttgaaacgaatctcatccttatttccccttggccattcacaggttgatagtactctttctaagctaacatattgcacaaaaatcacaaaatgaccaaaaattaacattcatcgtttttctctctggcccttcatatagttagttattcttttaacgaaagatacaagtcccttaacatgtgtcttttaaatggctgatactttttgatttccctaaggtatgctttattgtcgtcatcaaagtggttaaggtcaacatatttaagtacttttggcttacctttatgaaaaatatttacgtgattaataatttgttttacaaaatccatatactttaaagtgtgcaatcgttttgcaaaagtgttcgtacttttaataaaactaaccaatttgatctgtttgtgtaacctactcgtcttttgtatcttatccatatcggccactattaaacccaccaggagattgttgaggataatggtcatagcaatgataaaaatggtcatgatgaatcttccaaaaattggataatcaataggttctagaacattttcattaaattcccctgtaaagtaaatcaaggtgtaaaagaggcttttgaatataccagcccaatctggcgatttgcctttactgtctttaaaaggtgtaacaatgtagaaacagagagcgaaacatacgaataatataaaataaaatccagtatactggaagaaatattttatggaactgaatatgatggtgtatttagtaaagaaaggaagctgtcctaacataacaaaaaatatgaacgttgcaataagcatggcaagaatggacgtgtaaatgttggggtatataatagtccataaacagctgacaatagttgtaacttctagaatatttgaaagatccatgaaatacttccacctgtacaagaaaaatagttgtaaaccttcttttattgcatgaaacccgattgaaaaataatacaaccagtttaaaaaagtgtaaaaatagttaaaacgtaaagagatcatataagcataaatatttataagaagaatagcgtaaaatatcaagtcagcataaaagaaccagcgaactttataccatttattcttaactagttgtattaataacggatggcaaagtaaatgttttttgtgttcgtcttttgccaaaaaatgtagtgtcctattttcgttataaaccttgtcatcatcttgtataatagtgtcatacttaaattttcttccgtttatggaatcatccaaatgcatttttaaaatatgttgatttattcgttctatcgccattttcttttcttcgattgtagcattagagtccttgttaaacgtaacattgattccattagatacatcatggttattatttttcgtttctttggttgaagtcagactcgcacccaagtgcaatacttgacagattatttcggaatcgtccaccctcttgtcattggcttcaagatttagctgatgaagaagcttatttaatatggcaagtcgtttggatgttaacttttcttgatttagtctaaccagatatactaacctatttagaagtaaatataagacgcaatatctatagaagtcgtagttatataagggcattttttgtttattgtacattttggatagaaccgggaagattccgttagagttgattttggtgaatttgtgttgcaaaagaacagctacgaaagggtaatatcctcgtaaggaagcatactccagaaggtttgttggaaattttcttgatgttttgaatggatcggcaccattatccagcaagtatatgatgcaccttaagtaacctttagacttgaaaaccgtaagcattggagtatcatttatatcataattagttagccgcttaagcttactgcgttcatcctgtaaatattccagaaatccttttcgcatacaaagctgtagcatgtttccgcacgtcgtgtaatcgtcatatccatcaaaatagtttgtattgttcattatactttctgcgttatactgtataaaattttctacatcacctgccttcaaaagattgaatttaatcactgcgggatcctcttgaacataggactgaggtagatcggtaaacaagttaagttttaggtattctcgaatagtttttcccgtttctatacacgtatctatatctatataatctattttcagtagcagctgtatcaagtgagtatatctatatcttacagctaaacagattggagtttcattccaaaagttagtgtgattaacttcagcaccatttgtaataagaagatcagcacaagctactatatcttttggttccggtccaataattgtagttagtttaggctcaataccgttatgtaatacgacctcaaaaggcgacaccgattttttatattgtaataagatatgtaaaggattttccgagaagtatgttaaagaattggtagattctggtatttgcttcaaaataactttaagtttttctacatctgcagatttggctacataatgtattggctcccacccgtaataaaggtcatctatataatcaattttgttgtatctagcttttattgcagaacatagtacgtccagagtttcgggggtgacacttttttcaatacatgctagaatcaaaattgttttcttattgtgtttgtcatatctgtagtttattaacccatcctcgggatgattttccaaatcttccgtgtagtacctaactgtttcttctattccttctttggagttctgtaggactttttccaatatttgagccttaaagtcaataatgctgcttcttgtatggtgaaagtgcttgatcatcttttgtctctcctcgggaattccatccacttctattactgcgtcacccatatcttaactttttttgattaaacaccttcacaacacaagtcacagcaccgcaaaatgttgatataaatttagaacattccctcacaaatcaccaacggagataaacatgaacaaagtgtggttttattattatttaagataagattagtcagtcgaatccacagcgcgacattataaaggttgtttgatttttatatcgataaacaatgaataaattcatttatggccactcgtagttaatgaaaatttctgaaatatggtggacgtgagtgtttctgccgacccgatcgtgctgtcaactgacgatcctgaaagacgagattgtgaactctgtggtataaaatatattcacataaatgacgtggagaaacatatcaacagtagaaagcataaactcaaccaaaggaaattaactgagccggaggcccagaacagatacaactgtaaggactgcaacaagaccttgaccagtgaagaattcttgcgaagacatgttgagagtaaatctcacaagaaagaagttgaaaaacatttacccaaaatcgaagaatataaggagaaaactcaatcaatatggatgcaaaaatggcagctacggtcaatgtcaattattgactctactatgtctccttccaaacttgacgaggcgaccgttacaataaatgaagcagaggaagaaacatttgatagaaagaaatataaagttcgcagtgacaacttggcgttcgacagacttgaaccatacgtatattccttggtgtcatacttgagtataaggttagcgttagacccaaatacaacagatttcaacatatcagtcaacaacagaaactggcccacatttggagacataatagtagaacaaacttttagtgataaatttgtgacttatgctatcagatgtaaaaatatatccgaaacaccccaaactatcgataatttaaaggatgcaaaaatatttctggaaaaagagtatacttatgttactcaacacaaaaattattcatcgacaaccttcttgatatttacgacatgcaatacaagctcgaaatttccagaacaaatagaaattaaaccagaattgattaaacatttcataaaaccttcggaggagacacccccacctataaaagtaaaaatatttccaatgacaaagaaaaattacatcttgaatgtgtctactgataacgacaacgtgtttttaatgtcgcctgaacacagcagcggcctacctccaatatatctttatactaatcaaaggtcatatccgcattcaattaatgatttaattaaaaagctgttccccaatttaaaacctgagtttgctagacaatacaaaaattatattgaaaactgggctgaaggtaaactaggaggaaattacatgttatccaaaaaagatgttatcttgaaaattggtgaactactgcttagtccatacactattttgccaaagctggtcaacttcaaatctggtaactttgacatttggaacaaggttattaataacactgacgtggttattataaaaaatgaaccgtttattttaagcaaactctgtgagccttttaaccagctaatcgagaactctttatcaaccgtagaagaaaaatttaaaatagatcctctaacaaaaattgtaactatgtctgacacagctttcaacaaaatatctgatcaccaaattaaagcttatcttttggaagaaggtttttgcagagattttcatcttacaatattgtataaagtgttttggaaagcagggaaaatatcacttttaatttcacttgaagataacgaagattgtaaagactatattttagatgttatttcttatatgaagcaggaaggtgtaaggaaaaaatttatgttaaaaacggagactccttttgaatttacatcaattccaaaaaacctaaaagttttttcatgtctcaacgatgtcaaagaactagttaatttagatcttttaaaaatctgggtggatagaaaatacagtctatctgcaaaagatatttgtaaaacagatccattctttctaaaatgggtgacacccagtgcctttttcgatatgattatggaaaggattactatgatcaaagaggagggtacaaaaatggatgtgcagactgattttaagattattttagatgacactgacagaaacaagataaagagttctctttatggtgcagagtcgattccagagagttgggatagattggcaggaattgatccggtattattttagacttgtcaaaatactttttggtatttttttatattttaatatacatactattttacct

SEQ ID NO: 1208 - DNA, 7289 bp, Diabrotica virgifera
  SmartBlast Evalue=4E-32; Info=Painless n=1 Tax=Tribolium castaneum RepID=D2A388_TRICA
aattttagtgcatttgatatttttaattaaataaacctccaaagcactgtttttatttacagctcttacaacaaaagagacactcggacaattcaaaaaacaaaaccctagtagtgatacctcgaggacgatacaaaagtagtataaaacaaaatcagccctccaatttttccacagaattttttaaagttaggaaaaaaaacaagagttccattcaccccgtctaatgccatccaagcaaaaaaatgttgttaccgggacaacaccaaacgacatcaatacatgcacctacaaactgatgcaagaatcttgaaaatcagagcacaaataataaagttatagattgtcaaacttaatcaaaaaccctgggttgcggaattttgtgccggtgagtgtatatagagtgcatagattattgcatatgatattgaaaattacagaatatacaacatatctaatgagaattagaaactggaatgtgactatatttctccagtgaatactctctttgaagaaaggagaaagtcatgatggagctactacaaagtcataaaagattaaatcgggaatagaatggataaaggacatcgcacacatcttatggaaaatataatgtcactcaaattcaataaaatttataccgaatagattcgttttaaatcaacgatcaaatcttatcattgcgccaactctctattttcaataataagagcagaaattgatataaataaatctgaaatcaaatgggtaggtacataagttagagagagaaaaaatattttaaaatacccagattttcggtactccataaatcagcggattagtttcactaatccgcttaggcccagcgggatttaagctgttttgaatagcacccagagcaatagtaattgtaactgacagttttactgactccaaaaatgtgatttcgataaactttaattgcaatttgcgccgtaattaatcataattaagagttggcgcaatgataagattgaccgtaatccaaaacgaatccactcgtataaatccttattgaatttgagcgacactacattttccacaagatgtgcgcgatgtcctttaaacaaaggaaagcaccataaaccgattacgtggtcctttataagtacataacacgtaccagcgaacaagggaatatattatcataggcacccatatcatacaattgagaatatttgaaaggaaaatcctcagacggattatggcctcgataagaatggacaaagaataaatgagaagaataatgaaccatgaactaagagacataatgaaaggagaagagatagttaggtttattaaagtgtagatactgagatgactaggacacatagagaaaaggaaaaacgacctattgattaagaagatcactagatggaaaccagaaattgaaagacaaaggggaagacccagatagaaatgggaggaccaggtcatgagagatatcaaagttctgaaagtgagaaacgggagggaactatgcacatagtaaagtgatttgaagaaaattgtatcgaaaactaagtcatataacaaactttgacaacatacaagtggaatgcggagttattcaccgcaataaacgaatcagagagctctacgtaagggcggccaacattccatccggattgaatagccttgttgatgcagaaatgacaataacttcgaggtggtcaaagaattttaataactaggagcaatgactaacgacaagaatgtagaacgggaagttgaaatgcgagtaatcgcgggaaatatatctttctttgcaattcaacatctaatgtggtcaaaatttaactggtgatgtatcagaatcaaaatatactaaaagagctgaagaaaatgagggcatatagtggaaaatagtgccacagaacccacaagactagatggcttttaattttaaaaacatgctataacaaattgataaatggattaacgaacttagtggggaatacatatgaagggtcaggtcagggggaagaacaatgaatgtcatcttgaagcattttcggtaaaatgagaaacaaagttacatatacaatgtttttcccccttgcgttcaatcgtgtgacgtgcttttgaaacgaatctcatccttatttccccttggccattcacaggttgatagtactctttctaagctaacatattgcacaaaaatcacaaaatgaccaaaaattaacattcatcgtttttctctctggcccttcatatagttagttattcttttaacgaaagatacaagtcccttaacatgtgtcttttaaatggctgatactttttgatttccctaaggtatgctttattgtcgtcatcaaagtggttaaggtcaacatatttaagtacttttggcttacctttatgaaaaatatttacgtgattaataatttgttttacaaaatccatatactttaaagtgtgcaatcgttttgcaaaagtgttcgtacttttaataaaactaaccaatttgatctgtttgtgtaacctactcgtcttttgtatcttatccatatcggccactattaaacccaccaggagattgttgaggataatggtcatagcaatgataaaaatggtcatgatgaatcttccaaaaattggataatcaataggttctagaacattttcattaaattcccctgtaaagtaaatcaaggtgtaaaagaggcttttgaatataccagcccaatctggcgatttgcctttactgtctttaaaaggtgtaacaatgtagaaacagagagcgaaacatacgaataatataaaataaaatccagtatactggaagaaatattttatggaactgaatatgatggtgtatttagtaaagaaaggaagctgtcctaacataacaaaaaatatgaacgttgcaataagcatggcaagaatggacgtgtaaatgttggggtatataatagtccataaacagctgacaatagttgtaacttctagaatatttgaaagatccatgaaatacttccacctgtacaagaaaaatagttgtaaaccttcttttattgcatgaaacccgattgaaaaataatacaaccagtttaaaaaagtgtaaaaatagttaaaacgtaaagagatcatataagcataaatatttataagaagaatagcgtaaaatatcaagtcagcataaaagaaccagcgaactttataccatttattcttaactagttgtattaataacggatggcaaagtaaatgttttttgtgttcgtcttttgccaaaaaatgtagtgtcctattttcgttataaaccttgtcatcatcttgtataatagtgtcatacttaaattttcttccgtttatggaatcatccaaatgcatttttaaaatatgttgatttattcgttctatcgccattttcttttcttcgattgtagcattagagtccttgttaaacgtaacattgattccattagatacatcatggttattatttttcgtttctttggttgaagtcagactcgcacccaagtgcaatacttgacagattatttcggaatcgtccaccctcttgtcattggcttcaagatttagctgatgaagaagcttatttaatatggcaagtcgtttggatgttaacttttcttgatttagtctaaccagatatactaacctatttagaagtaaatataagacgcaatatctatagaagtcgtagttatataagggcattttttgtttattgtacattttggatagaaccgggaagattccgttagagttgattttggtgaatttgtgttgcaaaagaacagctacgaaagggtaatatcctcgtaaggaagcatactccagaaggtttgttggaaattttcttgatgttttgaatggatcggcaccattatccagcaagtatatgatgcaccttaagtaacctttagacttgaaaaccgtaagcattggagtatcatttatatcataattagttagccgcttaagcttactgcgttcatcctgtaaatattccagaaatccttttcgcatacaaagctgtagcatgtttccgcacgtcgtgtaatcgtcatatccatcaaaatagtttgtattgttcattatactttctgcgttatactgtataaaattttctacatcacctgccttcaaaagattgaatttaatcactgcgggatcctcttgaacataggactgaggtagatcggtaaacaagttaagttttaggtattctcgaatagtttttcccgtttctatacacgtatctatatctatataatctattttcagtagcagctgtatcaagtgagtatatctatatcttacagctaaacagattggagtttcattccaaaagttagtgtgattaacttcagcaccatttgtaataagaagatcagcacaagctactatatcttttggttccggtccaataattgtagttagtttaggctcaataccgttatgtaatacgacctcaaaaggcgacaccgattttttatattgtaataagatatgtaaaggattttccgagaagtatgttaaagaattggtagattctggtatttgcttcaaaataactttaagtttttctacatctgcagatttggctacataatgtattggctcccacccgtaataaaggtcatctatataatcaattttgttgtatctagcttttattgcagaacatagtacgtccagagtttcgggggtgacacttttttcaatacatgctagaatcaaaattgttttcttattgtgtttgtcatatctgtagtttattaacccatcctcgggatgattttccaaatcttccgtgtagtacctaactgtttcttctattccttctttggagttctgtaggactttttccaatatttgagccttaaagtcaataatgctgcttcttgtatggtgaaagtgcttgatcatcttttgtctctcctcgggaattccatccacttctattactgcgtcacccatatcttaactttttttgattaaacaccttcacaacacaagtcacagcaccgcaaaatgttgatataaatttagaacattccctcacaaatcaccaacggagataaacatgaacaaagtgtggttttattattatttaagataagattagtcagtcgaatccacagcgcgacattataaaggttgtttgatttttatatcgataaacaatgaataaattcatttatggccactcgtagttaatgaaaatttctgaaatatggtggacgtgagtgtttctgccgacccgatcgtgctgtcaactgacgatcctgaaagacgagattgtgaactctgtggtataaaatatattcacataaatgacgtggagaaacatatcaacagtagaaagcataaactcaaccaaaggaaattaactgagccggaggcccagaacagatacaactgtaaggactgcaacaagaccttgaccagtgaagaattcttgcgaagacatgttgagagtaaatctcacaagaaagaagttgaaaaacatttacccaaaatcgaagaatataaggagaaaactcaatcaatatggatgcaaaaatggcagctacggtcaatgtcaattattgactctactatgtctccttccaaacttgacgaggcgaccgttacaataaatgaagcagaggaagaaacatttgatagaaagaaatataaagttcgcagtgacaacttggcgttcgacagacttgaaccatacgtatattccttggtgtcatacttgagtataaggttagcgttagacccaaatacaacagatttcaacatatcagtcaacaacagaaactggcccacatttggagacataatagtagaacaaacttttagtgataaatctgtgacttacgctatcagatgtaaaaatatatctgaaacaccccaaactatcgataatttaaaggacgcaaaaatatttctcgaaaaggagtatacttatgttactcaacacaaaaattatttgtcaacatccttcttgatatttacgacatgcaatacaagctcgaaatttccagaacaaatagaaattaaaccagaattgattaaacatttcataaaaccttcggaggagacaccaccacctataaaagtgaaaatatttccaatgacaaagaaaaattacatcttgaatgtgtctactgataacgacaacgtgtttttaatgtcgcctgaacacagcagcggcctacctccaatatatctttatactaatcaaaggtcatatccgcattcaattaatgatttaattaaaaagctgttccccaatttaaaacctgagtttgctagacaatacaaaaattatattgaaaactgggctgaaggtaaactaggaggaaattacatgttatccaaaaaagatgttatcttgaaaattggtgaactactgcttagtccatacactattttgccaaagctggtcaacttcaaatctggtaactttgacatttggaacaaggttattaataacactgacgtggttattataaaaaatgaaccgtttattttaagcaaactctgtgagccttttaaccagctaatcgagaactctttatcaaccgtagaagaaaaatttaaaatagatcctctaacaaaaattgtaactatgtctgacacagctttcaacaaaatatctgatcaccaaattaaagcttatcttttggaagaaggtttttgcagagattttcatcttacaatattgtataaagtgttttggaaagcagggaaaatatcacttttaatttcacttgaagataacgaagattgtaaagactatattttagatgttatttcttatatgaagcaggaaggtgtaaggaaaaaatttatgttaaaaacggagactccttttgaatttacatcaattccaaaaaacctaaaagttttttcatgtctcaacgatgtcaaagaactagttaatttagatcttttaaaaatctgggtggatagaaaatacagtctatctgcaaaagatatttgtaaaacagatccattctttctaaaatgggtgacacccagtgcctttttcgatatgattatggaaaggattactatgatcaaagaggagggtacaaaaatggatgtgcagactgattttaagattattttagatgacactgacagaaacaagataaagagttctctttatggtgcagagtcgattccagagagttgggatagattggcaggaattgatccggtattattttagacttgtcaaaatactttttggtatttttttatattttaatatacatactattttacct

SEQ ID NO: 1209 - DNA, 6845 bp, Diabrotica virgifera
  SmartBlast Evalue=4E-32; Info=Painless n=1 Tax=Tribolium castaneum RepID=D2A388_TRICA
aaaagtaagattgttttgccttcgcattgcaactgaataataaaatggtatacattttattttatggtctactttttgttcagaaagtttttaaaaaatttgaactttttttttcctttggacaacgcacacatcttatggaaggtatggtgtcgctcggattcgataaaatttgtatgaatatattcgtttcagtttagcggtcaattcttatcattgcgccaactcctaattttcaataataagagcagaaattgatataaatcaatctgaaatcaaatgggtaggtacataagttagagagagaaaaaatattttaaaatacccaaattatgggtacttcataaatcttctcgggctattaagcatcttattataatagtttcactaatccgcttaggcccagcggggtttaagctgttttgaataacacccagagcaatagtgattataactgacacgtttatagactccaaaaatgtgatttcgataaactttaattgtaatttgcgccgtaattaatcataattaagagttggcgcaatgataagattgaccgtaatcaaaacgaatccactcgtataaatccttattgaatttgagcgacatacattttccacaagatgtgcgcgatgtcctttaaacaaaggaaagcaccataaaccgattacgtggtcctttataagtacataacacgtaccagcgaacaagggaatatattatcataggcacccatatcatacaattgagaatatttgaaaggaaaatcctcagacggattatggcctcgataagaatggacaaagaataaatgagaagaataatgaaccatgaactaagagacataatgaaaggagaagagatagttaggtttattaaagtgtagatactgagatgactaggacacatagagaaaaggaaaaacgacctattgattaagaagatcactagatggaaaccagaaattgaaagacaaaggggaagacccagatagaaatgggaggaccaggtcatgagagatatcaaagttctgaaagtgagaaacgggagggaactatgcacatagtaaagtgatttgaagaaaattgtatcgaaaactaagtcatataacaaactttgacaacatacaagtggaatgcggagttattcaccgcaataaacgaatcagagagctctacgtaagggcggccaacattccatccggattgaatagccttgttgatgcagaaatgacaataacttcgaggtggtcaaagaattttaataactaggagcaatgactaacgacaagaatgtagaacgggaagttgaaatgcgagtaatcgcgggaaatatatctttctttgcaattcaacatctaatgtggtcaaaatttaactggtgatgtatcagaatcaaaatatactaaaagagctgaagaaaatgagggcatatagtggaaaatagtgccacagaacccacaagactagatggcttttaattttaaaaacatgctataacaaattgataaatggattaacgaacttagtggggaatacatatgaagggtcaggtcagggggaagaacaatgaatgtcatcttgaagcattttcggtaaaatgagaaacaaagttacatatacaatgtttttcccccttgcgttcaatcgtgtgacgtgcttttgaaacgaatctcatccttatttccccttggccattcacaggttgatagtactctttctaagctaacatattgcacaaaaatcacaaaatgaccaaaaattaacattcatcgtttttctctctggcccttcatatagttagttattcttttaacgaaagatacaagtcccttaacatgtgtcttttaaatggctgatactttttgatttccctaaggtatgctttattgtcgtcatcaaagtggttaaggtcaacatatttaagtacttttggcttacctttatgaaaaatatttacgtgattaataatttgttttacaaaatccatatactttaaagtgtgcaatcgttttgcaaaagtgttcgtacttttaataaaactaaccaatttgatctgtttgtgtaacctactcgtcttttgtatcttatccatatcggccactattaaacccaccaggagattgttgaggataatggtcatagcaatgataaaaatggtcatgatgaatcttccaaaaattggataatcaataggttctagaacattttcattaaattcccctgtaaagtaaatcaaggtgtaaaagaggcttttgaatataccagcccaatctggcgatttgcctttactgtctttaaaaggtgtaacaatgtagaaacagagagcgaaacatacgaataatataaaataaaatccagtatactggaagaaatattttatggaactgaatatgatggtgtatttagtaaagaaaggaagctgtcctaacataacaaaaaatatgaacgttgcaataagcatggcaagaatggacgtgtaaatgttggggtatataatagtccataaacagctgacaatagttgtaacttctagaatatttgaaagatccatgaaatacttccacctgtacaagaaaaatagttgtaaaccttcttttattgcatgaaacccgattgaaaaataatacaaccagtttaaaaaagtgtaaaaatagttaaaacgtaaagagatcatataagcataaatatttataagaagaatagcgtaaaatatcaagtcagcataaaagaaccagcgaactttataccatttattcttaactagttgtattaataacggatggcaaagtaaatgttttttgtgttcgtcttttgccaaaaaatgtagtgtcctattttcgttataaaccttgtcatcatcttgtataatagtgtcatacttaaattttcttccgtttatggaatcatccaaatgcatttttaaaatatgttgatttattcgttctatcgccattttcttttcttcgattgtagcattagagtccttgttaaacgtaacattgattccattagatacatcatggttattatttttcgtttctttggttgaagtcagactcgcacccaagtgcaatacttgacagattatttcggaatcgtccaccctcttgtcattggcttcaagatttagctgatgaagaagcttatttaatatggcaagtcgtttggatgttaacttttcttgatttagtctaaccagatatactaacctatttagaagtaaatataagacgcaatatctatagaagtcgtagttatataagggcattttttgtttattgtacattttggatagaaccgggaagattccgttagagttgattttggtgaatttgtgttgcaaaagaacagctacgaaagggtaatatcctcgtaaggaagcatactccagaaggtttgttggaaattttcttgatgttttgaatggatcggcaccattatccagcaagtatatgatgcaccttaagtaacctttagacttgaaaaccgtaagcattggagtatcatttatatcataattagttagccgcttaagcttactgcgttcatcctgtaaatattccagaaatccttttcgcatacaaagctgtagcatgtttccgcacgtcgtgtaatcgtcatatccatcaaaatagtttgtattgttcattatactttctgcgttatactgtataaaattttctacatcacctgccttcaaaagattgaatttaatcactgcgggatcctcttgaacataggactgaggtagatcggtaaacaagttaagttttaggtattctcgaatagtttttcccgtttctatacacgtatctatatctatataatctattttcagtagcagctgtatcaagtgagtatatctatatcttacagctaaacagattggagtttcattccaaaagttagtgtgattaacttcagcaccatttgtaataagaagatcagcacaagctactatatcttttggttccggtccaataattgtagttagtttaggctcaataccgttatgtaatacgacctcaaaaggcgacaccgattttttatattgtaataagatatgtaaaggattttccgagaagtatgttaaagaattggtagattctggtatttgcttcaaaataactttaagtttttctacatctgcagatttggctacataatgtattggctcccacccgtaataaaggtcatctatataatcaattttgttgtatctagcttttattgcagaacatagtacgtccagagtttcgggggtgacacttttttcaatacatgctagaatcaaaattgttttcttattgtgtttgtcatatctgtagtttattaacccatcctcgggatgattttccaaatcttccgtgtagtacctaactgtttcttctattccttctttggagttctgtaggactttttccaatatttgagccttaaagtcaataatgctgcttcttgtatggtgaaagtgcttgatcatcttttgtctctcctcgggaattccatccacttctattactgcgtcacccatatcttaactttttttgattaaacaccttcacaacacaagtcacagcaccgcaaaatgttgatataaatttagaacattccctcacaaatcaccaacggagataaacatgaacaaagtgtggttttattattatttaagataagattagtcagtcgaatccacagcgcgacattataaaggttgtttgatttttatatcgataaacaatgaataaattcatttatggccactcgtagttaatgaaaatttctgaaatatggtggacgtgagtgtttctgccgacccgatcgtgctgtcaactgacgatcctgaaagacgagattgtgaactctgtggtataaaatatattcacataaatgacgtggagaaacatatcaacagtagaaagcataaactcaaccaaaggaaattaactgagccggaggcccagaacagatacaactgtaaggactgcaacaagaccttgaccagtgaagaattcttgcgaagacatgttgagagtaaatctcacaagaaagaagttgaaaaacatttacccaaaatcgaagaatataaggagaaaactcaatcaatatggatgcaaaaatggcagctacggtcaatgtcaattattgactctactatgtctccttccaaacttgacgaggcgaccgttacaataaatgaagcagaggaagaaacatttgatagaaagaaatataaagttcgcagtgacaacttggcgttcgacagacttgaaccatacgtatattccttggtgtcatacttgagtataaggttagcgttagacccaaatacaacagatttcaacatatcagtcaacaacagaaactggcccacatttggagacataatagtagaacaaacttttagtgataaatttgtgacttatgctatcagatgtaaaaatatatccgaaacaccccaaactatcgataatttaaaggatgcaaaaatatttctggaaaaagagtatacttatgttactcaacacaaaaattattcatcgacaaccttcttgatatttacgacatgcaatacaagctcgaaatttccagaacaaatagaaattaaaccagaattgattaaacatttcataaaaccttcggaggagacacccccacctataaaagtaaaaatatttccaatgacaaagaaaaattacatcttgaatgtgtctactgataacgacaacgtgtttttaatgtcgcctgaacacagcagcggcctacctccaatatatctttatactaatcaaaggtcatatccgcattcaattaatgatttaattaaaaagctgttccccaatttaaaacctgagtttgctagacaatacaaaaattatattgaaaactgggctgaaggtaaactaggaggaaattacatgttatccaaaaaagatgttatcttgaaaattggtgaactactgcttagtccatacactattttgccaaagctggtcaacttcaaatctggtaactttgacatttggaacaaggttattaataacactgacgtggttattataaaaaatgaaccgtttattttaagcaaactctgtgagccttttaaccagctaatcgagaactctttatcaaccgtagaagaaaaatttaaaatagatcctctaacaaaaattgtaactatgtctgacacagctttcaacaaaatatctgatcaccaaattaaagcttatcttttggaagaaggtttttgcagagattttcatcttacaatattgtataaagtgttttggaaagcagggaaaatatcacttttaatttcacttgaagataacgaagattgtaaagactatattttagatgttatttcttatatgaagcaggaaggtgtaaggaaaaaatttatgttaaaaacggagactccttttgaatttacatcaattccaaaaaacctaaaagttttttcatgtctcaacgatgtcaaagaactagttaatttagatcttttaaaaatctgggtggatagaaaatacagtctatctgcaaaagatatttgtaaaacagatccattctttctaaaatgggtgacacccagtgcctttttcgatatgattatggaaaggattactatgatcaaagaggagggtacaaaaatggatgtgcagactgattttaagattattttagatgacactgacagaaacaagataaagagttctctttatggtgcagagtcgattccagagagttgggatagattggcaggaattgatccggtattattttagacttgtcaaaatactttttggtatttttttatattttaatatacatactattttacct

SEQ ID NO: 1210 - DNA, 6845 bp, Diabrotica virgifera
  SmartBlast Evalue=4E-32; Info=Painless n=1 Tax=Tribolium castaneum RepID=D2A388_TRICA
aaaagtaagattgttttgccttcgcattgcaactgaataataaaatggtatacattttattttatggtctactttttgttcagaaagtttttaaaaaatttgaactttttttttcctttggacaacgcacacatcttatggaaggtatggtgtcgctcggattcgataaaatttgtatgaatatattcgtttcagtttagcggtcaattcttatcattgcgccaactcctaattttcaataataagagcagaaattgatataaatcaatctgaaatcaaatgggtaggtacataagttagagagagaaaaaatattttaaaatacccaaattatgggtacttcataaatcttctcgggctattaagcatcttattataatagtttcactaatccgcttaggcccagcggggtttaagctgttttgaataacacccagagcaatagtgattataactgacacgtttatagactccaaaaatgtgatttcgataaactttaattgtaatttgcgccgtaattaatcataattaagagttggcgcaatgataagattgaccgtaatcaaaacgaatccactcgtataaatccttattgaatttgagcgacatacattttccacaagatgtgcgcgatgtcctttaaacaaaggaaagcaccataaaccgattacgtggtcctttataagtacataacacgtaccagcgaacaagggaatatattatcataggcacccatatcatacaattgagaatatttgaaaggaaaatcctcagacggattatggcctcgataagaatggacaaagaataaatgagaagaataatgaaccatgaactaagagacataatgaaaggagaagagatagttaggtttattaaagtgtagatactgagatgactaggacacatagagaaaaggaaaaacgacctattgattaagaagatcactagatggaaaccagaaattgaaagacaaaggggaagacccagatagaaatgggaggaccaggtcatgagagatatcaaagttctgaaagtgagaaacgggagggaactatgcacatagtaaagtgatttgaagaaaattgtatcgaaaactaagtcatataacaaactttgacaacatacaagtggaatgcggagttattcaccgcaataaacgaatcagagagctctacgtaagggcggccaacattccatccggattgaatagccttgttgatgcagaaatgacaataacttcgaggtggtcaaagaattttaataactaggagcaatgactaacgacaagaatgtagaacgggaagttgaaatgcgagtaatcgcgggaaatatatctttctttgcaattcaacatctaatgtggtcaaaatttaactggtgatgtatcagaatcaaaatatactaaaagagctgaagaaaatgagggcatatagtggaaaatagtgccacagaacccacaagactagatggcttttaattttaaaaacatgctataacaaattgataaatggattaacgaacttagtggggaatacatatgaagggtcaggtcagggggaagaacaatgaatgtcatcttgaagcattttcggtaaaatgagaaacaaagttacatatacaatgtttttcccccttgcgttcaatcgtgtgacgtgcttttgaaacgaatctcatccttatttccccttggccattcacaggttgatagtactctttctaagctaacatattgcacaaaaatcacaaaatgaccaaaaattaacattcatcgtttttctctctggcccttcatatagttagttattcttttaacgaaagatacaagtcccttaacatgtgtcttttaaatggctgatactttttgatttccctaaggtatgctttattgtcgtcatcaaagtggttaaggtcaacatatttaagtacttttggcttacctttatgaaaaatatttacgtgattaataatttgttttacaaaatccatatactttaaagtgtgcaatcgttttgcaaaagtgttcgtacttttaataaaactaaccaatttgatctgtttgtgtaacctactcgtcttttgtatcttatccatatcggccactattaaacccaccaggagattgttgaggataatggtcatagcaatgataaaaatggtcatgatgaatcttccaaaaattggataatcaataggttctagaacattttcattaaattcccctgtaaagtaaatcaaggtgtaaaagaggcttttgaatataccagcccaatctggcgatttgcctttactgtctttaaaaggtgtaacaatgtagaaacagagagcgaaacatacgaataatataaaataaaatccagtatactggaagaaatattttatggaactgaatatgatggtgtatttagtaaagaaaggaagctgtcctaacataacaaaaaatatgaacgttgcaataagcatggcaagaatggacgtgtaaatgttggggtatataatagtccataaacagctgacaatagttgtaacttctagaatatttgaaagatccatgaaatacttccacctgtacaagaaaaatagttgtaaaccttcttttattgcatgaaacccgattgaaaaataatacaaccagtttaaaaaagtgtaaaaatagttaaaacgtaaagagatcatataagcataaatatttataagaagaatagcgtaaaatatcaagtcagcataaaagaaccagcgaactttataccatttattcttaactagttgtattaataacggatggcaaagtaaatgttttttgtgttcgtcttttgccaaaaaatgtagtgtcctattttcgttataaaccttgtcatcatcttgtataatagtgtcatacttaaattttcttccgtttatggaatcatccaaatgcatttttaaaatatgttgatttattcgttctatcgccattttcttttcttcgattgtagcattagagtccttgttaaacgtaacattgattccattagatacatcatggttattatttttcgtttctttggttgaagtcagactcgcacccaagtgcaatacttgacagattatttcggaatcgtccaccctcttgtcattggcttcaagatttagctgatgaagaagcttatttaatatggcaagtcgtttggatgttaacttttcttgatttagtctaaccagatatactaacctatttagaagtaaatataagacgcaatatctatagaagtcgtagttatataagggcattttttgtttattgtacattttggatagaaccgggaagattccgttagagttgattttggtgaatttgtgttgcaaaagaacagctacgaaagggtaatatcctcgtaaggaagcatactccagaaggtttgttggaaattttcttgatgttttgaatggatcggcaccattatccagcaagtatatgatgcaccttaagtaacctttagacttgaaaaccgtaagcattggagtatcatttatatcataattagttagccgcttaagcttactgcgttcatcctgtaaatattccagaaatccttttcgcatacaaagctgtagcatgtttccgcacgtcgtgtaatcgtcatatccatcaaaatagtttgtattgttcattatactttctgcgttatactgtataaaattttctacatcacctgccttcaaaagattgaatttaatcactgcgggatcctcttgaacataggactgaggtagatcggtaaacaagttaagttttaggtattctcgaatagtttttcccgtttctatacacgtatctatatctatataatctattttcagtagcagctgtatcaagtgagtatatctatatcttacagctaaacagattggagtttcattccaaaagttagtgtgattaacttcagcaccatttgtaataagaagatcagcacaagctactatatcttttggttccggtccaataattgtagttagtttaggctcaataccgttatgtaatacgacctcaaaaggcgacaccgattttttatattgtaataagatatgtaaaggattttccgagaagtatgttaaagaattggtagattctggtatttgcttcaaaataactttaagtttttctacatctgcagatttggctacataatgtattggctcccacccgtaataaaggtcatctatataatcaattttgttgtatctagcttttattgcagaacatagtacgtccagagtttcgggggtgacacttttttcaatacatgctagaatcaaaattgttttcttattgtgtttgtcatatctgtagtttattaacccatcctcgggatgattttccaaatcttccgtgtagtacctaactgtttcttctattccttctttggagttctgtaggactttttccaatatttgagccttaaagtcaataatgctgcttcttgtatggtgaaagtgcttgatcatcttttgtctctcctcgggaattccatccacttctattactgcgtcacccatatcttaactttttttgattaaacaccttcacaacacaagtcacagcaccgcaaaatgttgatataaatttagaacattccctcacaaatcaccaacggagataaacatgaacaaagtgtggttttattattatttaagataagattagtcagtcgaatccacagcgcgacattataaaggttgtttgatttttatatcgataaacaatgaataaattcatttatggccactcgtagttaatgaaaatttctgaaatatggtggacgtgagtgtttctgccgacccgatcgtgctgtcaactgacgatcctgaaagacgagattgtgaactctgtggtataaaatatattcacataaatgacgtggagaaacatatcaacagtagaaagcataaactcaaccaaaggaaattaactgagccggaggcccagaacagatacaactgtaaggactgcaacaagaccttgaccagtgaagaattcttgcgaagacatgttgagagtaaatctcacaagaaagaagttgaaaaacatttacccaaaatcgaagaatataaggagaaaactcaatcaatatggatgcaaaaatggcagctacggtcaatgtcaattattgactctactatgtctccttccaaacttgacgaggcgaccgttacaataaatgaagcagaggaagaaacatttgatagaaagaaatataaagttcgcagtgacaacttggcgttcgacagacttgaaccatacgtatattccttggtgtcatacttgagtataaggttagcgttagacccaaatacaacagatttcaacatatcagtcaacaacagaaactggcccacatttggagacataatagtagaacaaacttttagtgataaatctgtgacttacgctatcagatgtaaaaatatatctgaaacaccccaaactatcgataatttaaaggacgcaaaaatatttctcgaaaaggagtatacttatgttactcaacacaaaaattatttgtcaacatccttcttgatatttacgacatgcaatacaagctcgaaatttccagaacaaatagaaattaaaccagaattgattaaacatttcataaaaccttcggaggagacaccaccacctataaaagtgaaaatatttccaatgacaaagaaaaattacatcttgaatgtgtctactgataacgacaacgtgtttttaatgtcgcctgaacacagcagcggcctacctccaatatatctttatactaatcaaaggtcatatccgcattcaattaatgatttaattaaaaagctgttccccaatttaaaacctgagtttgctagacaatacaaaaattatattgaaaactgggctgaaggtaaactaggaggaaattacatgttatccaaaaaagatgttatcttgaaaattggtgaactactgcttagtccatacactattttgccaaagctggtcaacttcaaatctggtaactttgacatttggaacaaggttattaataacactgacgtggttattataaaaaatgaaccgtttattttaagcaaactctgtgagccttttaaccagctaatcgagaactctttatcaaccgtagaagaaaaatttaaaatagatcctctaacaaaaattgtaactatgtctgacacagctttcaacaaaatatctgatcaccaaattaaagcttatcttttggaagaaggtttttgcagagattttcatcttacaatattgtataaagtgttttggaaagcagggaaaatatcacttttaatttcacttgaagataacgaagattgtaaagactatattttagatgttatttcttatatgaagcaggaaggtgtaaggaaaaaatttatgttaaaaacggagactccttttgaatttacatcaattccaaaaaacctaaaagttttttcatgtctcaacgatgtcaaagaactagttaatttagatcttttaaaaatctgggtggatagaaaatacagtctatctgcaaaagatatttgtaaaacagatccattctttctaaaatgggtgacacccagtgcctttttcgatatgattatggaaaggattactatgatcaaagaggagggtacaaaaatggatgtgcagactgattttaagattattttagatgacactgacagaaacaagataaagagttctctttatggtgcagagtcgattccagagagttgggatagattggcaggaattgatccggtattattttagacttgtcaaaatactttttggtatttttttatattttaatatacatactattttacct

SEQ ID NO: 1211 - DNA, 3241 bp, Diabrotica virgifera
aatctcacattttatccttttcgcgataatttgatgaaattttttgtaattttgaaaaaaattcataagtgcctcgaggaagggtgtagtaatgcgtaggtacttttttttgttaatgtatggatttggggagagccaattagctttaataattgttagaaataatatttctaacataacaagtaaataaaaatactatagaataaaaatttgttgtaaattcgtatttaaattcgtattgtgagatgaaattaacacgccattattcacgttacagaagtgagcgcgactactcccgggttaatacacaagaactacaccgaatagagttaacctatttggaagtaaagtattgttgacacctctcactttcattatggcaactctgacgtcagttgccaattgttactaaactatctctcacctgtctgtttagtttgtcatatacaatacttaattgttataattagttaatgaataatattatttaatctgaattttatgggagttaaacactgtgtaaaatttaaatacgcaagtagacattccaagttaccttgagacgatgtaatgctacatgctacccgaatcttcacttaattaatatggtttttgtccaatttcgtaaaaattttaaaccgaatttaccattaaaatctgaagaattcacaaatatttcgacgattcatagtaacatattaaaaatacatttttctacagctacagaaaccccattaaatagaaacatatatttaatacgttacaaatcgttacatcttagataaatttctacacttatattaaatgtaactatatagaaaatgttgcacggagtatttatataacaattgaagcctggtaggcctaagtttacgtatacaatcaaatgagcaataattgattctttccattttatagtgaagtacttaagatattactgtaatgttgtttcagaggtttgaggtatctatttagatgtagagttgaactaatgtgccaagttttgaaatcctacatatacatttttaatttatgacataaacgtttttaaaaatagctttaattcttttagctctttattgttacgaattaacaaaacttgcgtggatttgcaaaaatcaaaatgcactatttacgaaccctcagctaatctctaaacctaacaaagctcaaaactgggtatcggtaacaatattacatctaagatacccaaaaactttgaaaaattttgtttttaatctattttaatttgggaagtggtacacgacttaaaatggcagctacgattgtacaattgatacattgtttaaattatttggatttaatccacgttttgactactgggcacgaaaagtactgctctcgtttctttacatttatacaagattcaaatttacaacctccagttcgtagcttaaccatggtacatcggcgatagacttaaaatcagtatttattatcaaatttattttataaaagtattaccacttcccagcattattttacttattttttataaaatgttgtctacaggaaaactagttttgatctcgtctgttgaaattgaaagagcaattccacaatttggtgcacgccatagagactaaaccataagtgtgtcacttatttcacgttgcttagcaggcatgttcaaataattaaacaaatcgtcctattagaggtaaaactacactttttagaaagtggagaaaaatcgatttaaaggtacaaattgttttttaaattcacctgacttgaatattggaattttttaaaggcaactttaaagaataaataaaaacaaatatctaagccatgtttcgtcacaggaactatgatataatcaatattagatcaatttttgtaattgatgagtttttccatgaacacaatttttggatattgatatcctattagagataaaactcactaactacactttatacttgatgaatttttccatgaacacaattattggatattgagaagttaatgaatttgtctccataaactatcatgactgaagttatgattcaaaataaaagaaataagtaacaaaaaattatattacaaaatgttaaacctaaaacagattgtctaacctctaacggaactaaagctgagaatctggtaatggtaatgaatgataatgaacaaaatgtaaataaacaattaaataaagtttctacaaaacaaaactctaggtataaaaaatcacatgcgataggaacagaagtaaattattgttgaaatatcaacatccatttttatagtttctaatttattgtttgaaagatcactaagtaccgatccggcactccagattgtaaggaaaaattcactaagtgcaataataagttttaatgaataaaacgggataatacccgaaggtttgctgtataccatctaagtggttaaataaaatttaacttaaagtaaaacactccttggtgtagttggtatattttaataaaaatttaaaaatccaaaaggattacgttcagatcgttttcggacttaccagtccatcatcagtgaactctctgtccttgctaaatagccacaatgccaaacactggttaagttgtatgttccaactacatagtaaagattgtaaaagaatatggcctaaattggatgccaatggattacttccagcaacacgatgctctactacattacattaaaagattttttatgtgattaggtcttcattgaaccacgtttagtctgtcaatgatccaagttttgatgaattttaccctgaaaccgaaattcacaataatgcacttagtgaattgtaccataaattatctcagcaattagaagagttagagcctcacgtgacttctccagggctgggcagtaccgtattgagttcaaatcgatgaaaatgtcaaaatcttcaaaaaagtgcacttagtgagttttacctcttataggacgaaatattgactgaattcttttgaaatgttttttgtgaatcactgtttataacaatataatcattgtttataatccaaccaagctattttgaccagtctgtaatttccgtcttctttgaatattcttaaaatatttatatcgtaaaatgttttcatttataaacatgattttttagtgctgcccaaacaagctcttcttcttctttagggggccgtcttcttagcgatggctggcgataagttctgcaaagtctgaaaagtctaatcctgttcattttttgatgttgcgcacccag

SEQ ID NO: 1212 - DNA, 1541 bp, Diabrotica virgifera
  SmartBlast Evalue=1E-107; Info=Serpin peptidase inhibitor 3 n=1 Tax=Tribolium castaneum RepID=D7EJE0_TRICA
gctcaggaaatactaagtgatctctaatacatatacatattactcatactcgctaaatctataacatactctaaccataacaataataataaagtattataaataatagtataaagtaataataaatttttagtgattgtcaaaaaatcaagattccaaggggttataaatacgtccattgaacaaaatttgatgcgattctccccgatttccatgttgtaacaaaataacgaacggatgatccactaaaaactctttcggctccattggaatcgccatcgatcttgctttcatgatcatagcagtagctgctgctgcttcagcgccttcctcgttaacctcgatgaacgctttgtgaatcactttgctaacttttagtggttcaggactcttaagcatgccagtgaagtccgcgtgatcactgaatatgacgccaagacccaactttgtgagaggctcctccaaattgatggtggtttcaattttaaacttgggcaaagcaacgataacgtctggcctaaacatattttccgtgatcttagttagatcagtattagccaatttaagttccaactcattaataccgtttctcttattaggcaatatcacgatcatgcttagatctttgttggtataaggtaattccaagactttggcatctaatgcttcatcgtttttaaagaagaacttctttttagtatgcatcatttgaacatctatcgaatcattgtcgtttaagtagaacttctcggtttttgtgtcctcaggtttgaacggtgcagcccatttgcctttgaaatatatggcgttgaccaaaaccaagcgggtgtcatcattcaaatcatcaggttgtattaaatccttaattttatcttttgttttttcttcaacccaggtgttaatagtcttagcagctgctgctgattgggagaaatcaacattttgaacttcggaaaagaaatgattgacaactttgtctttaaactcatctttcaatgcatattcatttttgacataaaccttattagccataagtagagttacatcctcaacggaattcagcttaagcatagctgctttgtagccctcggccaacgttgcgatatcagcaacttggagggcgctagtcaatgctttttgtgttttccctccagatccttgtgaagccaaagataaaattgcgtgtatacttataggtgagaaaaatatatttttgcctttttcttgggctagtatctggtaagcgtttctggtaaacagtccattaccctggaggacggcagtcaagtgtttgttttcttcagccatgacgaaagttgaagttgacagtagaaaaaatgtaacgaagactaaaaataactgtgaaccgtatacgctgttagaaaccaaatgaataaaatttcgtgcactcacactcaatcgatctatacggctcccgaaatcttcaaccttgaccagtcccataaaagctatacgaaaacgggccacaaaaactgttttgggctcgctataaaaaatctaatgtcaagtgtacaatctca

SEQ ID NO: 1213 - DNA, 1355 bp, Diabrotica virgifera
  SmartBlast Evalue=1E-103; Info=Serpin peptidase inhibitor 3 n=1 Tax=Tribolium castaneum RepID=D7EJE0_TRICA
gttgctttgttgggactcagcatctctgtattgcagaattataataaacggatgatcagcaatgaactcttctggatctaattccaagaccatgcaatatgccacagctatcactgcagtagctgctgctgcttcagcgccttcctcgttaacctcgatgaacgctttgtgaatcactttgctaacttttagtggttcaggactcttaagcatgccagtgaagtccgcgtgatcactgaatatgacgccaagacccaactttgtgagaggctcctccaaattgatggtggtttcaattttaaacttgggcaaagcaacgataacgtctggcctaaacatattttccgtgatcttagttagatcagtattagccaatttaagttccaactcattaataccgtttctcttattaggcaatatcacgatcatgcttagatctttgttggtataaggtaattccaagactttggcatctaatgcttcatcgtttttaaagaagaacttctttttagtatgcatcatttgaacatctatcgaatcattgtcgtttaagtagaacttctcggtttttgtgtcctcaggtttgaacggtgcagcccatttgcctttgaaatatatggcgttgaccaaaaccaagcgggtgtcatcattcaaatcatcaggttgtattaaatccttaattttatcttttgttttttcttcaacccaggtgttaatagtcttagcagctgctgctgattgggagaaatcaacattttgaacttcggaaaagaaatgattgacaactttgtctttaaactcatctttcaatgcatattcatttttgacataaaccttattagccataagtagagttacatcctcaacggaattcagcttaagcatagctgctttgtagccctcggccaacgttgcgatatcagcaacttggagggcgctagtcaatgctttttgtgttttccctccagatccttgtgaagccaaagataaaattgcgtgtatacttataggtgagaaaaatatatttttgcctttttcttgggctagtatctggtaagcgtttctggtaaacagtccattaccctggaggacggcagtcaagtgtttgttttcttcagccatgacgaaagttgaagttgacagtagaaaaaatgtaacgaagactaaaaataactgtgaaccgtatacgctgttagaaaccaaatgaataaaatttcgtgcactcacactcaatcgatctatacggctcccgaaatcttcaaccttgaccagtcccataaaagctatacgaaaacgggccacaaaaactgttttgggctcgctataaaaaatctaatgtcaagtgtacaatctca

SEQ ID NO: 1214 - DNA, 5223 bp, Diabrotica virgifera
  SmartBlast Evalue=1E-106; Info=Serpin peptidase inhibitor 3 n=1 Tax=Tribolium castaneum RepID=D7EJE0_TRICA
taattattgttgtgtattgtgattgtgttagaaacatgccaaatcaaaatgcgtttttaatagattattttcaactttcaacaagaacgaaataatgggtcccctttaccattaactgcaaagaagtacctacgttaaagaatttagaatacctatataattttgtattacaaatgttttcttacgcattttagcatgttgtagattgcagtagttttaaaatattaaatgatatattttattgattatatctacactatgataatattgttgttaattaatatatttcggcaaccaatgaaaaccgattgacataattaaccagaataaataattatagatattatttgtacagtaaagaaaaacaaataaaaatctttctgacaagcaatgacataaatgtagccatgatgaaaagtcaccttctaatgttttggcgtcttggcgagaattgcgtcttgaaaaccataacgacccgaagcacttatcgtcagacattgtcctaaggaaagccgccctagagacaatacacaccaattacccagcgcatgagtggctccacatctactgcgatggctcctcgatgccggactcgggaagaacaggagcaggatatgtctcaacgttctccaaaggctccatagctgtgggtgcccctctcaccaactatctatctatctaatcagccctaaacatccatccttggatataggcctcctcttccttcttccatgcctctctatcttgggcaatttgcatccattttgacccagtgtgtttcttcaggtcatctgaccatcgcatctgtggccttcccctttttcgtttgtggttccatggtctccaatgtattaccatcttagtccatctttcatccttctgccgtagggtgtgtccggcgaacttccatttaagctttgctacttgggtagagacgtctttcacttttgttttgttacggatccattcgtttcttttcctgtctgataatttaatgttcagcatttgtctttccatggctctttctgtctttgctattttttccatattctcttttgtaaagtcatgccaagggtgggcgttggctagtaagtaagtatgttttggcgtcagaaattttgactgtcagtaagcgtgcctttgtaggaaaaagactgtaggtcaggtgataaaaagaacgctataccgaagttcacattcagatggcagcgttacagagatacgcctgtgctttctatatggcagaaataactacaatgttgtcgtaaaaacaaagtatttaatcgtaccgtatgggctggctcctataaaagaattataatttggaaaatatttatgaatgtaaaatggaaaaatactacacttttgtgaactttttttttgagtttggccctgcttattaacaagtagcaaaatttacagtggaagtagaattggcaacactgttatcctacatccgcacactgcctgccgtctgaatgtgacttccattttagtagaaaaactaataaattaaaaattgtgataaaagtgatatataaaattcaagtcaatcatctgcaataattctgtgctctgtgcgtaaagagagttaagtcctaaaacactgttttgagataatcgcgtttaaagtttgcaataatatgttcgagttatacttttggagtttttacaggaatgtatcactcaaatttctttcaaatgcttttgatcagttaaataattatttctctccataacataatcgataaatattagaaataaaccatataactattataaaaaaaaaataatatactttttcttatatggacttaatacaatttgcgcaattatcatgaacttcacgcttaacgcataatacaaactattacaaaaagcataaaaaataatatttaataataataatggtgattctcaagaccaaaacagcaggttttaataaataataataaacataaaccaagtaagtaataatacaataaataaacaaaaactgatatgggaaacaaatcaatatttttttaagttttattttttagtatttacattttttcccttcttcttgacagtctgtttcgttgatttattttcttggcaactgtcatttttttagtggttttcacatttttttcatcaggaatgtcatcagtgtaggtatcttctgctttatgtgaggttattaagtctttatagaattggttaaatactggtgaaatgtatggaagcaggttaaggaggtcactttttttcttcataggtatagaattttgtcctgggtaacgtaaactagggtccattttgctaatggttttttgcctcttcttttgaaaataatgcattgaaacggttgattaagctctaaagatttcttatagtaaattattccaggctcgtttttgacaaaattcagccactgtacatctccccagctaaaattgtttccaacaacattttcttttcgctgctgaaggtcggtttttagcagcttagtcatagaaactatcttgatttatctccttcaccacgaaaggcgtttctcgtctgtgatttgtataatttcggcccactcatgaggatggtgaaacatccagcaaaagctgttttatttttttcaaaaagggcgtgtgatgtatcacactcaatgtgcgtgtggctagatccaaaaaatttatgattaatctcttccaaattaggagaattttgcaggactaccatgcacatagctgctacatgagtattcttgttttgaccatcacatgtatctgagtacctacatggtcaaacttttcaaacttgataatttgtatacatatgagccaacttcattagcacctctgccagctacaccttcatgtcaaaggtaacagtaagttgtgccatcactgcagtcgtagactgttagattaaaagtccaaagttggcgtttgtcgaatgctacagaactgtgcacgagtggagtggaaaagcattgctgcatgtcaaatgtcaaagttttggttgaatcgttaacttttgaatttcctttgtctaactttttagactcatacgtacaccccgcgttattcttcatattatagagtcactatcgtcaaatgtggaaaaacaaaattgttcccacaatctcgtcttaagtagtggctttcataagctgggattccaattaaaaattgatttactttattcctttcttcttcagttataaaggtttttctaaaattttctcttttatccggttggattacgcccaaagaagatgatcttttcttttgaataatagttataggtatctcccactttcttcaaatacttttagtcatcatcatcattctctttgccttatccctatgcggggtcggtttccctaattgcatttctccacacaattctatcctgggtcatatcattctccaaatacttttagtaaaataactaaatcagctttaaaggcgcgcggtgtacagagagtcaacgtaataactgtatattattagtgtacagtgtgttaagtcgaaaaattgtgggacttaacacactgtacactacttctgtcttcctgtttcttaaataatgtttagtgtaaagagtgatatgtctaatttcaggacttaacacgctttacacagttagtattgattgtttttcatttgtgtaaaatgaatatttcagtttaggaatggaattaaacttgacaaattatacacacatgtagatatcatactctaacatacagatagtgcattggctaattttgaccatttttggacttaactcactttacgcacagagcacagaattttgatctaattaaattgattaatatgtatacttaaataattgtcggattttctaactttccaacacaaatcatactgttgccagagcttatattgtcgtgtttcagcataattataaatggatgatcagcaataacttgtttgggtggatcaggaactcttagattgagaatttttgacaatattccagtagctgctgctgcttcagcgccttcctcgttaacctcgatgaacgctttgtgaatcactttgctaacttttagtggttcaggactcttaagcatgccagtgaagtccgcgtgatcactgaatatgacgccaagacccaactttgtgagaggctcctccaaattgatggtggtttcaattttaaacttgggcaaagcaacgataacgtctggcctaaacatattttccgtgatcttagttagatcagtattagccaatttaagttccaactcattaataccgtttctcttattaggcaatatcacgatcatgcttagatctttgttggtataaggtaattccaagactttggcatctaatgcttcatcgtttttaaagaagaacttctttttagtatgcatcatttgaacatctatcgaatcattgtcgtttaagtagaacttctcggtttttgtgtcctcaggtttgaacggtgcagcccatttgcctttgaaatatatggcgttgaccaaaaccaagcgggtgtcatcattcaaatcatcaggttgtattaaatccttaattttatcttttgttttttcttcaacccaggtgttaatagtcttagcagctgctgctgattgggagaaatcaacattttgaacttcggaaaagaaatgattgacaactttgtctttaaactcatctttcaatgcatattcatttttgacataaaccttattagccataagtagagttacatcctcaacggaattcagcttaagcatagctgctttgtagccctcggccaacgttgcgatatcagcaacttggagggcgctagtcaatgctttttgtgttttccctccagatccttgtgaagccaaagataaaattgcgtgtatacttataggtgagaaaaatatatttttgcctttttcttgggctagtatctggtaagcgtttctggtaaacagtccattaccctggaggacggcagtcaagtgtttgttttcttcagccatgacgaaagttgaagttgacagtagaaaaaatgtaacgaagactaaaaataactgtgaaccgtatacgctgttagaaaccaaatgaataaaatttcgtgcactcacactcaatcgatctatacggctcccgaaatcttcaaccttgaccagtcccataaaagctatacgaaaacgggccacaaaaactgttttgggctcgctataaaaaatctaatgtcaagtgtacaatctca

SEQ ID NO: 1215 - DNA, 5144 bp, Diabrotica virgifera
  SmartBlast Evalue=1E-106; Info=Serpin peptidase inhibitor 3 n=1 Tax=Tribolium castaneum RepID=D7EJE0_TRICA
taattattgttgtgtattgtgattgtgttagaaacatgccaaatcaaaatgcgtttttaatagattattttcaactttcaacaagaacgaaataatgggtcccctttaccattaactgcaaagaagtacctacgttaaagaatttagaatacctatataattttgtattacaaatgttttcttacgcattttagcatgttgtagattgcagtagttttaaaatattaaatgatatattttattgattatatctacactatgataatattgttgttaattaatatatttcggcaaccaatgaaaaccgattgacataattaaccagaataaataattatagatattatttgtacagtaaagaaaaacaaataaaaatctttctgacaagcaatgacataaatgtagccatgatgaaaagtcaccttctaatgttttggcgtcttggcgagaattgcgtcttgaaaaccataacgacccgaagcacttatcgtcagacattgtcctaaggaaagccgccctagagacaatacacaccaattacccagcgcatgagtggctccacatctactgcgatggctcctcgatgccggactcgggaagaacaggagcaggatatgtctcaacgttctccaaaggctccatagctgtgggtgcccctctcaccaactatctatctatctaatcagccctaaacatccatccttggatataggcctcctcttccttcttccatgcctctctatcttgggcaatttgcatccattttgacccagtgtgtttcttcaggtcatctgaccatcgcatctgtggccttcccctttttcgtttgtggttccatggtctccaatgtattaccatcttagtccatctttcatccttctgccgtagggtgtgtccggcgaacttccatttaagctttgctacttgggtagagacgtctttcacttttgttttgttacggatccattcgtttcttttcctgtctgataatttaatgttcagcatttgtctttccatggctctttctgtctttgctattttttccatattctcttttgtaaagtcatgccaagggtgggcgttggctagtaagtaagtatgttttggcgtcagaaattttgactgtcagtaagcgtgcctttgtaggaaaaagactgtaggtcaggtgataaaaagaacgctataccgaagttcacattcagatggcagcgttacagagatacgcctgtgctttctatatggcagaaataactacaatgttgtcgtaaaaacaaagtatttaatcgtaccgtatgggctggctcctataaaagaattataatttggaaaatatttatgaatgtaaaatggaaaaatactacacttttgtgaactttttttttgagtttggccctgcttattaacaagtagcaaaatttacagtggaagtagaattggcaacactgttatcctacatccgcacactgcctgccgtctgaatgtgacttccattttagtagaaaaactaataaattaaaaattgtgataaaagtgatatataaaattcaagtcaatcatctgcaataattctgtgctctgtgcgtaaagagagttaagtcctaaaacactgttttgagataatcgcgtttaaagtttgcaataatatgttcgagttatacttttggagtttttacaggaatgtatcactcaaatttctttcaaatgcttttgatcagttaaataattatttctctccataacataatcgataaatattagaaataaaccatataactattataaaaaaaaaataatatactttttcttatatggacttaatacaatttgcgcaattatcatgaacttcacgcttaacgcataatacaaactattacaaaaagcataaaaaataatatttaataataataatggtgattctcaagaccaaaacagcaggttttaataaataataataaacataaaccaagtaagtaataatacaataaataaacaaaaactgatatgggaaacaaatcaatatttttttaagttttattttttagtatttacattttttcccttcttcttgacagtctgtttcgttgatttattttcttggcaactgtcatttttttagtggttttcacatttttttcatcaggaatgtcatcagtgtaggtatcttctgctttatgtgaggttattaagtctttatagaattggttaaatactggtgaaatgtatggaagcaggttaaggaggtcactttttttcttcataggtatagaattttgtcctgggtaacgtaaaccagggtccattttgctaatggtttctttgcctctttttttgaaactaatgcattgaaacggttgattaaggtctaaggtattcttatagtaaattattctaggctcgtttttaacaaaattcagccactgtacatctcatactgtttttaacaaaattcaaagggcgtttcttaccagtgctttgtatgagttcggcccaatcatgaggatggtggaacgtccagcaaaagctgttttatttttttcaataaggacgtgtgatgtatcacactcaatgtgcgtgtggctagatccaaaaaatttatgattaatctcttccaaattaggagaattttgcaggactaccatgcacatagctgctacatgagtattcttgttttgaccatcacatgtatctgagtacctacatggtcaaacttttcaaacttgataatttgtatacatatgagccaacttcattagcacctctgccagctacaccttcatgtcaaaggtaacagtaagttgtgccatcactgcagtcgtagactgttagattaaaagtccaaagttggcgtttgtcgaatgctacagaactgtgcacgagtggagtggaaaagcattgctgcatgtcaaatgtcaaagttttggttgaatcgttaacttttgaatttcctttgtctaactttttagactcatacgtacaccccgcgttattcttcatattatagagtcactatcgtcaaatgtggaaaaacaaaattgttcccacaatctcgtcttaagtagtggctttcataagctgggattccaattaaaaattgatttactttattcctttcttcttcagttataaaggtttttctaaaattttctcttttatccggttggattacgcccaaagaagatgatcttttcttttgaataatagttataggtatctcccactttcttcaaatacttttagtcatcatcatcattctctttgccttatccctatgcggggtcggtttccctaattgcatttctccacacaattctatcctgggtcatatcattctccaaatacttttagtaaaataactaaatcagctttaaaggcgcgcggtgtacagagagtcaacgtaataactgtatattattagtgtacagtgtgttaagtcgaaaaattgtgggacttaacacactgtacactacttctgtcttcctgtttcttaaataatgtttagtgtaaagagtgatatgtctaatttcaggacttaacacgctttacacagttagtattgattgtttttcatttgtgtaaaatgaatatttcagtttaggaatggaattaaacttgacaaattatacacacatgtagatatcatactctaacatacagatagtgcattggctaattttgaccatttttggacttaactcactttacgcacagagcacagaattttgatctaattaaattgattaatatgtatacttaaataattgtcggattttctaactttccaacacaaatcatactgttgccagagcttatattgtcgtgtttcagcataattataaatggatgatcagcaataacttgtttgggtggatcaggaactcttagattgagaatttttgacaatattccagtagctgctgctgcttcagcgccttcctcgttaacctcgatgaacgctttgtgaatcactttgctaacttttagtggttcaggactcttaagcatgccagtgaagtccgcgtgatcactgaatatgacgccaagacccaactttgtgagaggctcctccaaattgatggtggtttcaattttaaacttgggcaaagcaacgataacgtctggcctaaacatattttccgtgatcttagttagatcagtattagccaatttaagttccaactcattaataccgtttctcttattaggcaatatcacgatcatgcttagatctttgttggtataaggtaattccaagactttggcatctaatgcttcatcgtttttaaagaagaacttctttttagtatgcatcatttgaacatctatcgaatcattgtcgtttaagtagaacttctcggtttttgtgtcctcaggtttgaacggtgcagcccatttgcctttgaaatatatggcgttgaccaaaaccaagcgggtgtcatcattcaaatcatcaggttgtattaaatccttaattttatcttttgttttttcttcaacccaggtgttaatagtcttagcagctgctgctgattgggagaaatcaacattttgaacttcggaaaagaaatgattgacaactttgtctttaaactcatctttcaatgcatattcatttttgacataaaccttattagccataagtagagttacatcctcaacggaattcagcttaagcatagctgctttgtagccctcggccaacgttgcgatatcagcaacttggagggcgctagtcaatgctttttgtgttttccctccagatccttgtgaagccaaagataaaattgcgtgtatacttataggtgagaaaaatatatttttgcctttttcttgggctagtatctggtaagcgtttctggtaaacagtccattaccctggaggacggcagtcaagtgtttgttttcttcagccatgacgaaagttgaagttgacagtagaaaaaatgtaacgaagactaaaaataactgtgaaccgtatacgctgttagaaaccaaatgaataaaatttcgtgcactcacactcaatcgatctatacggctcccgaaatcttcaaccttgaccagtcccataaaagctatacgaaaacgggccacaaaaactgttttgggctcgctataaaaaatctaatgtcaagtgtacaatctca

SEQ ID NO: 1216 - DNA, 4306 bp, Diabrotica virgifera
  SmartBlast Evalue=1E-30; Info=Endonuclease-reverse transcriptase n=1 Tax=Bombyx mori RepID=D7F158_BOMMO
taattattgttgtgtattgtgattgtgttagaaacatgccaaatcaaaatgcgtttttaatagattattttcaactttcaacaagaacgaaataatgggtcccctttaccattaactgcaaagaagtacctacgttaaagaatttagaatacctatataattttgtattacaaatgttttcttacgcattttagcatgttgtagattgcagtagttttaaaatattaaatgatatattttattgattatatctacactatgataatattgttgttaattaatatatttcggcaaccaatgaaaaccgattgacataattaaccagaataaataattatagatattatttgtacagtaaagaaaaacaaataaaaatctttctgacaagcaatgacataaatgtagccatgatgaaaagtcaccttctaatgttttggcgtcttggcgagaattgcgtcttgaaaaccataacgacccgaagcacttatcgtcagacattgtcctaaggaaagccgccctagagacaatacacaccaattacccagcgcatgagtggctccacatctactgcgatggctcctcgatgccggactcgggaagaacaggagcaggatatgtctcaacgttctccaaaggctccatagctgtgggtgcccctctcaccaactatctatctatctaatcagccctaaacatccatccttggatataggcctcctcttccttcttccatgcctctctatcttgggcaatttgcatccattttgacccagtgtgtttcttcaggtcatctgaccatcgcatctgtggccttcccctttttcgtttgtggttccatggtctccaatgtattaccatcttagtccatctttcatccttctgccgtagggtgtgtccggcgaacttccatttaagctttgctacttgggtagagacgtctttcacttttgttttgttacggatccattcgtttcttttcctgtctgataatttaatgttcagcatttgtctttccatggctctttctgtctttgctattttttccatattctcttttgtaaagtcatgccaagggtgggcgttggctagtaagtaagtatgttttggcgtcagaaattttgactgtcagtaagcgtgcctttgtaggaaaaagactgtaggtcaggtgataaaaagaacgctataccgaagttcacattcagatggcagcgttacagagatacgcctgtgctttctatatggcagaaataactacaatgttgtcgtaaaaacaaagtatttaatcgtaccgtatgggctggctcctataaaagaattataatttggaaaatatttatgaatgtaaaatggaaaaatactacacttttgtgaactttttttttgagtttggccctgcttattaacaagtagcaaaatttacagtggaagtagaattggcaacactgttatcctacatccgcacactgcctgccgtctgaatgtgacttccattttagtagaaaaactaataaattaaaaattgtgataaaagtgatatataaaattcaagtcaatcatctgcaataattctgtgctctgtgcgtaaagagagttaagtcctaaaacactgttttgagataatcgcgtttaaagtttgcaataatatgttcgagttatacttttggagtttttacaggaatgtatcactcaaatttctttcaaatgcttttgatcagttaaataattatttctctccataacataatcgataaatattagaaataaaccatataactattataaaaaaaaaataatatactttttcttatatggacttaatacaatttgcgcaattatcatgaacttcacgcttaacgcataatacaaactattacaaaaagcataaaaaataatatttaataataataatggtgattctcaagaccaaaacagcaggttttaataaataataataaacataaaccaagtaagtaataatacaataaataaacaaaaactgatatgggaaacaaatcaatatttttttaagttttattttttagtatttacattttttcccttcttcttgacagtctgtttcgttgatttattttcttggcaactgtcatttttttagtggttttcacatttttttcatcaggaatgtcatcagtgtaggtatcttctgctttatgtgaggttattaagtctttatagaattggttaaatactggtgaaatgtatggaagcaggttaaggaggtcactttttttcttcataggtatagaattttgtcctgggtaacgtaaactagggtccattttgctaatggttttttgcctcttcttttgaaaataatgcattgaaacggttgattaagctctaaagatttcttatagtaaattattccaggctcgtttttgacaaaattcagccactgtacatctccccagctaaaattgtttccaacaacattttcttttcgctgctgaaggtcggtttttagcagcttagtcatagaaactatcttgatttatctccttcaccacgaaaggcgtttctcgtctgtgatttgtataatttcggcccactcatgaggatggtgaaacatccagcaaaagctgttttatttttttcaaaaagggcgtgtgatgtatcacactcaatgtgcgtgtggctagatccaaaaaatttatgattaatctcttccaaattaggagaattttgcaggactaccatgcacatagctgctacatgagtattcttgttttgaccatcacatgtatctgagtacctacatggtcaaacttttcaaacttgataatttgtatacatatgagccaacttcattagcacctctgccagctacaccttcatgtcaaaggtaacagtaagttgtgccatcactgcagtcgtagactgttagattaaaagtccaaagttggcgtttgtcgaatgctacagaactgtgcacgagtggagtggaaaagcattgctgcatgtcaaatgtcaaagttttggttgaatcgttaacttttgaatttcctttgtctaactttttagactcatacgtacaccccgcgttattcttcatattatagagtcactatcgtcaaatgtggaaaaacaaaattgttcccacaatctcgtcttaagtagtggctttcataagctgggattccaattaaaaattgatttactttattcctttcttcttcagttataaaggtttttctaaaattttctcttttatccggttggattacgcccaaagaagatgatcttttcttttgaataatagttataggtatctcccactttcttcaaatacttttagtcatcatcatcattctctttgccttatccctatgcggggtcggtttccctaattgcatttctccacacaattctatcctgggtcatatcattctccaaatacttttagtaaaataactaaatcagctttaaaggcgcgcggtgtacagagagtcaacgtaataactgtatattattagtgtacagtgtgttaagtcgaaaaattgtgggacttaacacactgtacactacttctgtcttcctgtttcttaaataatgtttagtgtaaagagtgatatgtctaatttcaggacttaacacgctttacacagttagtattgattgtttttcatttgtgtaaaatgaatatttcagtttaggaatggaattaaacttgacaaattatacacacatgtagatatcatactctaacatacagatagtgcattggctaattttgaccatttttggacttaactcactttacgcacagagcacagaattttgatctaattaaattgattaatatgtatacttaaataattgtcggattttctaactttccaacacaaatcatactgttgccagagcttatattgtcgtgtttcagcataattataaatggatgatcagcaataacttgtttgggtggatcaggaactcttagattgagaatttttgacaatattccattaaaatcctaagagaatgatggtatttctatctttccgacaaatagaatattgctgttataatagtcatgtctattgttcagcattattataaatggatgatcagcaataaattcctcaataggatcaggtattcctatggacgtaattcgtgccataaacattgcagtagctgctgctgcttcagcgccttcctcgttaacctcgatgaacgctttgtgaatcactttgctaacttttagtggttcaggactcttaagcatgccagtgaagtccgcgtgatcactgaatatgacgccaagacccaactttgtgagagg

SEQ ID NO: 1217 - DNA, 4227 bp, Diabrotica virgifera
  SmartBlast Evalue=1E-30; Info=Endonuclease-reverse transcriptase n=1 Tax=Bombyx mori RepID=D7F158_BOMMO
taattattgttgtgtattgtgattgtgttagaaacatgccaaatcaaaatgcgtttttaatagattattttcaactttcaacaagaacgaaataatgggtcccctttaccattaactgcaaagaagtacctacgttaaagaatttagaatacctatataattttgtattacaaatgttttcttacgcattttagcatgttgtagattgcagtagttttaaaatattaaatgatatattttattgattatatctacactatgataatattgttgttaattaatatatttcggcaaccaatgaaaaccgattgacataattaaccagaataaataattatagatattatttgtacagtaaagaaaaacaaataaaaatctttctgacaagcaatgacataaatgtagccatgatgaaaagtcaccttctaatgttttggcgtcttggcgagaattgcgtcttgaaaaccataacgacccgaagcacttatcgtcagacattgtcctaaggaaagccgccctagagacaatacacaccaattacccagcgcatgagtggctccacatctactgcgatggctcctcgatgccggactcgggaagaacaggagcaggatatgtctcaacgttctccaaaggctccatagctgtgggtgcccctctcaccaactatctatctatctaatcagccctaaacatccatccttggatataggcctcctcttccttcttccatgcctctctatcttgggcaatttgcatccattttgacccagtgtgtttcttcaggtcatctgaccatcgcatctgtggccttcccctttttcgtttgtggttccatggtctccaatgtattaccatcttagtccatctttcatccttctgccgtagggtgtgtccggcgaacttccatttaagctttgctacttgggtagagacgtctttcacttttgttttgttacggatccattcgtttcttttcctgtctgataatttaatgttcagcatttgtctttccatggctctttctgtctttgctattttttccatattctcttttgtaaagtcatgccaagggtgggcgttggctagtaagtaagtatgttttggcgtcagaaattttgactgtcagtaagcgtgcctttgtaggaaaaagactgtaggtcaggtgataaaaagaacgctataccgaagttcacattcagatggcagcgttacagagatacgcctgtgctttctatatggcagaaataactacaatgttgtcgtaaaaacaaagtatttaatcgtaccgtatgggctggctcctataaaagaattataatttggaaaatatttatgaatgtaaaatggaaaaatactacacttttgtgaactttttttttgagtttggccctgcttattaacaagtagcaaaatttacagtggaagtagaattggcaacactgttatcctacatccgcacactgcctgccgtctgaatgtgacttccattttagtagaaaaactaataaattaaaaattgtgataaaagtgatatataaaattcaagtcaatcatctgcaataattctgtgctctgtgcgtaaagagagttaagtcctaaaacactgttttgagataatcgcgtttaaagtttgcaataatatgttcgagttatacttttggagtttttacaggaatgtatcactcaaatttctttcaaatgcttttgatcagttaaataattatttctctccataacataatcgataaatattagaaataaaccatataactattataaaaaaaaaataatatactttttcttatatggacttaatacaatttgcgcaattatcatgaacttcacgcttaacgcataatacaaactattacaaaaagcataaaaaataatatttaataataataatggtgattctcaagaccaaaacagcaggttttaataaataataataaacataaaccaagtaagtaataatacaataaataaacaaaaactgatatgggaaacaaatcaatatttttttaagttttattttttagtatttacattttttcccttcttcttgacagtctgtttcgttgatttattttcttggcaactgtcatttttttagtggttttcacatttttttcatcaggaatgtcatcagtgtaggtatcttctgctttatgtgaggttattaagtctttatagaattggttaaatactggtgaaatgtatggaagcaggttaaggaggtcactttttttcttcataggtatagaattttgtcctgggtaacgtaaaccagggtccattttgctaatggtttctttgcctctttttttgaaactaatgcattgaaacggttgattaaggtctaaggtattcttatagtaaattattctaggctcgtttttaacaaaattcagccactgtacatctcatactgtttttaacaaaattcaaagggcgtttcttaccagtgctttgtatgagttcggcccaatcatgaggatggtggaacgtccagcaaaagctgttttatttttttcaataaggacgtgtgatgtatcacactcaatgtgcgtgtggctagatccaaaaaatttatgattaatctcttccaaattaggagaattttgcaggactaccatgcacatagctgctacatgagtattcttgttttgaccatcacatgtatctgagtacctacatggtcaaacttttcaaacttgataatttgtatacatatgagccaacttcattagcacctctgccagctacaccttcatgtcaaaggtaacagtaagttgtgccatcactgcagtcgtagactgttagattaaaagtccaaagttggcgtttgtcgaatgctacagaactgtgcacgagtggagtggaaaagcattgctgcatgtcaaatgtcaaagttttggttgaatcgttaacttttgaatttcctttgtctaactttttagactcatacgtacaccccgcgttattcttcatattatagagtcactatcgtcaaatgtggaaaaacaaaattgttcccacaatctcgtcttaagtagtggctttcataagctgggattccaattaaaaattgatttactttattcctttcttcttcagttataaaggtttttctaaaattttctcttttatccggttggattacgcccaaagaagatgatcttttcttttgaataatagttataggtatctcccactttcttcaaatacttttagtcatcatcatcattctctttgccttatccctatgcggggtcggtttccctaattgcatttctccacacaattctatcctgggtcatatcattctccaaatacttttagtaaaataactaaatcagctttaaaggcgcgcggtgtacagagagtcaacgtaataactgtatattattagtgtacagtgtgttaagtcgaaaaattgtgggacttaacacactgtacactacttctgtcttcctgtttcttaaataatgtttagtgtaaagagtgatatgtctaatttcaggacttaacacgctttacacagttagtattgattgtttttcatttgtgtaaaatgaatatttcagtttaggaatggaattaaacttgacaaattatacacacatgtagatatcatactctaacatacagatagtgcattggctaattttgaccatttttggacttaactcactttacgcacagagcacagaattttgatctaattaaattgattaatatgtatacttaaataattgtcggattttctaactttccaacacaaatcatactgttgccagagcttatattgtcgtgtttcagcataattataaatggatgatcagcaataacttgtttgggtggatcaggaactcttagattgagaatttttgacaatattccattaaaatcctaagagaatgatggtatttctatctttccgacaaatagaatattgctgttataatagtcatgtctattgttcagcattattataaatggatgatcagcaataaattcctcaataggatcaggtattcctatggacgtaattcgtgccataaacattgcagtagctgctgctgcttcagcgccttcctcgttaacctcgatgaacgctttgtgaatcactttgctaacttttagtggttcaggactcttaagcatgccagtgaagtccgcgtgatcactgaatatgacgccaagacccaactttgtgagagg

SEQ ID NO: 1218 - DNA, 2229 bp, Diabrotica virgifera
  SmartBlast Evalue=8E-56; Info=Endonuclease-reverse transcriptase n=1 Tax=Bombyx mori RepID=D7F158_BOMMO
taattattgttgtgtattgtgattgtgttagaaacatgccaaatcaaaatgcgtttttaatagattattttcaactttcaacaagaacgaaataatgggtcccctttaccattaactgcaaagaagtacctacgttaaagaatttagaatacctatataattttgtattacaaatgttttcttacgcattttagcatgttgtagattgcagtagttttaaaatattaaatgatatattttattgattatatctacactatgataatattgttgttaattaatatatttcggcaaccaatgaaaaccgattgacataattaaccagaataaataattatagatattatttgtacagtaaagaaaaacaaataaaaatctttctgacaagcaatgacataaatgtagccatgatgaaaagtcaccttctaatgttttggcgtcttggcgagaattgcgtcttgaaaaccataacgacccgaagcacttatcgtcagacattgtcctaaggaaagccgccctagagacaatacacaccaattacccagcgcatgagtggctccacatctactgcgatggctcctcgatgccggactcgggaagaacaggagcaggatatgtctcaacgttctccaaaggctccatagctgtgggtgcccctctcaccaactatctatctatctaatcagccctaaacatccatccttggatataggcctcctcttccttcttccatgcctctctatcttgggcaatttgcatccattttgacccagtgtgtttcttcaggtcatctgaccatcgcatctgtggccttcccctttttcgtttgtggttccatggtctccaatgtattaccatcttagtccatctttcatccttctgccgtagggtgtgtccggcgaacttccatttaagctttgctacttgggtagagacgtctttcacttttgttttgttacggatccattcgtttcttttcctgtctgataatttaatgttcagcatttgtctttccatggctctttctgtctttgctattttttccatattctcttttgtaaacgtccatttctgagagccatatattaaaacagggagtatacattgattgaagacttttgtttttaggtactgcgggtattttctgttctttagaatataagacagttttccgaattatgcccaggccaatcttattcttctctttatttcttcggtctgattttctttatttaatctagtgatttgttctagatatgtatactcttttacttgttctattcttgtttgtgccactgtaattactagttcttcttgttgattggtcataatgatatggccagggactgtaggtctcagccccctgcccttcaatataatattagatgagaaaaaaccagtgataaatcagatatattccaaacttttatgggatacagaaatctacaaccatgaaaatggagtgtgtctgatacgctgactataaatttcatactgatggcaaatactatcttgtgctaatcttctcgatcttgtgctaatcgtataaatttgttagccttcctgatttcgagccgttggcgtaagttacgcagtcaagagaacttctttcgtccgatgccttcgttttccttccattcttttctttaacgatcaactgcagaaaaccatacttatcgcttctaaagatatggtcaaactaagtatcttttctgtaaataaggaaaaaataaatattttaattacatatttagttatcagaaaaaaccaacctgccggactatagcttaaagcagaactaccaaaacctacaaatctgacctattccactaaggcactaaatcttttacttaacctatacatgagtatagtaaaaaacaaaaattgctgcaattgtaacttacgcccttgaaaatagacgattcgtgcgtttgacaagtcaaacacagtttatacaaacattatacaacagtttataaaattatattttttatcccataaataaaaattttattatagctccaatatttaaaccacaaaaaggaacgcagtcatttattgagtcgttaatttgtcatttatattataattaattaaaaaatatgaacaataattcaagaaggttgtagtaggagttgaaaaaacctataaaaatccgtactaaatattttatgtttaaataatattagttaacaagattttgatgttaataagagcataaatacaggg

SEQ ID NO: 1219 - DNA, 1933 bp, Diabrotica virgifera
  SmartBlast Evalue=1E-118; Info=Endonuclease-reverse transcriptase n=1 Tax=Bombyx mori RepID=D7F159_BOMMO
taattattgttgtgtattgtgattgtgttagaaacatgccaaatcaaaatgcgtttttaatagattattttcaactttcaacaagaacgaaataatgggtcccctttaccattaactgcaaagaagtacctacgttaaagaatttagaatacctatataattttgtattacaaatgttttcttacgcattttagcatgttgtagattgcagtagttttaaaatattaaatgatatattttattgattatatctacactatgataatattgttgttaattaatatatttcggcaaccaatgaaaaccgattgacataattaaccagaataaataattatagatattatttgtacagtaaagaaaaacaaataaaaatctttctgacaagcaatgacataaatgtagccatgatgaaaagtcaccttctaatgttttggcgtcttggcgagaattgcgtcttgaaaaccataacgacccgaagcacttatcgtcagacattgtcctaaggaaagccgccctagagacaatacacaccaattacccagcgcatgagtggctccacatctactgcgatggctcctcgatgccggactcgggaagaacaggagcaggatatgtctcaacgttctccaaaggctccatagctgtgggtgcccctctcaccaactatctatctatctaatcagccctaaacatccatccttggatataggcctcctcttccttcttccatgcctctctatcttgggcaatttgcatccattttgacccagtgtgtttcttcaggtcatctgaccatcgcatctgtggccttcccctttttcgtttgtggttccatggtctccaatgtattaccatcttagtccatctttcatccttctgccgtagggtgtgtccggcgaacttccatttaagctttgctacttgggtagagacgtctttcacttttgttttgttacggatccattcgtttcttttcctgtctgataatttaatgttcagcatttgtctttccatggctctttctgtctttgctattttttccatattctcttttgtaaacgtccatttctgagagccatatattaaaacagggagtatacattgattgaagacttttgtttttaggtactgcgggtattttctgttctttagaatataagacagttttccgaattatgcccaggccaatcttattcttctctttatttcttcggtctgattttctttatttaatctagtgatttgttctagatatgtatactcttttacttgttctattcttgtttgtgccactgtaattactagttcttcttgttgattggtcatggtttttgttttactgtaattcatcttcagtcctatctttgtcgattctctatctagttcttccatcattctttgtgcttctttctgctattaatacaatatcatcagcatatcgtaagtgattcagatattgcccgtttatgtttatacccaaaccatcccagtgcagttgtttgaacacatcttctagcgcttggttgaatagcttgggcgagatggtatctccttgtcttactcctcggtttattttaataggctccgtttgtttcattagcttaatagttgttgttgccttattatatatatttgtaattaagtcggtatatctgtagtctattctgctgttttgtagggaattctttactgcccagtgttccacactatcaaatgctatttcgaagtcaataaatgccatgtatagcgggatatgatattcgttagctttttcgattaatatcttcatcgttaaaaggtggtcacttgtactgaagctctttctaaatccggcttgttctcttgcctggtatccatctaatttagttattaatctgtttgttaatatcatttttaatagtttgtacatcacatttagtaaagttatggg

SEQ ID NO: 1220 - DNA, 1908 bp, Diabrotica virgifera
  SmartBlast Evalue=1E-103; Info=Endonuclease-reverse transcriptase n=1 Tax=Bombyx mori RepID=D7F159_BOMMO
taattattgttgtgtattgtgattgtgttagaaacatgccaaatcaaaatgcgtttttaatagattattttcaactttcaacaagaacgaaataatgggtcccctttaccattaactgcaaagaagtacctacgttaaagaatttagaatacctatataattttgtattacaaatgttttcttacgcattttagcatgttgtagattgcagtagttttaaaatattaaatgatatattttattgattatatctacactatgataatattgttgttaattaatatatttcggcaaccaatgaaaaccgattgacataattaaccagaataaataattatagatattatttgtacagtaaagaaaaacaaataaaaatctttctgacaagcaatgacataaatgtagccatgatgaaaagtcaccttctaatgttttggcgtcttggcgagaattgcgtcttgaaaaccataacgacccgaagcacttatcgtcagacattgtcctaaggaaagccgccctagagacaatacacaccaattacccagcgcatgagtggctccacatctactgcgatggctcctcgatgccggactcgggaagaacaggagcaggatatgtctcaacgttctccaaaggctccatagctgtgggtgcccctctcaccaactatctatctatctaatcagccctaaacatccatccttggatataggcctcctcttccttcttccatgcctctctatcttgggcaatttgcatccattttgacccagtgtgtttcttcaggtcatctgaccatcgcatctgtggccttcccctttttcgtttgtggttccatggtctccaatgtattaccatcttagtccatctttcatccttctgccgtagggtgtgtccggcgaacttccatttaagctttgctacttgggtagagacgtctttcacttttgttttgttacggatccattcgtttcttttcctgtctgataatttaatgttcagcatttgtctttccatggctctttctgtctttgctattttttccatattctcttttgtaaacgtccatttctgagagccatatattaaaacagggagtatacattgattgaagacttttgtttttaggtactgcgggtattttctgttctttagaatataagacagttttccgaattatgcccaggccaatcttattcttctctttatttcttcggtctgattttctttatttaatctagtgatttgttctagatatgtatactcttttacttgttctattcttgtttgtgccactgtaattactagttcttcttgttgattggtcatggtttttgttttactgtaattcatcttcagtcctatctttgtcgattctctatctagttcttccatcattctttgtgcttctttctgctattaatacaatatcatcagcatatcgtaagtgattcagatattgcccgtttatgtttatacccaaaccatcccagtgcagttgtttgaacacatcttctagcgcttggttgaatagcttgggcgagatggtatctccttgtcttactcctcggtttattttaataggctccgtttgtttcattagcttaatagttgttgttgccttattatatatatttgtaattaagtcggtatatctgtagtctattctgctgttttgtagggaattctttactgcccagtgttccacactatcaaatgctatttcgaagtcaataaatgccatgtatagcgggatacaatattcgttagccttttcgattaatatcttcatcgttaaaaggtgatcttcatactatcttcagaaataaacaattctattatttttgtccaaactgatcagcttctttacctattgttttccctttttattgtacttagtttccgtag

SEQ ID NO: 1221 - DNA, 1651 bp, Diabrotica virgifera
  SmartBlast Evalue=1E-109; Info=Serpin peptidase inhibitor 3 n=1 Tax=Tribolium castaneum RepID=D7EJE0_TRICA
ttttatcatattatgctatggtttatttcttttagattctagattaatcttgtaagtaatagaagtgaatatactaataagtcggagtaaaaacttttccagcaaagagcaatttactgctagaatcttcttcactttgttgtttcaataaaattaaaaagggatgatctgcactaaagtcctctggtggaggtggcatacacctgaacatcatttcaaaacccagacataataatacgtatttataagaaattatgaacattttaacacctaggtgaaaaaacttttccagcaaacaatagtttgctgacagaatcgtcaccgcttttttcttctagtaaaatgaagaagggatgatccgcgacgaactcttcaggtgggggtggcatacagcacaacattatttgcataccagtagctgctgctgcttcagcgccttcctcgttaacctcgatgaacgctttgtgaatcactttgctaacttttagtggttcaggactcttaagcatgccagtgaagtccgcgtgatcactgaatatgacgccaagacccaactttgtgagaggctcctccaaattgatggtggtttcaattttaaacttgggcaaagcaacgataacgtctggcctaaacatattttccgtgatcttagttagatcagtattagccaatttaagttccaactcattaataccgtttctcttattaggcaatatcacgatcatgcttagatctttgttggtataaggtaattccaagactttggcatctaatgcttcatcgtttttaaagaagaacttctttttagtatgcatcatttgaacatctatcgaatcattgtcgtttaagtagaacttctcggtttttgtgtcctcaggtttgaacggtgcagcccatttgcctttgaaatatatggcgttgaccaaaaccaagcgggtgtcatcattcaaatcatcaggttgtattaaatccttaattttatcttttgttttttcttcaacccaggtgttaatagtcttagcagctgctgctgattgggagaaatcaacattttgaacttcggaaaagaaatgattgacaactttgtctttaaactcatctttcaatgcatattcatttttgacataaaccttattagccataagtagagttacatcctcaacggaattcagcttaagcatagctgctttgtagccctcggccaacgttgcgatatcagcaacttggagggcgctagtcaatgctttttgtgttttccctccagatccttgtgaagccaaagataaaattgcgtgtatacttataggtgagaaaaatatatttttgcctttttcttgggctagtatctggtaagcgtttctggtaaacagtccattaccctggaggacggcagtcaagtgtttgttttcttcagccatgacgaaagttgaagttgacagtagaaaaaatgtaacgaagactaaaaataactgtgaaccgtatacgctgttagaaaccaaatgaataaaatttcgtgcactcacactcaatcgatctatacggctcccgaaatcttcaaccttgaccagtcccataaaagctatacgaaaacgggccacaaaaactgttttgggctcgctataaaaaatctaatgtcaagtgtacaatctca

SEQ ID NO: 1222 - DNA, 1581 bp, Diabrotica virgifera
  SmartBlast Evalue=1E-109; Info=Serpin peptidase inhibitor 3 n=1 Tax=Tribolium castaneum RepID=D7EJE0_TRICA
taaatctaatagactaattcttcatttaaaaagaatgttgctttcttgatactcattgtctgtatgctgcagcataaatagaaaagggtggtcagcaatgaactcttccggatcttcctctatcatcaagcaacagtaatcaaataccatagccagacataataatacgtatttataagaaattatgaacattttaacacctaggtgaaaaaacttttccagcaaacaatagtttgctgacagaatcgtcaccgcttttttcttctagtaaaatgaagaagggatgatccgcgacgaactcttcaggtgggggtggcatacagcacaacattatttgcataccagtagctgctgctgcttcagcgccttcctcgttaacctcgatgaacgctttgtgaatcactttgctaacttttagtggttcaggactcttaagcatgccagtgaagtccgcgtgatcactgaatatgacgccaagacccaactttgtgagaggctcctccaaattgatggtggtttcaattttaaacttgggcaaagcaacgataacgtctggcctaaacatattttccgtgatcttagttagatcagtattagccaatttaagttccaactcattaataccgtttctcttattaggcaatatcacgatcatgcttagatctttgttggtataaggtaattccaagactttggcatctaatgcttcatcgtttttaaagaagaacttctttttagtatgcatcatttgaacatctatcgaatcattgtcgtttaagtagaacttctcggtttttgtgtcctcaggtttgaacggtgcagcccatttgcctttgaaatatatggcgttgaccaaaaccaagcgggtgtcatcattcaaatcatcaggttgtattaaatccttaattttatcttttgttttttcttcaacccaggtgttaatagtcttagcagctgctgctgattgggagaaatcaacattttgaacttcggaaaagaaatgattgacaactttgtctttaaactcatctttcaatgcatattcatttttgacataaaccttattagccataagtagagttacatcctcaacggaattcagcttaagcatagctgctttgtagccctcggccaacgttgcgatatcagcaacttggagggcgctagtcaatgctttttgtgttttccctccagatccttgtgaagccaaagataaaattgcgtgtatacttataggtgagaaaaatatatttttgcctttttcttgggctagtatctggtaagcgtttctggtaaacagtccattaccctggaggacggcagtcaagtgtttgttttcttcagccatgacgaaagttgaagttgacagtagaaaaaatgtaacgaagactaaaaataactgtgaaccgtatacgctgttagaaaccaaatgaataaaatttcgtgcactcacactcaatcgatctatacggctcccgaaatcttcaaccttgaccagtcccataaaagctatacgaaaacgggccacaaaaactgttttgggctcgctataaaaaatctaatgtcaagtgtacaatctca

SEQ ID NO: 1223 - DNA, 4193 bp, Diabrotica virgifera
  SmartBlast Evalue=2E-81; Info=Transmembrane protein 214-A n=1 Tax=Camponotus floridanus RepID=E2A8B1_9HYME
acaactagcggtggtccagttgtttgaaaagtgtttgaaaatagtaatttttttactttaatatatagatatatagtgtttgtaaaattaaatagtattcaaaaatgtctggacaatgggaagtagtaactaaaaaacgcgataagggaagtaaactgccagtaccaaaagttaataatccaaaggaaataaaaaataataaaaacattctcaatggtgtaaaaatagaggaagttttgccaaaagctcaggtacagagcctttatggtaaatcgaaagaaaataaagttcaagacaaaaataaacctaaggagagtgtgaagaaagcagctgttaagaaagataaacctgtggaaccaccaaagcctaagccaccgaagtccattgaaagtgctcttaattctatcgatgttaacgaatttaaagatatatatgaaaaaaatagaaatcattttcctgatgctcctattgtatggttgaaggaattactgcagtatttaaatcaaaagattcccatcgagagccatgatccagtttttgcatcaaaacctgttaactaccctctcaatgtggttccttctgatttactctctatcatagaaaaagcagtaaaagaagcaggaaaaaacaatgctcagttgtttttcgacatatgcttaacttctatggctactgatatgagcaaaggtcttccttcgataggatataaaatatttttacaatatattgccttgcaagaaccacgtttagttacagaaaatcttcaaaaacacgttagtctaaggaattcgtatcaaaatagacctaacattgggcaatctattctttggggcgtgagccatgtcggatataaagatttcagcagtgggttgatagtttttcaagatctatttctacccttgatagacatgaagaactactcccgctacattctcacttatttagtaaacctaatcaagaacaccaacgaaaaatcacttacactggaagaatctttatcgatattaaacattgtttacagcaacagaaagaacatgcccagtgatttggtacaagaagtgtcgaacaacgtcgctcgtattaaacctttaaactctaaaaaaggcagctctaacattgaaataatgctcaagaatatcgtattaaataataatgcctcatatcaaaagtgcctgtgtgatattttagtggaagctttccaccaagatcaatcggcttttgctgcttggagtaaggcttactctaaaaatgtacaatcaagtgccgtagttcttgaacatataagcaataactggtccacggtatcacataagatcaacaaaagtgctttaactaatttactcaataatttaagtacggtaaacgtagaattatcttcgaaaaaacgtaaggaagaaggactgaaatccagtattaactctatacagaaaatccaagagaaattggcaatcaaaaagaaaggaggtttcccatataaactattaattctgttgacattggcagttggaggtgcaatttcttatgatatcaaacaacatggcagttggaatgattctcttacaaggaaaacgttaaaagaatataaagtatgtgaatactcacatttggcgatagacagagttaagggcggattacattggacaagtgaaaaaattgaagaacagttcccaggtttgcaacaaaatgttgccgtcttttcagaaccttacgttgagttgctcgttaatctaggaaagattggtcgtaacgtcgcatttaacgtgaaagatgttatcgttgagaagtatcctgttgttgttgaatcggtagaagcttatttaccgggattagttgagaattcacagaaggccataagtgaagtttatataacatcagttttatatttcaacagaggtgtagactatcttaaaaatgaagtatttgtgggccaactctcaccagaaaacatgcagagagtggttgtcgaagcatttaatacgacacaacaaaaggctgttgaatactaccactggatttataaaaaagttcagacgagcatcaaatgaaatacgtatgttgattaattaggtttttcaatttatttgaaccaaaaatccgttactaccacaccaacttaggttcagtttcagaaataattttgcatacccctgtatacaagatctatttcgaatgtttgatattagaacttgcagatgtttgtgactttactgttaatattttcataggaatcgtttggttgcgagatattgagtacagtacaaaaataagtttgttggtagttctgctggacagtaataaatctacaattttttatacatttcttgtctttggttatagggtgagaaactagatgaatgaaagcgtactgctaagacatactattatttaagtttattgttttaatttataagttagatgtgcatgtagagaagcggtgtgtaattaggttccatgaaatctcgtaacgtgacagttcgtaactatacaaattcgtaactccaacctttaatttttttagcaaatttagtattactgaatttaataaaaaattcattttgcattcctttgtatactaaaagtaatggtactttttaagacgactttttttttagatatatttcacaccaatttttgcatatgttcttgttaatatgacaactaaagaatacattttttcattttcaacgaaaacatttcgtttataaattcgcaaaagtgtgtgtgttattgcgttgccgctcctgcaatactcagatcagatttatcaatggattcttatgtagttttttcttctgaatccaaatctgaaaacggcatttcgatatttctaaccgtcttcgagataatcgacctcaaagtctaaaatgtgacgtcacgatagttttattttctgccgacacactacacgtccagctgaaatcgttgctattaagtaggctagttttttaatctcgattttttaagcaaagcacaggttatttacatttgagtttgacacttcgtgaatgtcaaactaaattttaattaagtattaataaaacatcaatgacatttgatagtgaatttaattattatataaaataaataagatgtccaaaaatacaatttgagtatagtttaaaagcaataatttattaacagctttaaaaaggtttatacgagtatacggcctcccctttatgataaatggactgttccatttgctatgaaattaaaatatagtcggttcgctaaactcgacacaactggctagtgattttagtaggtaatttttttgttttttgcgaattttgccaaaattgggaaaattactaattatttagtaattattaactaatttgtaatcatttttttttgcccaattggcaaaattatcgactaaaatcactagccagttgtgtctgagttaagcgaaccgacagtatatgaaataatattgtttggtataaaaaattatggtctgatatatgcaattacattcttctaatggaaaaaatatttgaagatttttctcaaattatggataccaacaacattttcatttataactcttttatttttaatgtgacgaaaaaaaaagttattcttcataaaaatctcttcatgttctaagatttatgatgtaaccatatataaaattttattaattttatacgaggtatataaaaaatatgaatttcgatcaagagtaaactacctttatagttcataacatttaaattagaatgatataattgcacattaaaacataattattaattctaaacacttttcataatagcaattttccatattatgaattaaaatacgtaaataaacaaagttttcgttatgataatgctcgcattttcagcttgttattatgttttgttattgctattaaaatttactgttttctttttatggggttttagaacaagcaaaatgttgatcaagaatgacagttcacaagataaattccttgttgaacgcattgtcgaaaaaatgacaattcgcaaattatttatcggagttgacagttactaagctacactgtagcttaggaataccagactattgtttcgatttcgaacccagtgcaaaaatgtatagggatttacgtaaaattggctacaaaattcagctggtttgaaaaacttgaattttatttcgtttaatgaggtttcagaacaagcaacttcatatcaagaatg

SEQ ID NO: 1224 - DNA, 4168 bp, Diabrotica virgifera
  SmartBlast Evalue=2E-81; Info=Transmembrane protein 214-A n=1 Tax=Camponotus floridanus RepID=E2A8B1_9HYME
acaactagcggtggtccagttgtttgaaaagtgtttgaaaatagtaatttttttactttaatatatagatatatagtgtttgtaaaattaaatagtattcaaaaatgtctggacaatgggaagtagtaactaaaaaacgcgataagggaagtaaactgccagtaccaaaagttaataatccaaaggaaataaaaaataataaaaacattctcaatggtgtaaaaatagaggaagttttgccaaaagctcaggtacagagcctttatggtaaatcgaaagaaaataaagttcaagacaaaaataaacctaaggagagtgtgaagaaagcagctgttaagaaagataaacctgtggaaccaccaaagcctaagccaccgaagtccattgaaagtgctcttaattctatcgatgttaacgaatttaaagatatatatgaaaaaaatagaaatcattttcctgatgctcctattgtatggttgaaggaattactgcagtatttaaatcaaaagattcccatcgagagccatgatccagtttttgcatcaaaacctgttaactaccctctcaatgtggttccttctgatttactctctatcatagaaaaagcagtaaaagaagcaggaaaaaacaatgctcagttgtttttcgacatatgcttaacttctatggctactgatatgagcaaaggtcttccttcgataggatataaaatatttttacaatatattgccttgcaagaaccacgtttagttacagaaaatcttcaaaaacacgttagtctaaggaattcgtatcaaaatagacctaacattgggcaatctattctttggggcgtgagccatgtcggatataaagatttcagcagtgggttgatagtttttcaagatctatttctacccttgatagacatgaagaactactcccgctacattctcacttatttagtaaacctaatcaagaacaccaacgaaaaatcacttacactggaagaatctttatcgatattaaacattgtttacagcaacagaaagaacatgcccagtgatttggtacaagaagtgtcgaacaacgtcgctcgtattaaacctttaaactctaaaaaaggcagctctaacattgaaataatgctcaagaatatcgtattaaataataatgcctcatatcaaaagtgcctgtgtgatattttagtggaagctttccaccaagatcaatcggcttttgctgcttggagtaaggcttactctaaaaatgtacaatcaagtgccgtagttcttgaacatataagcaataactggtccacggtatcacataagatcaacaaaagtgctttaactaatttactcaataatttaagtacggtaaacgtagaattatcttcgaaaaaacgtaaggaagaaggactgaaatccagtattaactctatacagaaaatccaagagaaattggcaatcaaaaagaaaggaggtttcccatataaactattaattctgttgacattggcagttggaggtgcaatttcttatgatatcaaacaacatggcagttggaatgattctcttacaaggaaaacgttaaaagaatataaagtatgtgaatactcacatttggcgatagacagagttaagggcggattacattggacaagtgaaaaaattgaagaacagttcccaggtttgcaacaaaatgttgccgtcttttcagaaccttacgttgagttgctcgttaatctaggaaagattggtcgtaacgtcgcatttaacgtgaaagatgttatcgttgagaagtatcctgttgttgttgaatcggtagaagcttatttaccgggattagttgagaattcacagaaggccataagtgaagtttatgtaacatcagttttatatttcaacagaggtgtagactatcttaaaaatgaagtatttgtgggccaactctcaccggaaaacatgcagagagtggttgtcgaagcatttaatacgacacaacaaaaggctgttgaatactaccactggatttataaaaaagttcagacaagcatcaaatgaaatatgtatgttgattaattaggtttttcaatttatttgaaccaaaaatccgttactaccacaccaacttaggttcagtttcagaaataattttgcatacccctgtatacaagatctatttcgaatgtttgatattagaacttgcagatgtttgtgactttactgttaatattttcataggaatcgtttggttgcgagatattgagtacagtacaaaaataagtttgttggtagttctgctggacagtaataaatctacaattttttatacatttcttgtctttggttatagggtgagaaactagatgaatgaaagcgtactgctaagacatactattatttaagtttattgttttaatttataagttagatgtgcatgtagagaagcggtgtgtaattaggttccatgaaatctcgtaacgtgacagttcgtaactatacaaattcgtaactccaacctttaatttttttagcaaatttagtattactgaatttaataaaaaattcattttgcattcctttgtatactaaaagtaatggtactttttaagacgactttttttttagatatatttcacaccaatttttgcatatgttcttgttaatatgacaactaaagaatacattttttcattttcaacgaaaacatttcgtttataaattcgcaaaagtgtgtgtgttgttgcgttgccgctcgatggattcttatgtagttttttcttctgaatccaaatctgaaaacggcatttcgatatttctaaccgtcttcgagataatcgacctcaaagtctaaaatgtgacgtcacgatcgttttattttctgccgacacactacacgtccagctgaaatcgttgctattaagtaggctagttttttaatctcgattttttaagcaaagcacaggttatttacatttgagtttgacacttcgtgaatgtcaaactaaattttaattaagtattaataaaacatcaatgacatttgatagtgaatttaattattatataaaataaataagatgtccaaaaatacaatttgagtatagtttaaaagcaataatttattaacagctttaaaaaggtttatacgagtatacggcctcccctttatgataaatggactgttccatttgctatgaaattaaaatatagtcggttcgctaaactcgacacaactggctagtgattttagtaggtaatttttttgttttttgcgaattttgccaaaattgggaaaattactaattatttagtaattattaactaatttgtaatcatttttttttgcccaattggcaaaattatcgactaaaatcactagccagttgtgtctgagttaagcgaaccgacagtatatgaaataatattgtttggtataaaaaattatggtctgatatatgcaattacattcttctaatggaaaaaatatttgaagatttttctcaaattatggataccaacaacattttcatttataactcttttatttttaatgtgacgaaaaaaaaagttattcttcataaaaatctcttcatgttctaagatttatgatgtaaccatatataaaattttattaattttatacgaggtatataaaaaatatgaatttcgatcaagagtaaactacctttatagttcataacatttaaattagaatgatataattgcacattaaaacataattattaattctaaacacttttcataatagcaattttccatattatgaattaaaatacgtaaataaacaaagttttcgttatgataatgctcgcattttcagcttgttattatgttttgttattgctattaaaatttactgttttctttttatggggttttagaacaagcaaaatgttgatcaagaatgacagttcacaagataaattccttgttgaacgcattgtcgaaaaaatgacaattcgcaaattatttatcggagttgacagttactaagctacactgtagcttaggaataccagactattgtttcgatttcgaacccagtgcaaaaatgtatagggatttacgtaaaattggctacaaaattcagctggtttgaaaaacttgaattttatttcgtttaatgaggtttcagaacaagcaacttcatatcaagaatg

SEQ ID NO: 1225 - DNA, 4168 bp, Diabrotica virgifera
  SmartBlast Evalue=2E-81; Info=Transmembrane protein 214-A n=1 Tax=Camponotus floridanus RepID=E2A8B1_9HYME
acaactagcggtggtccagttgtttgaaaagtgtttgaaaatagtaatttttttactttaatatatagatatatagtgtttgtaaaattaaatagtattcaaaaatgtctggacaatgggaagtagtaactaaaaaacgcgataagggaagtaaactgccagtaccaaaagttaataatccaaaggaaataaaaaataataaaaacattctcaatggtgtaaaaatagaggaagttttgccaaaagctcaggtacagagcctttatggtaaatcgaaagaaaataaagttcaagacaaaaataaacctaaggagagtgtgaagaaagcagctgttaagaaagataaacctgtggaaccaccaaagcctaagccaccgaagtccattgaaagtgctcttaattctatcgatgttaacgaatttaaagatatatatgaaaaaaatagaaatcattttcctgatgctcctattgtatggttgaaggaattactgcagtatttaaatcaaaagattcccatcgagagccatgatccagtttttgcatcaaaacctgttaactaccctctcaatgtggttccttctgatttactctctatcatagaaaaagcagtaaaagaagcaggaaaaaacaatgctcagttgtttttcgacatatgcttaacttctatggctactgatatgagcaaaggtcttccttcgataggatataaaatatttttacaatatattgccttgcaagaaccacgtttagttacagaaaatcttcaaaaacacgttagtctaaggaattcgtatcaaaatagacctaacattgggcaatctattctttggggcgtgagccatgtcggatataaagatttcagcagtgggttgatagtttttcaagatctatttctacccttgatagacatgaagaactactcccgctacattctcacttatttagtaaacctaatcaagaacaccaacgaaaaatcacttacactggaagaatctttatcgatattaaacattgtttacagcaacagaaagaacatgcccagtgatttggtacaagaagtgtcgaacaacgtcgctcgtattaaacctttaaactctaaaaaaggcagctctaacattgaaataatgctcaagaatatcgtattaaataataatgcctcatatcaaaagtgcctgtgtgatattttagtggaagctttccaccaagatcaatcggcttttgctgcttggagtaaggcttactctaaaaatgtacaatcaagtgccgtagttcttgaacatataagcaataactggtccacggtatcacataagatcaacaaaagtgctttaactaatttactcaataatttaagtacggtaaacgtagaattatcttcgaaaaaacgtaaggaagaaggactgaaatccagtattaactctatacagaaaatccaagagaaattggcaatcaaaaagaaaggaggtttcccatataaactattaattctgttgacattggcagttggaggtgcaatttcttatgatatcaaacaacatggcagttggaatgattctcttacaaggaaaacgttaaaagaatataaagtatgtgaatactcacatttggcgatagacagagttaagggcggattacattggacaagtgaaaaaattgaagaacagttcccaggtttgcaacaaaatgttgccgtcttttcagaaccttacgttgagttgctcgttaatctaggaaagattggtcgtaacgtcgcatttaacgtgaaagatgttatcgttgagaagtatcctgttgttgttgaatcggtagaagcttatttaccgggattagttgagaattcacagaaggccataagtgaagtttatataacatcagttttatatttcaacagaggtgtagactatcttaaaaatgaagtatttgtgggccaactctcaccagaaaacatgcagagagtggttgtcgaagcatttaatacgacacaacaaaaggctgttgaatactaccactggatttataaaaaagttcagacgagcatcaaatgaaatacgtatgttgattaattaggtttttcaatttatttgaaccaaaaatccgttactaccacaccaacttaggttcagtttcagaaataattttgcatacccctgtatacaagatctatttcgaatgtttgatattagaacttgcagatgtttgtgactttactgttaatattttcataggaatcgtttggttgcgagatattgagtacagtacaaaaataagtttgttggtagttctgctggacagtaataaatctacaattttttatacatttcttgtctttggttatagggtgagaaactagatgaatgaaagcgtactgctaagacatactattatttaagtttattgttttaatttataagttagatgtgcatgtagagaagcggtgtgtaattaggttccatgaaatctcgtaacgtgacagttcgtaactatacaaattcgtaactccaacctttaatttttttagcaaatttagtattactgaatttaataaaaaattcattttgcattcctttgtatactaaaagtaatggtactttttaagacgactttttttttagatatatttcacaccaatttttgcatatgttcttgttaatatgacaactaaagaatacattttttcattttcaacgaaaacatttcgtttataaattcgcaaaagtgtgtgtgttgttgcgttgccgctcgatggattcttatgtagttttttcttctgaatccaaatctgaaaacggcatttcgatatttctaaccgtcttcgagataatcgacctcaaagtctaaaatgtgacgtcacgatcgttttattttctgccgacacactacacgtccagctgaaatcgttgctattaagtaggctagttttttaatctcgattttttaagcaaagcacaggttatttacatttgagtttgacacttcgtgaatgtcaaactaaattttaattaagtattaataaaacatcaatgacatttgatagtgaatttaattattatataaaataaataagatgtccaaaaatacaatttgagtatagtttaaaagcaataatttattaacagctttaaaaaggtttatacgagtatacggcctcccctttatgataaatggactgttccatttgctatgaaattaaaatatagtcggttcgctaaactcgacacaactggctagtgattttagtaggtaatttttttgttttttgcgaattttgccaaaattgggaaaattactaattatttagtaattattaactaatttgtaatcatttttttttgcccaattggcaaaattatcgactaaaatcactagccagttgtgtctgagttaagcgaaccgacagtatatgaaataatattgtttggtataaaaaattatggtctgatatatgcaattacattcttctaatggaaaaaatatttgaagatttttctcaaattatggataccaacaacattttcatttataactcttttatttttaatgtgacgaaaaaaaaagttattcttcataaaaatctcttcatgttctaagatttatgatgtaaccatatataaaattttattaattttatacgaggtatataaaaaatatgaatttcgatcaagagtaaactacctttatagttcataacatttaaattagaatgatataattgcacattaaaacataattattaattctaaacacttttcataatagcaattttccatattatgaattaaaatacgtaaataaacaaagttttcgttatgataatgctcgcattttcagcttgttattatgttttgttattgctattaaaatttactgttttctttttatggggttttagaacaagcaaaatgttgatcaagaatgacagttcacaagataaattccttgttgaacgcattgtcgaaaaaatgacaattcgcaaattatttatcggagttgacagttactaagctacactgtagcttaggaataccagactattgtttcgatttcgaacccagtgcaaaaatgtatagggatttacgtaaaattggctacaaaattcagctggtttgaaaaacttgaattttatttcgtttaatgaggtttcagaacaagcaacttcatatcaagaatg

SEQ ID NO: 1226 - DNA, 3244 bp, Diabrotica virgifera
  SmartBlast Evalue=3E-19; Info=Transmembrane protein 214-A n=1 Tax=Camponotus floridanus RepID=E2A8B1_9HYME
cacaagcattcactgttaatccaagaaagaaagacggttgcgcagttttcgtgattcagataaagatagaatgactttctatatccgttagggtaaatcagctttattttaggtgcgtttatttatctgcaccgtgttgttatcgtttatccttgaacctttaaaatatcaaaaatcgattgttagctgttgttatcctgttaaagaaaattataaattacagacagtttaaacaggtcgtgtaataaattaatgtgagacatggcttctaaaaagaaaatccaagagaaattggcaatcaaaaagaaaggaggtttcccatataaactattaattctgttgacattggcagttggaggtgcaatttcttatgatatcaaacaacatggcagttggaatgattctcttacaaggaaaacgttaaaagaatataaagtatgtgaatactcacatttggcgatagacagagttaagggcggattacattggacaagtgaaaaaattgaagaacagttcccaggtttgcaacaaaatgttgccgtcttttcagaaccttacgttgagttgctcgttaatctaggaaagattggtcgtaacgtcgcatttaacgtgaaagatgttatcgttgagaagtatcctgttgttgttgaatcggtagaagcttatttaccgggattagttgagaattcacagaaggccataagtgaagtttatgtaacatcagttttatatttcaacagaggtgtagactatcttaaaaatgaagtatttgtgggccaactctcaccggaaaacatgcagagagtggttgtcgaagcatttaatacgacacaacaaaaggctgttgaatactaccactggatttataaaaaagttcagacaagcatcaaatgaaatatgtatgttgattaattaggtttttcaatttatttgaaccaaaaatccgttactaccacaccaacttaggttcagtttcagaaataattttgcatacccctgtatacaagatctatttcgaatgtttgatattagaacttgcagatgtttgtgactttactgttaatattttcataggaatcgtttggttgcgagatattgagtacagtacaaaaataagtttgttggtagttctgctggacagtaataaatctacaattttttatacatttcttgtctttggttatagggtgagaaactagatgaatgaaagcgtactgctaagacatactattatttaagtttattgttttaatttataagttagatgtgcatgtagagaagcggtgtgtaattaggttccatgaaatctcgtaacgtgacagttcgtaactatacaaattcgtaactccaacctttaatttttttagcaaatttagtattactgaatttaataaaaaattcattttgcattcctttgtatactaaaagtaatggtactttttaagacgactttttttttagatatatttcacaccaatttttgcatatgttcttgttaatatgacaactaaagaatacattttttcattttcaacgaaaacatttcgtttataaattcgcaaaagtgtgtgtgttattgcgttgccgctcctgcaatactcagatcagatttatcaatggattcttatgtagttttttcttctgaatccaaatctgaaaacggcatttcgatatttctaaccgtcttcgagataatcgacctcaaagtctaaaatgtgacgtcacgatagttttattttctgccgacacactacacgtccagctgaaatcgttgctattaagtaggctagttttttaatctcgattttttaagcaaagcacaggttatttacatttgagtttgacacttcgtgaatgtcaaactaaattttaattaagtattaataaaacatcaatgacatttgatagtgaatttaattattatataaaataaataagatgtccaaaaatacaatttgagtatagtttaaaagcaataatttattaacagctttaaaaaggtttatacgagtatacggcctcccctttatgataaatggactgttccatttgctatgaaattaaaatatagtcggttcgctaaactcgacacaactggctagtgattttagtaggtaatttttttgttttttgcgaattttgccaaaattgggaaaattactaattatttagtaattattaactaatttgtaatcatttttttttgcccaattggcaaaattatcgactaaaatcactagccagttgtgtctgagttaagcgaaccgacagtatatgaaataatattgtttggtataaaaaattatggtctgatatatgcaattacattcttctaatggaaaaaatatttgaagatttttctcaaattatggataccaacaacattttcatttataactcttttatttttaatgtgacgaaaaaaaaagttattcttcataaaaatctcttcatgttctaagatttatgatgtaaccatatataaaattttattaattttatacgaggtatataaaaaatatgaatttcgatcaagagtaaactacctttatagttcataacatttaaattagaatgatataattgcacattaaaacataattattaattctaaacacttttcataatagcaattttccatattatgaattaaaatacgtaaataaacaaagttttcgttatgataatgctcgcattttcagcttgtttatcctgaattagaattatcattttaaagtagtaaaactactgttaatggtagattatatttattttaagaaataattttcaaaatagtatatttctccgcgaaatatgaaaaatgttttaacctgacgctcgttcgttaaattgacaaacgtaatttcaattttgtaactgtaataaaagttattttccacgtgaacaaaaataaacagaatttaattttgacgttacgaatatgtataatatgtagttactgtcgccgttacaaattgttctttaccacttgtacagttacgaactgccgcgttaagagatcacggtcacggtataatcactattatatgtaaaactgtcattttagggaagcatcacatgttagcatatgaatatttttaattaatataagtcatgacaatatgaacaaaaagtgattttatattgttttaacttaatttatttattaaaaatttttgaaaactaaatttacaatttatatttttaccactctgcgtaaacagccaataaacaaatttttgtt

SEQ ID NO: 1227 - DNA, 3244 bp, Diabrotica virgifera
  SmartBlast Evalue=4E-19; Info=Transmembrane protein 214-A n=1 Tax=Camponotus floridanus RepID=E2A8B1_9HYME
cacaagcattcactgttaatccaagaaagaaagacggttgcgcagttttcgtgattcagataaagatagaatgactttctatatccgttagggtaaatcagctttattttaggtgcgtttatttatctgcaccgtgttgttatcgtttatccttgaacctttaaaatatcaaaaatcgattgttagctgttgttatcctgttaaagaaaattataaattacagacagtttaaacaggtcgtgtaataaattaatgtgagacatggcttctaaaaagaaaatccaagagaaattggcaatcaaaaagaaaggaggtttcccatataaactattaattctgttgacattggcagttggaggtgcaatttcttatgatatcaaacaacatggcagttggaatgattctcttacaaggaaaacgttaaaagaatataaagtatgtgaatactcacatttggcgatagacagagttaagggcggattacattggacaagtgaaaaaattgaagaacagttcccaggtttgcaacaaaatgttgccgtcttttcagaaccttacgttgagttgctcgttaatctaggaaagattggtcgtaacgtcgcatttaacgtgaaagatgttatcgttgagaagtatcctgttgttgttgaatcggtagaagcttatttaccgggattagttgagaattcacagaaggccataagtgaagtttatataacatcagttttatatttcaacagaggtgtagactatcttaaaaatgaagtatttgtgggccaactctcaccagaaaacatgcagagagtggttgtcgaagcatttaatacgacacaacaaaaggctgttgaatactaccactggatttataaaaaagttcagacgagcatcaaatgaaatacgtatgttgattaattaggtttttcaatttatttgaaccaaaaatccgttactaccacaccaacttaggttcagtttcagaaataattttgcatacccctgtatacaagatctatttcgaatgtttgatattagaacttgcagatgtttgtgactttactgttaatattttcataggaatcgtttggttgcgagatattgagtacagtacaaaaataagtttgttggtagttctgctggacagtaataaatctacaattttttatacatttcttgtctttggttatagggtgagaaactagatgaatgaaagcgtactgctaagacatactattatttaagtttattgttttaatttataagttagatgtgcatgtagagaagcggtgtgtaattaggttccatgaaatctcgtaacgtgacagttcgtaactatacaaattcgtaactccaacctttaatttttttagcaaatttagtattactgaatttaataaaaaattcattttgcattcctttgtatactaaaagtaatggtactttttaagacgactttttttttagatatatttcacaccaatttttgcatatgttcttgttaatatgacaactaaagaatacattttttcattttcaacgaaaacatttcgtttataaattcgcaaaagtgtgtgtgttattgcgttgccgctcctgcaatactcagatcagatttatcaatggattcttatgtagttttttcttctgaatccaaatctgaaaacggcatttcgatatttctaaccgtcttcgagataatcgacctcaaagtctaaaatgtgacgtcacgatagttttattttctgccgacacactacacgtccagctgaaatcgttgctattaagtaggctagttttttaatctcgattttttaagcaaagcacaggttatttacatttgagtttgacacttcgtgaatgtcaaactaaattttaattaagtattaataaaacatcaatgacatttgatagtgaatttaattattatataaaataaataagatgtccaaaaatacaatttgagtatagtttaaaagcaataatttattaacagctttaaaaaggtttatacgagtatacggcctcccctttatgataaatggactgttccatttgctatgaaattaaaatatagtcggttcgctaaactcgacacaactggctagtgattttagtaggtaatttttttgttttttgcgaattttgccaaaattgggaaaattactaattatttagtaattattaactaatttgtaatcatttttttttgcccaattggcaaaattatcgactaaaatcactagccagttgtgtctgagttaagcgaaccgacagtatatgaaataatattgtttggtataaaaaattatggtctgatatatgcaattacattcttctaatggaaaaaatatttgaagatttttctcaaattatggataccaacaacattttcatttataactcttttatttttaatgtgacgaaaaaaaaagttattcttcataaaaatctcttcatgttctaagatttatgatgtaaccatatataaaattttattaattttatacgaggtatataaaaaatatgaatttcgatcaagagtaaactacctttatagttcataacatttaaattagaatgatataattgcacattaaaacataattattaattctaaacacttttcataatagcaattttccatattatgaattaaaatacgtaaataaacaaagttttcgttatgataatgctcgcattttcagcttgtttatcctgaattagaattatcattttaaagtagtaaaactactgttaatggtagattatatttattttaagaaataattttcaaaatagtatatttctccgcgaaatatgaaaaatgttttaacctgacgctcgttcgttaaattgacaaacgtaatttcaattttgtaactgtaataaaagttattttccacgtgaacaaaaataaacagaatttaattttgacgttacgaatatgtataatatgtagttactgtcgccgttacaaattgttctttaccacttgtacagttacgaactgccgcgttaagagatcacggtcacggtataatcactattatatgtaaaactgtcattttagggaagcatcacatgttagcatatgaatatttttaattaatataagtcatgacaatatgaacaaaaagtgattttatattgttttaacttaatttatttattaaaaatttttgaaaactaaatttacaatttatatttttaccactctgcgtaaacagccaataaacaaatttttgtt

SEQ ID NO: 1228 - DNA, 3219 bp, Diabrotica virgifera
  SmartBlast Evalue=3E-19; Info=Transmembrane protein 214-A n=1 Tax=Camponotus floridanus RepID=E2A8B1_9HYME
cacaagcattcactgttaatccaagaaagaaagacggttgcgcagttttcgtgattcagataaagatagaatgactttctatatccgttagggtaaatcagctttattttaggtgcgtttatttatctgcaccgtgttgttatcgtttatccttgaacctttaaaatatcaaaaatcgattgttagctgttgttatcctgttaaagaaaattataaattacagacagtttaaacaggtcgtgtaataaattaatgtgagacatggcttctaaaaagaaaatccaagagaaattggcaatcaaaaagaaaggaggtttcccatataaactattaattctgttgacattggcagttggaggtgcaatttcttatgatatcaaacaacatggcagttggaatgattctcttacaaggaaaacgttaaaagaatataaagtatgtgaatactcacatttggcgatagacagagttaagggcggattacattggacaagtgaaaaaattgaagaacagttcccaggtttgcaacaaaatgttgccgtcttttcagaaccttacgttgagttgctcgttaatctaggaaagattggtcgtaacgtcgcatttaacgtgaaagatgttatcgttgagaagtatcctgttgttgttgaatcggtagaagcttatttaccgggattagttgagaattcacagaaggccataagtgaagtttatgtaacatcagttttatatttcaacagaggtgtagactatcttaaaaatgaagtatttgtgggccaactctcaccggaaaacatgcagagagtggttgtcgaagcatttaatacgacacaacaaaaggctgttgaatactaccactggatttataaaaaagttcagacaagcatcaaatgaaatatgtatgttgattaattaggtttttcaatttatttgaaccaaaaatccgttactaccacaccaacttaggttcagtttcagaaataattttgcatacccctgtatacaagatctatttcgaatgtttgatattagaacttgcagatgtttgtgactttactgttaatattttcataggaatcgtttggttgcgagatattgagtacagtacaaaaataagtttgttggtagttctgctggacagtaataaatctacaattttttatacatttcttgtctttggttatagggtgagaaactagatgaatgaaagcgtactgctaagacatactattatttaagtttattgttttaatttataagttagatgtgcatgtagagaagcggtgtgtaattaggttccatgaaatctcgtaacgtgacagttcgtaactatacaaattcgtaactccaacctttaatttttttagcaaatttagtattactgaatttaataaaaaattcattttgcattcctttgtatactaaaagtaatggtactttttaagacgactttttttttagatatatttcacaccaatttttgcatatgttcttgttaatatgacaactaaagaatacattttttcattttcaacgaaaacatttcgtttataaattcgcaaaagtgtgtgtgttgttgcgttgccgctcgatggattcttatgtagttttttcttctgaatccaaatctgaaaacggcatttcgatatttctaaccgtcttcgagataatcgacctcaaagtctaaaatgtgacgtcacgatcgttttattttctgccgacacactacacgtccagctgaaatcgttgctattaagtaggctagttttttaatctcgattttttaagcaaagcacaggttatttacatttgagtttgacacttcgtgaatgtcaaactaaattttaattaagtattaataaaacatcaatgacatttgatagtgaatttaattattatataaaataaataagatgtccaaaaatacaatttgagtatagtttaaaagcaataatttattaacagctttaaaaaggtttatacgagtatacggcctcccctttatgataaatggactgttccatttgctatgaaattaaaatatagtcggttcgctaaactcgacacaactggctagtgattttagtaggtaatttttttgttttttgcgaattttgccaaaattgggaaaattactaattatttagtaattattaactaatttgtaatcatttttttttgcccaattggcaaaattatcgactaaaatcactagccagttgtgtctgagttaagcgaaccgacagtatatgaaataatattgtttggtataaaaaattatggtctgatatatgcaattacattcttctaatggaaaaaatatttgaagatttttctcaaattatggataccaacaacattttcatttataactcttttatttttaatgtgacgaaaaaaaaagttattcttcataaaaatctcttcatgttctaagatttatgatgtaaccatatataaaattttattaattttatacgaggtatataaaaaatatgaatttcgatcaagagtaaactacctttatagttcataacatttaaattagaatgatataattgcacattaaaacataattattaattctaaacacttttcataatagcaattttccatattatgaattaaaatacgtaaataaacaaagttttcgttatgataatgctcgcattttcagcttgtttatcctgaattagaattatcattttaaagtagtaaaactactgttaatggtagattatatttattttaagaaataattttcaaaatagtatatttctccgcgaaatatgaaaaatgttttaacctgacgctcgttcgttaaattgacaaacgtaatttcaattttgtaactgtaataaaagttattttccacgtgaacaaaaataaacagaatttaattttgacgttacgaatatgtataatatgtagttactgtcgccgttacaaattgttctttaccacttgtacagttacgaactgccgcgttaagagatcacggtcacggtataatcactattatatgtaaaactgtcattttagggaagcatcacatgttagcatatgaatatttttaattaatataagtcatgacaatatgaacaaaaagtgattttatattgttttaacttaatttatttattaaaaatttttgaaaactaaatttacaatttatatttttaccactctgcgtaaacagccaataaacaaatttttgtt

SEQ ID NO: 1229 - DNA, 3219 bp, Diabrotica virgifera
  SmartBlast Evalue=4E-19; Info=Transmembrane protein 214-A n=1 Tax=Camponotus floridanus RepID=E2A8B1_9HYME
cacaagcattcactgttaatccaagaaagaaagacggttgcgcagttttcgtgattcagataaagatagaatgactttctatatccgttagggtaaatcagctttattttaggtgcgtttatttatctgcaccgtgttgttatcgtttatccttgaacctttaaaatatcaaaaatcgattgttagctgttgttatcctgttaaagaaaattataaattacagacagtttaaacaggtcgtgtaataaattaatgtgagacatggcttctaaaaagaaaatccaagagaaattggcaatcaaaaagaaaggaggtttcccatataaactattaattctgttgacattggcagttggaggtgcaatttcttatgatatcaaacaacatggcagttggaatgattctcttacaaggaaaacgttaaaagaatataaagtatgtgaatactcacatttggcgatagacagagttaagggcggattacattggacaagtgaaaaaattgaagaacagttcccaggtttgcaacaaaatgttgccgtcttttcagaaccttacgttgagttgctcgttaatctaggaaagattggtcgtaacgtcgcatttaacgtgaaagatgttatcgttgagaagtatcctgttgttgttgaatcggtagaagcttatttaccgggattagttgagaattcacagaaggccataagtgaagtttatataacatcagttttatatttcaacagaggtgtagactatcttaaaaatgaagtatttgtgggccaactctcaccagaaaacatgcagagagtggttgtcgaagcatttaatacgacacaacaaaaggctgttgaatactaccactggatttataaaaaagttcagacgagcatcaaatgaaatacgtatgttgattaattaggtttttcaatttatttgaaccaaaaatccgttactaccacaccaacttaggttcagtttcagaaataattttgcatacccctgtatacaagatctatttcgaatgtttgatattagaacttgcagatgtttgtgactttactgttaatattttcataggaatcgtttggttgcgagatattgagtacagtacaaaaataagtttgttggtagttctgctggacagtaataaatctacaattttttatacatttcttgtctttggttatagggtgagaaactagatgaatgaaagcgtactgctaagacatactattatttaagtttattgttttaatttataagttagatgtgcatgtagagaagcggtgtgtaattaggttccatgaaatctcgtaacgtgacagttcgtaactatacaaattcgtaactccaacctttaatttttttagcaaatttagtattactgaatttaataaaaaattcattttgcattcctttgtatactaaaagtaatggtactttttaagacgactttttttttagatatatttcacaccaatttttgcatatgttcttgttaatatgacaactaaagaatacattttttcattttcaacgaaaacatttcgtttataaattcgcaaaagtgtgtgtgttgttgcgttgccgctcgatggattcttatgtagttttttcttctgaatccaaatctgaaaacggcatttcgatatttctaaccgtcttcgagataatcgacctcaaagtctaaaatgtgacgtcacgatcgttttattttctgccgacacactacacgtccagctgaaatcgttgctattaagtaggctagttttttaatctcgattttttaagcaaagcacaggttatttacatttgagtttgacacttcgtgaatgtcaaactaaattttaattaagtattaataaaacatcaatgacatttgatagtgaatttaattattatataaaataaataagatgtccaaaaatacaatttgagtatagtttaaaagcaataatttattaacagctttaaaaaggtttatacgagtatacggcctcccctttatgataaatggactgttccatttgctatgaaattaaaatatagtcggttcgctaaactcgacacaactggctagtgattttagtaggtaatttttttgttttttgcgaattttgccaaaattgggaaaattactaattatttagtaattattaactaatttgtaatcatttttttttgcccaattggcaaaattatcgactaaaatcactagccagttgtgtctgagttaagcgaaccgacagtatatgaaataatattgtttggtataaaaaattatggtctgatatatgcaattacattcttctaatggaaaaaatatttgaagatttttctcaaattatggataccaacaacattttcatttataactcttttatttttaatgtgacgaaaaaaaaagttattcttcataaaaatctcttcatgttctaagatttatgatgtaaccatatataaaattttattaattttatacgaggtatataaaaaatatgaatttcgatcaagagtaaactacctttatagttcataacatttaaattagaatgatataattgcacattaaaacataattattaattctaaacacttttcataatagcaattttccatattatgaattaaaatacgtaaataaacaaagttttcgttatgataatgctcgcattttcagcttgtttatcctgaattagaattatcattttaaagtagtaaaactactgttaatggtagattatatttattttaagaaataattttcaaaatagtatatttctccgcgaaatatgaaaaatgttttaacctgacgctcgttcgttaaattgacaaacgtaatttcaattttgtaactgtaataaaagttattttccacgtgaacaaaaataaacagaatttaattttgacgttacgaatatgtataatatgtagttactgtcgccgttacaaattgttctttaccacttgtacagttacgaactgccgcgttaagagatcacggtcacggtataatcactattatatgtaaaactgtcattttagggaagcatcacatgttagcatatgaatatttttaattaatataagtcatgacaatatgaacaaaaagtgattttatattgttttaacttaatttatttattaaaaatttttgaaaactaaatttacaatttatatttttaccactctgcgtaaacagccaataaacaaatttttgtt

SEQ ID NO: 1230 - DNA, 3251 bp, Diabrotica virgifera
  SmartBlast Evalue=3E-19; Info=Transmembrane protein 214-A n=1 Tax=Camponotus floridanus RepID=E2A8B1_9HYME
cacaagcattcactgttaatccaagaaagaaagacggttgcgcagttttcgtgattcagataaagatagaatgactttctatatccgttagggtaaatcagctttattttaggtgcgtttatttatctgcaccgtgttgttatcgtttatccttgaacctttaaaatatcaaaaatcgattgttagctgttgttatcctgttaaagaaaattataaattacagacagtttaaacaggtcgtgtaataaattaatgtgagacatggcttctaaaaagaaaatccaagagaaattggcaatcaaaaagaaaggaggtttcccatataaactattaattctgttgacattggcagttggaggtgcaatttcttatgatatcaaacaacatggcagttggaatgattctcttacaaggaaaacgttaaaagaatataaagtatgtgaatactcacatttggcgatagacagagttaagggcggattacattggacaagtgaaaaaattgaagaacagttcccaggtttgcaacaaaatgttgccgtcttttcagaaccttacgttgagttgctcgttaatctaggaaagattggtcgtaacgtcgcatttaacgtgaaagatgttatcgttgagaagtatcctgttgttgttgaatcggtagaagcttatttaccgggattagttgagaattcacagaaggccataagtgaagtttatgtaacatcagttttatatttcaacagaggtgtagactatcttaaaaatgaagtatttgtgggccaactctcaccggaaaacatgcagagagtggttgtcgaagcatttaatacgacacaacaaaaggctgttgaatactaccactggatttataaaaaagttcagacaagcatcaaatgaaatatgtatgttgattaattaggtttttcaatttatttgaaccaaaaatccgttactaccacaccaacttaggttcagtttcagaaataattttgcatacccctgtatacaagatctatttcgaatgtttgatattagaacttgcagatgtttgtgactttactgttaatattttcataggaatcgtttggttgcgagatattgagtacagtacaaaaataagtttgttggtagttctgctggacagtaataaatctacaattttttatacatttcttgtctttggttatagggtgagaaactagatgaatgaaagcgtactgctaagacatactattatttaagtttattgttttaatttataagttagatgtgcatgtagagaagcggtgtgtaattaggttccatgaaatctcgtaacgtgacagttcgtaactatacaaattcgtaactccaacctttaatttttttagcaaatttagtattactgaatttaataaaaaattcattttgcattcctttgtatactaaaagtaatggtactttttaagacgactttttttttagatatatttcacaccaatttttgcatatgttcttgttaatatgacaactaaagaatacattttttcattttcaacgaaaacatttcgtttataaattcgcaaaagtgtgtgtgttattgcgttgccgctcctgcaatactcagatcagatttatcaatggattcttatgtagttttttcttctgaatccaaatctgaaaacggcatttcgatatttctaaccgtcttcgagataatcgacctcaaagtctaaaatgtgacgtcacgatagttttattttctgccgacacactacacgtccagctgaaatcgttgctattaagtaggctagttttttaatctcgattttttaagcaaagcacaggttatttacatttgagtttgacacttcgtgaatgtcaaactaaattttaattaagtattaataaaacatcaatgacatttgatagtgaatttaattattatataaaataaataagatgtccaaaaatacaatttgagtatagtttaaaagcaataatttattaacagctttaaaaaggtttatacgagtatacggcctcccctttatgataaatggactgttccatttgctatgaaattaaaatatagtcggttcgctaaactcgacacaactggctagtgattttagtaggtaatttttttgttttttgcgaattttgccaaaattgggaaaattactaattatttagtaattattaactaatttgtaatcatttttttttgcccaattggcaaaattatcgactaaaatcactagccagttgtgtctgagttaagcgaaccgacagtatatgaaataatattgtttggtataaaaaattatggtctgatatatgcaattacattcttctaatggaaaaaatatttgaagatttttctcaaattatggataccaacaacattttcatttataactcttttatttttaatgtgacgaaaaaaaaagttattcttcataaaaatctcttcatgttctaagatttatgatgtaaccatatataaaattttattaattttatacgaggtatataaaaaatatgaatttcgatcaagagtaaactacctttatagttcataacttttaaatagttcataacatttaaattagaatgatataattgcacattaaaacataattattaattctaaaccacttttcataatagcaattttcgcaaatgcctatataaacaaagttttcgttatgataatgctcacattttcagcttgtttatcctgaattagaattatcattttaaagtagtaaaactactgttaatggtagattatatttattttaagaaataattttcaaaatagtatatttctccgcgaaatatgaaaaatgttttaacctgacgctcgttcgttaaattgacaaacgtaatttcaattttgtaactgtaataaaagttattttccacgtgaacaaaaataaacagaatttaattttgacgttacgaatatgtataatatgtagttactgtcgccgttacaaattgttctttaccacttgtacagttacgaactgccgcgttaagagatcacggtcacggtataatcactattatatgtaaaactgtcattttagggaagcatcacatgttagcatatgaatatttttaattaatataagtcatgacaatatgaacaaaaagtgattttatattgttttaacttaatttatttattaaaaatttttgaaaactaaatttacaatttatatttttaccactctgcgtaaacagccaataaacaaatttttgtt

SEQ ID NO: 1231 - DNA, 3251 bp, Diabrotica virgifera
  SmartBlast Evalue=4E-19; Info=Transmembrane protein 214-A n=1 Tax=Camponotus floridanus RepID=E2A8B1_9HYME
cacaagcattcactgttaatccaagaaagaaagacggttgcgcagttttcgtgattcagataaagatagaatgactttctatatccgttagggtaaatcagctttattttaggtgcgtttatttatctgcaccgtgttgttatcgtttatccttgaacctttaaaatatcaaaaatcgattgttagctgttgttatcctgttaaagaaaattataaattacagacagtttaaacaggtcgtgtaataaattaatgtgagacatggcttctaaaaagaaaatccaagagaaattggcaatcaaaaagaaaggaggtttcccatataaactattaattctgttgacattggcagttggaggtgcaatttcttatgatatcaaacaacatggcagttggaatgattctcttacaaggaaaacgttaaaagaatataaagtatgtgaatactcacatttggcgatagacagagttaagggcggattacattggacaagtgaaaaaattgaagaacagttcccaggtttgcaacaaaatgttgccgtcttttcagaaccttacgttgagttgctcgttaatctaggaaagattggtcgtaacgtcgcatttaacgtgaaagatgttatcgttgagaagtatcctgttgttgttgaatcggtagaagcttatttaccgggattagttgagaattcacagaaggccataagtgaagtttatataacatcagttttatatttcaacagaggtgtagactatcttaaaaatgaagtatttgtgggccaactctcaccagaaaacatgcagagagtggttgtcgaagcatttaatacgacacaacaaaaggctgttgaatactaccactggatttataaaaaagttcagacgagcatcaaatgaaatacgtatgttgattaattaggtttttcaatttatttgaaccaaaaatccgttactaccacaccaacttaggttcagtttcagaaataattttgcatacccctgtatacaagatctatttcgaatgtttgatattagaacttgcagatgtttgtgactttactgttaatattttcataggaatcgtttggttgcgagatattgagtacagtacaaaaataagtttgttggtagttctgctggacagtaataaatctacaattttttatacatttcttgtctttggttatagggtgagaaactagatgaatgaaagcgtactgctaagacatactattatttaagtttattgttttaatttataagttagatgtgcatgtagagaagcggtgtgtaattaggttccatgaaatctcgtaacgtgacagttcgtaactatacaaattcgtaactccaacctttaatttttttagcaaatttagtattactgaatttaataaaaaattcattttgcattcctttgtatactaaaagtaatggtactttttaagacgactttttttttagatatatttcacaccaatttttgcatatgttcttgttaatatgacaactaaagaatacattttttcattttcaacgaaaacatttcgtttataaattcgcaaaagtgtgtgtgttattgcgttgccgctcctgcaatactcagatcagatttatcaatggattcttatgtagttttttcttctgaatccaaatctgaaaacggcatttcgatatttctaaccgtcttcgagataatcgacctcaaagtctaaaatgtgacgtcacgatagttttattttctgccgacacactacacgtccagctgaaatcgttgctattaagtaggctagttttttaatctcgattttttaagcaaagcacaggttatttacatttgagtttgacacttcgtgaatgtcaaactaaattttaattaagtattaataaaacatcaatgacatttgatagtgaatttaattattatataaaataaataagatgtccaaaaatacaatttgagtatagtttaaaagcaataatttattaacagctttaaaaaggtttatacgagtatacggcctcccctttatgataaatggactgttccatttgctatgaaattaaaatatagtcggttcgctaaactcgacacaactggctagtgattttagtaggtaatttttttgttttttgcgaattttgccaaaattgggaaaattactaattatttagtaattattaactaatttgtaatcatttttttttgcccaattggcaaaattatcgactaaaatcactagccagttgtgtctgagttaagcgaaccgacagtatatgaaataatattgtttggtataaaaaattatggtctgatatatgcaattacattcttctaatggaaaaaatatttgaagatttttctcaaattatggataccaacaacattttcatttataactcttttatttttaatgtgacgaaaaaaaaagttattcttcataaaaatctcttcatgttctaagatttatgatgtaaccatatataaaattttattaattttatacgaggtatataaaaaatatgaatttcgatcaagagtaaactacctttatagttcataacttttaaatagttcataacatttaaattagaatgatataattgcacattaaaacataattattaattctaaaccacttttcataatagcaattttcgcaaatgcctatataaacaaagttttcgttatgataatgctcacattttcagcttgtttatcctgaattagaattatcattttaaagtagtaaaactactgttaatggtagattatatttattttaagaaataattttcaaaatagtatatttctccgcgaaatatgaaaaatgttttaacctgacgctcgttcgttaaattgacaaacgtaatttcaattttgtaactgtaataaaagttattttccacgtgaacaaaaataaacagaatttaattttgacgttacgaatatgtataatatgtagttactgtcgccgttacaaattgttctttaccacttgtacagttacgaactgccgcgttaagagatcacggtcacggtataatcactattatatgtaaaactgtcattttagggaagcatcacatgttagcatatgaatatttttaattaatataagtcatgacaatatgaacaaaaagtgattttatattgttttaacttaatttatttattaaaaatttttgaaaactaaatttacaatttatatttttaccactctgcgtaaacagccaataaacaaatttttgtt

SEQ ID NO: 1232 - DNA, 3226 bp, Diabrotica virgifera
  SmartBlast Evalue=3E-19; Info=Transmembrane protein 214-A n=1 Tax=Camponotus floridanus RepID=E2A8B1_9HYME
cacaagcattcactgttaatccaagaaagaaagacggttgcgcagttttcgtgattcagataaagatagaatgactttctatatccgttagggtaaatcagctttattttaggtgcgtttatttatctgcaccgtgttgttatcgtttatccttgaacctttaaaatatcaaaaatcgattgttagctgttgttatcctgttaaagaaaattataaattacagacagtttaaacaggtcgtgtaataaattaatgtgagacatggcttctaaaaagaaaatccaagagaaattggcaatcaaaaagaaaggaggtttcccatataaactattaattctgttgacattggcagttggaggtgcaatttcttatgatatcaaacaacatggcagttggaatgattctcttacaaggaaaacgttaaaagaatataaagtatgtgaatactcacatttggcgatagacagagttaagggcggattacattggacaagtgaaaaaattgaagaacagttcccaggtttgcaacaaaatgttgccgtcttttcagaaccttacgttgagttgctcgttaatctaggaaagattggtcgtaacgtcgcatttaacgtgaaagatgttatcgttgagaagtatcctgttgttgttgaatcggtagaagcttatttaccgggattagttgagaattcacagaaggccataagtgaagtttatgtaacatcagttttatatttcaacagaggtgtagactatcttaaaaatgaagtatttgtgggccaactctcaccggaaaacatgcagagagtggttgtcgaagcatttaatacgacacaacaaaaggctgttgaatactaccactggatttataaaaaagttcagacaagcatcaaatgaaatatgtatgttgattaattaggtttttcaatttatttgaaccaaaaatccgttactaccacaccaacttaggttcagtttcagaaataattttgcatacccctgtatacaagatctatttcgaatgtttgatattagaacttgcagatgtttgtgactttactgttaatattttcataggaatcgtttggttgcgagatattgagtacagtacaaaaataagtttgttggtagttctgctggacagtaataaatctacaattttttatacatttcttgtctttggttatagggtgagaaactagatgaatgaaagcgtactgctaagacatactattatttaagtttattgttttaatttataagttagatgtgcatgtagagaagcggtgtgtaattaggttccatgaaatctcgtaacgtgacagttcgtaactatacaaattcgtaactccaacctttaatttttttagcaaatttagtattactgaatttaataaaaaattcattttgcattcctttgtatactaaaagtaatggtactttttaagacgactttttttttagatatatttcacaccaatttttgcatatgttcttgttaatatgacaactaaagaatacattttttcattttcaacgaaaacatttcgtttataaattcgcaaaagtgtgtgtgttgttgcgttgccgctcgatggattcttatgtagttttttcttctgaatccaaatctgaaaacggcatttcgatatttctaaccgtcttcgagataatcgacctcaaagtctaaaatgtgacgtcacgatcgttttattttctgccgacacactacacgtccagctgaaatcgttgctattaagtaggctagttttttaatctcgattttttaagcaaagcacaggttatttacatttgagtttgacacttcgtgaatgtcaaactaaattttaattaagtattaataaaacatcaatgacatttgatagtgaatttaattattatataaaataaataagatgtccaaaaatacaatttgagtatagtttaaaagcaataatttattaacagctttaaaaaggtttatacgagtatacggcctcccctttatgataaatggactgttccatttgctatgaaattaaaatatagtcggttcgctaaactcgacacaactggctagtgattttagtaggtaatttttttgttttttgcgaattttgccaaaattgggaaaattactaattatttagtaattattaactaatttgtaatcatttttttttgcccaattggcaaaattatcgactaaaatcactagccagttgtgtctgagttaagcgaaccgacagtatatgaaataatattgtttggtataaaaaattatggtctgatatatgcaattacattcttctaatggaaaaaatatttgaagatttttctcaaattatggataccaacaacattttcatttataactcttttatttttaatgtgacgaaaaaaaaagttattcttcataaaaatctcttcatgttctaagatttatgatgtaaccatatataaaattttattaattttatacgaggtatataaaaaatatgaatttcgatcaagagtaaactacctttatagttcataacttttaaatagttcataacatttaaattagaatgatataattgcacattaaaacataattattaattctaaaccacttttcataatagcaattttcgcaaatgcctatataaacaaagttttcgttatgataatgctcacattttcagcttgtttatcctgaattagaattatcattttaaagtagtaaaactactgttaatggtagattatatttattttaagaaataattttcaaaatagtatatttctccgcgaaatatgaaaaatgttttaacctgacgctcgttcgttaaattgacaaacgtaatttcaattttgtaactgtaataaaagttattttccacgtgaacaaaaataaacagaatttaattttgacgttacgaatatgtataatatgtagttactgtcgccgttacaaattgttctttaccacttgtacagttacgaactgccgcgttaagagatcacggtcacggtataatcactattatatgtaaaactgtcattttagggaagcatcacatgttagcatatgaatatttttaattaatataagtcatgacaatatgaacaaaaagtgattttatattgttttaacttaatttatttattaaaaatttttgaaaactaaatttacaatttatatttttaccactctgcgtaaacagccaataaacaaatttttgtt

SEQ ID NO: 1233 - DNA, 4395 bp, Diabrotica virgifera
  SmartBlast Evalue=2E-81; Info=Transmembrane protein 214-A n=1 Tax=Camponotus floridanus RepID=E2A8B1_9HYME
acaactagcggtggtccagttgtttgaaaagtgtttgaaaatagtaatttttttactttaatatatagatatatagtgtttgtaaaattaaatagtattcaaaaatgtctggacaatgggaagtagtaactaaaaaacgcgataagggaagtaaactgccagtaccaaaagttaataatccaaaggaaataaaaaataataaaaacattctcaatggtgtaaaaatagaggaagttttgccaaaagctcaggtacagagcctttatggtaaatcgaaagaaaataaagttcaagacaaaaataaacctaaggagagtgtgaagaaagcagctgttaagaaagataaacctgtggaaccaccaaagcctaagccaccgaagtccattgaaagtgctcttaattctatcgatgttaacgaatttaaagatatatatgaaaaaaatagaaatcattttcctgatgctcctattgtatggttgaaggaattactgcagtatttaaatcaaaagattcccatcgagagccatgatccagtttttgcatcaaaacctgttaactaccctctcaatgtggttccttctgatttactctctatcatagaaaaagcagtaaaagaagcaggaaaaaacaatgctcagttgtttttcgacatatgcttaacttctatggctactgatatgagcaaaggtcttccttcgataggatataaaatatttttacaatatattgccttgcaagaaccacgtttagttacagaaaatcttcaaaaacacgttagtctaaggaattcgtatcaaaatagacctaacattgggcaatctattctttggggcgtgagccatgtcggatataaagatttcagcagtgggttgatagtttttcaagatctatttctacccttgatagacatgaagaactactcccgctacattctcacttatttagtaaacctaatcaagaacaccaacgaaaaatcacttacactggaagaatctttatcgatattaaacattgtttacagcaacagaaagaacatgcccagtgatttggtacaagaagtgtcgaacaacgtcgctcgtattaaacctttaaactctaaaaaaggcagctctaacattgaaataatgctcaagaatatcgtattaaataataatgcctcatatcaaaagtgcctgtgtgatattttagtggaagctttccaccaagatcaatcggcttttgctgcttggagtaaggcttactctaaaaatgtacaatcaagtgccgtagttcttgaacatataagcaataactggtccacggtatcacataagatcaacaaaagtgctttaactaatttactcaataatttaagtacggtaaacgtagaattatcttcgaaaaaacgtaaggaagaaggactgaaatccagtattaactctatacagaaaatccaagagaaattggcaatcaaaaagaaaggaggtttcccatataaactattaattctgttgacattggcagttggaggtgcaatttcttatgatatcaaacaacatggcagttggaatgattctcttacaaggaaaacgttaaaagaatataaagtatgtgaatactcacatttggcgatagacagagttaagggcggattacattggacaagtgaaaaaattgaagaacagttcccaggtttgcaacaaaatgttgccgtcttttcagaaccttacgttgagttgctcgttaatctaggaaagattggtcgtaacgtcgcatttaacgtgaaagatgttatcgttgagaagtatcctgttgttgttgaatcggtagaagcttatttaccgggattagttgagaattcacagaaggccataagtgaagtttatgtaacatcagttttatatttcaacagaggtgtagactatcttaaaaatgaagtatttgtgggccaactctcaccggaaaacatgcagagagtggttgtcgaagcatttaatacgacacaacaaaaggctgttgaatactaccactggatttataaaaaagttcagacaagcatcaaatgaaatatgtatgttgattaattaggtttttcaatttatttgaaccaaaaatccgttactaccacaccaacttaggttcagtttcagaaataattttgcatacccctgtatacaagatctatttcgaatgtttgatattagaacttgcagatgtttgtgactttactgttaatattttcataggaatcgtttggttgcgagatattgagtacagtacaaaaataagtttgttggtagttctgctggacagtaataaatctacaattttttatacatttcttgtctttggttatagggtgagaaactagatgaatgaaagcgtactgctaagacatactattatttaagtttattgttttaatttataagttagatgtgcatgtagagaagcggtgtgtaattaggttccatgaaatctcgtaacgtgacagttcgtaactatacaaattcgtaactccaacctttaatttttttagcaaatttagtattactgaatttaataaaaaattcattttgcattcctttgtatactaaaagtaatggtactttttaagacgactttttttttagatatatttcacaccaatttttgcatatgttcttgttaatatgacaactaaagaatacattttttcattttcaacgaaaacatttcgtttataaattcgcaaaagtgtgtgtgttattgcgttgccgctcctgcaatactcagatcagatttatcaatggattcttatgtagttttttcttctgaatccaaatctgaaaacggcatttcgatatttctaaccgtcttcgagataatcgacctcaaagtctaaaatgtgacgtcacgatagttttattttctgccgacacactacacgtccagctgaaatcgttgctattaagtaggctagttttttaatctcgattttttaagcaaagcacaggttatttacatttgagtttgacacttcgtgaatgtcaaactaaattttaattaagtattaataaaacatcaatgacatttgatagtgaatttaattattatataaaataaataagatgtccaaaaatacaatttgagtatagtttaaaagcaataatttattaacagctttaaaaaggtttatacgagtatacggcctcccctttatgataaatggactgttccatttgctatgaaattaaaatatagtcggttcgctaaactcgacacaactggctagtgattttagtaggtaatttttttgttttttgcgaattttgccaaaattgggaaaattactaattatttagtaattattaactaatttgtaatcatttttttttgcccaattggcaaaattatcgactaaaatcactagccagttgtgtctgagttaagcgaaccgacagtatatgaaataatattgtttggtataaaaaattatggtctgatatatgcaattacattcttctaatggaaaaaatatttgaagatttttctcaaattatggataccaacaacattttcatttataactcttttatttttaatgtgacgaaaaaaaaagttattcttcataaaaatctcttcatgttctaagatttatgatgtaaccatatataaaattttattaattttatacgaggtatataaaaaatatgaatttcgatcaagagtaaactacctttatagttcataacatttaaattagaatgatataattgcacattaaaacataattattaattctaaacacttttcataatagcaattttccatattatgaattaaaatacgtaaataaacaaagttttcgttatgataatgctcgcattttcagcttgtttatcctgaattagaattatcattttaaagtagtaaaactactgttaatggtagattatatttattttaagaaataattttcaaaatagtatatttctccgcgaaatatgaaaaatgttttaacctgacgctcgttcgttaaattgacaaacgtaatttcaattttgtaactgtaataaaagttattttccacgtgaacaaaaataaacagaatttaattttgacgttacgaatatgtataatatgtagttactgtcgccgttacaaattgttctttaccacttgtacagttacgaactgccgcgttaagagatcacggtcacggtataatcactattatatgtaaaactgtcattttagggaagcatcacatgttagcatatgaatatttttaattaatataagtcatgacaatatgaacaaaaagtgattttatattgttttaacttaatttatttattaaaaatttttgaaaactaaatttacaatttatatttttaccactctgcgtaaacagccaataaacaaatttttgtt

SEQ ID NO: 1234 - DNA, 3226 bp, Diabrotica virgifera
  SmartBlast Evalue=4E-19; Info=Transmembrane protein 214-A n=1 Tax=Camponotus floridanus RepID=E2A8B1_9HYME
cacaagcattcactgttaatccaagaaagaaagacggttgcgcagttttcgtgattcagataaagatagaatgactttctatatccgttagggtaaatcagctttattttaggtgcgtttatttatctgcaccgtgttgttatcgtttatccttgaacctttaaaatatcaaaaatcgattgttagctgttgttatcctgttaaagaaaattataaattacagacagtttaaacaggtcgtgtaataaattaatgtgagacatggcttctaaaaagaaaatccaagagaaattggcaatcaaaaagaaaggaggtttcccatataaactattaattctgttgacattggcagttggaggtgcaatttcttatgatatcaaacaacatggcagttggaatgattctcttacaaggaaaacgttaaaagaatataaagtatgtgaatactcacatttggcgatagacagagttaagggcggattacattggacaagtgaaaaaattgaagaacagttcccaggtttgcaacaaaatgttgccgtcttttcagaaccttacgttgagttgctcgttaatctaggaaagattggtcgtaacgtcgcatttaacgtgaaagatgttatcgttgagaagtatcctgttgttgttgaatcggtagaagcttatttaccgggattagttgagaattcacagaaggccataagtgaagtttatataacatcagttttatatttcaacagaggtgtagactatcttaaaaatgaagtatttgtgggccaactctcaccagaaaacatgcagagagtggttgtcgaagcatttaatacgacacaacaaaaggctgttgaatactaccactggatttataaaaaagttcagacgagcatcaaatgaaatacgtatgttgattaattaggtttttcaatttatttgaaccaaaaatccgttactaccacaccaacttaggttcagtttcagaaataattttgcatacccctgtatacaagatctatttcgaatgtttgatattagaacttgcagatgtttgtgactttactgttaatattttcataggaatcgtttggttgcgagatattgagtacagtacaaaaataagtttgttggtagttctgctggacagtaataaatctacaattttttatacatttcttgtctttggttatagggtgagaaactagatgaatgaaagcgtactgctaagacatactattatttaagtttattgttttaatttataagttagatgtgcatgtagagaagcggtgtgtaattaggttccatgaaatctcgtaacgtgacagttcgtaactatacaaattcgtaactccaacctttaatttttttagcaaatttagtattactgaatttaataaaaaattcattttgcattcctttgtatactaaaagtaatggtactttttaagacgactttttttttagatatatttcacaccaatttttgcatatgttcttgttaatatgacaactaaagaatacattttttcattttcaacgaaaacatttcgtttataaattcgcaaaagtgtgtgtgttgttgcgttgccgctcgatggattcttatgtagttttttcttctgaatccaaatctgaaaacggcatttcgatatttctaaccgtcttcgagataatcgacctcaaagtctaaaatgtgacgtcacgatcgttttattttctgccgacacactacacgtccagctgaaatcgttgctattaagtaggctagttttttaatctcgattttttaagcaaagcacaggttatttacatttgagtttgacacttcgtgaatgtcaaactaaattttaattaagtattaataaaacatcaatgacatttgatagtgaatttaattattatataaaataaataagatgtccaaaaatacaatttgagtatagtttaaaagcaataatttattaacagctttaaaaaggtttatacgagtatacggcctcccctttatgataaatggactgttccatttgctatgaaattaaaatatagtcggttcgctaaactcgacacaactggctagtgattttagtaggtaatttttttgttttttgcgaattttgccaaaattgggaaaattactaattatttagtaattattaactaatttgtaatcatttttttttgcccaattggcaaaattatcgactaaaatcactagccagttgtgtctgagttaagcgaaccgacagtatatgaaataatattgtttggtataaaaaattatggtctgatatatgcaattacattcttctaatggaaaaaatatttgaagatttttctcaaattatggataccaacaacattttcatttataactcttttatttttaatgtgacgaaaaaaaaagttattcttcataaaaatctcttcatgttctaagatttatgatgtaaccatatataaaattttattaattttatacgaggtatataaaaaatatgaatttcgatcaagagtaaactacctttatagttcataacttttaaatagttcataacatttaaattagaatgatataattgcacattaaaacataattattaattctaaaccacttttcataatagcaattttcgcaaatgcctatataaacaaagttttcgttatgataatgctcacattttcagcttgtttatcctgaattagaattatcattttaaagtagtaaaactactgttaatggtagattatatttattttaagaaataattttcaaaatagtatatttctccgcgaaatatgaaaaatgttttaacctgacgctcgttcgttaaattgacaaacgtaatttcaattttgtaactgtaataaaagttattttccacgtgaacaaaaataaacagaatttaattttgacgttacgaatatgtataatatgtagttactgtcgccgttacaaattgttctttaccacttgtacagttacgaactgccgcgttaagagatcacggtcacggtataatcactattatatgtaaaactgtcattttagggaagcatcacatgttagcatatgaatatttttaattaatataagtcatgacaatatgaacaaaaagtgattttatattgttttaacttaatttatttattaaaaatttttgaaaactaaatttacaatttatatttttaccactctgcgtaaacagccaataaacaaatttttgtt

SEQ ID NO: 1235 - DNA, 3042 bp, Diabrotica virgifera
  SmartBlast Evalue=3E-19; Info=Transmembrane protein 214-A n=1 Tax=Camponotus floridanus RepID=E2A8B1_9HYME
cacaagcattcactgttaatccaagaaagaaagacggttgcgcagttttcgtgattcagataaagatagaatgactttctatatccgttagggtaaatcagctttattttaggtgcgtttatttatctgcaccgtgttgttatcgtttatccttgaacctttaaaatatcaaaaatcgattgttagctgttgttatcctgttaaagaaaattataaattacagacagtttaaacaggtcgtgtaataaattaatgtgagacatggcttctaaaaagaaaatccaagagaaattggcaatcaaaaagaaaggaggtttcccatataaactattaattctgttgacattggcagttggaggtgcaatttcttatgatatcaaacaacatggcagttggaatgattctcttacaaggaaaacgttaaaagaatataaagtatgtgaatactcacatttggcgatagacagagttaagggcggattacattggacaagtgaaaaaattgaagaacagttcccaggtttgcaacaaaatgttgccgtcttttcagaaccttacgttgagttgctcgttaatctaggaaagattggtcgtaacgtcgcatttaacgtgaaagatgttatcgttgagaagtatcctgttgttgttgaatcggtagaagcttatttaccgggattagttgagaattcacagaaggccataagtgaagtttatgtaacatcagttttatatttcaacagaggtgtagactatcttaaaaatgaagtatttgtgggccaactctcaccggaaaacatgcagagagtggttgtcgaagcatttaatacgacacaacaaaaggctgttgaatactaccactggatttataaaaaagttcagacaagcatcaaatgaaatatgtatgttgattaattaggtttttcaatttatttgaaccaaaaatccgttactaccacaccaacttaggttcagtttcagaaataattttgcatacccctgtatacaagatctatttcgaatgtttgatattagaacttgcagatgtttgtgactttactgttaatattttcataggaatcgtttggttgcgagatattgagtacagtacaaaaataagtttgttggtagttctgctggacagtaataaatctacaattttttatacatttcttgtctttggttatagggtgagaaactagatgaatgaaagcgtactgctaagacatactattatttaagtttattgttttaatttataagttagatgtgcatgtagagaagcggtgtgtaattaggttccatgaaatctcgtaacgtgacagttcgtaactatacaaattcgtaactccaacctttaatttttttagcaaatttagtattactgaatttaataaaaaattcattttgcattcctttgtatactaaaagtaatggtactttttaagacgactttttttttagatatatttcacaccaatttttgcatatgttcttgttaatatgacaactaaagaatacattttttcattttcaacgaaaacatttcgtttataaattcgcaaaagtgtgtgtgttattgcgttgccgctcctgcaatactcagatcagatttatcaatggattcttatgtagttttttcttctgaatccaaatctgaaaacggcatttcgatatttctaaccgtcttcgagataatcgacctcaaagtctaaaatgtgacgtcacgatagttttattttctgccgacacactacacgtccagctgaaatcgttgctattaagtaggctagttttttaatctcgattttttaagcaaagcacaggttatttacatttgagtttgacacttcgtgaatgtcaaactaaattttaattaagtattaataaaacatcaatgacatttgatagtgaatttaattattatataaaataaataagatgtccaaaaatacaatttgagtatagtttaaaagcaataatttattaacagctttaaaaaggtttatacgagtatacggcctcccctttatgataaatggactgttccatttgctatgaaattaaaatatagtcggttcgctaaactcgacacaactggctagtgattttagtaggtaatttttttgttttttgcgaattttgccaaaattgggaaaattactaattatttagtaattattaactaatttgtaatcatttttttttgcccaattggcaaaattatcgactaaaatcactagccagttgtgtctgagttaagcgaaccgacagtatatgaaataatattgtttggtataaaaaattatggtctgatatatgcaattacattcttctaatggaaaaaatatttgaagatttttctcaaattatggataccaacaacattttcatttataactcttttatttttaatgtgacgaaaaaaaaagttattcttcataaaaatctcttcatgttctaagatttatgatgtaaccatatataaaattttattaattttatacgaggtatataaaaaatatgaatttcgatcaagagtaaactacctttatagttcataacatttaaattagaatgatataattgcacattaaaacataattattaattctaaacacttttcataatagcaattttccatattatgaattaaaatacgtaaataaacaaagttttcgttatgataatgctcgcattttcagcttgttattatgttttgttattgctattaaaatttactgttttctttttatggggttttagaacaagcaaaatgttgatcaagaatgacagttcacaagataaattccttgttgaacgcattgtcgaaaaaatgacaattcgcaaattatttatcggagttgacagttactaagctacactgtagcttaggaataccagactattgtttcgatttcgaacccagtgcaaaaatgtatagggatttacgtaaaattggctacaaaattcagctggtttgaaaaacttgaattttatttcgtttaatgaggtttcagaacaagcaacttcatatcaagaatg

SEQ ID NO: 1236 - DNA, 3042 bp, Diabrotica virgifera
  SmartBlast Evalue=4E-19; Info=Transmembrane protein 214-A n=1 Tax=Camponotus floridanus RepID=E2A8B1_9HYME
cacaagcattcactgttaatccaagaaagaaagacggttgcgcagttttcgtgattcagataaagatagaatgactttctatatccgttagggtaaatcagctttattttaggtgcgtttatttatctgcaccgtgttgttatcgtttatccttgaacctttaaaatatcaaaaatcgattgttagctgttgttatcctgttaaagaaaattataaattacagacagtttaaacaggtcgtgtaataaattaatgtgagacatggcttctaaaaagaaaatccaagagaaattggcaatcaaaaagaaaggaggtttcccatataaactattaattctgttgacattggcagttggaggtgcaatttcttatgatatcaaacaacatggcagttggaatgattctcttacaaggaaaacgttaaaagaatataaagtatgtgaatactcacatttggcgatagacagagttaagggcggattacattggacaagtgaaaaaattgaagaacagttcccaggtttgcaacaaaatgttgccgtcttttcagaaccttacgttgagttgctcgttaatctaggaaagattggtcgtaacgtcgcatttaacgtgaaagatgttatcgttgagaagtatcctgttgttgttgaatcggtagaagcttatttaccgggattagttgagaattcacagaaggccataagtgaagtttatataacatcagttttatatttcaacagaggtgtagactatcttaaaaatgaagtatttgtgggccaactctcaccagaaaacatgcagagagtggttgtcgaagcatttaatacgacacaacaaaaggctgttgaatactaccactggatttataaaaaagttcagacgagcatcaaatgaaatacgtatgttgattaattaggtttttcaatttatttgaaccaaaaatccgttactaccacaccaacttaggttcagtttcagaaataattttgcatacccctgtatacaagatctatttcgaatgtttgatattagaacttgcagatgtttgtgactttactgttaatattttcataggaatcgtttggttgcgagatattgagtacagtacaaaaataagtttgttggtagttctgctggacagtaataaatctacaattttttatacatttcttgtctttggttatagggtgagaaactagatgaatgaaagcgtactgctaagacatactattatttaagtttattgttttaatttataagttagatgtgcatgtagagaagcggtgtgtaattaggttccatgaaatctcgtaacgtgacagttcgtaactatacaaattcgtaactccaacctttaatttttttagcaaatttagtattactgaatttaataaaaaattcattttgcattcctttgtatactaaaagtaatggtactttttaagacgactttttttttagatatatttcacaccaatttttgcatatgttcttgttaatatgacaactaaagaatacattttttcattttcaacgaaaacatttcgtttataaattcgcaaaagtgtgtgtgttattgcgttgccgctcctgcaatactcagatcagatttatcaatggattcttatgtagttttttcttctgaatccaaatctgaaaacggcatttcgatatttctaaccgtcttcgagataatcgacctcaaagtctaaaatgtgacgtcacgatagttttattttctgccgacacactacacgtccagctgaaatcgttgctattaagtaggctagttttttaatctcgattttttaagcaaagcacaggttatttacatttgagtttgacacttcgtgaatgtcaaactaaattttaattaagtattaataaaacatcaatgacatttgatagtgaatttaattattatataaaataaataagatgtccaaaaatacaatttgagtatagtttaaaagcaataatttattaacagctttaaaaaggtttatacgagtatacggcctcccctttatgataaatggactgttccatttgctatgaaattaaaatatagtcggttcgctaaactcgacacaactggctagtgattttagtaggtaatttttttgttttttgcgaattttgccaaaattgggaaaattactaattatttagtaattattaactaatttgtaatcatttttttttgcccaattggcaaaattatcgactaaaatcactagccagttgtgtctgagttaagcgaaccgacagtatatgaaataatattgtttggtataaaaaattatggtctgatatatgcaattacattcttctaatggaaaaaatatttgaagatttttctcaaattatggataccaacaacattttcatttataactcttttatttttaatgtgacgaaaaaaaaagttattcttcataaaaatctcttcatgttctaagatttatgatgtaaccatatataaaattttattaattttatacgaggtatataaaaaatatgaatttcgatcaagagtaaactacctttatagttcataacatttaaattagaatgatataattgcacattaaaacataattattaattctaaacacttttcataatagcaattttccatattatgaattaaaatacgtaaataaacaaagttttcgttatgataatgctcgcattttcagcttgttattatgttttgttattgctattaaaatttactgttttctttttatggggttttagaacaagcaaaatgttgatcaagaatgacagttcacaagataaattccttgttgaacgcattgtcgaaaaaatgacaattcgcaaattatttatcggagttgacagttactaagctacactgtagcttaggaataccagactattgtttcgatttcgaacccagtgcaaaaatgtatagggatttacgtaaaattggctacaaaattcagctggtttgaaaaacttgaattttatttcgtttaatgaggtttcagaacaagcaacttcatatcaagaatg

SEQ ID NO: 1237 - DNA, 3017 bp, Diabrotica virgifera
  SmartBlast Evalue=3E-19; Info=Transmembrane protein 214-A n=1 Tax=Camponotus floridanus RepID=E2A8B1_9HYME
cacaagcattcactgttaatccaagaaagaaagacggttgcgcagttttcgtgattcagataaagatagaatgactttctatatccgttagggtaaatcagctttattttaggtgcgtttatttatctgcaccgtgttgttatcgtttatccttgaacctttaaaatatcaaaaatcgattgttagctgttgttatcctgttaaagaaaattataaattacagacagtttaaacaggtcgtgtaataaattaatgtgagacatggcttctaaaaagaaaatccaagagaaattggcaatcaaaaagaaaggaggtttcccatataaactattaattctgttgacattggcagttggaggtgcaatttcttatgatatcaaacaacatggcagttggaatgattctcttacaaggaaaacgttaaaagaatataaagtatgtgaatactcacatttggcgatagacagagttaagggcggattacattggacaagtgaaaaaattgaagaacagttcccaggtttgcaacaaaatgttgccgtcttttcagaaccttacgttgagttgctcgttaatctaggaaagattggtcgtaacgtcgcatttaacgtgaaagatgttatcgttgagaagtatcctgttgttgttgaatcggtagaagcttatttaccgggattagttgagaattcacagaaggccataagtgaagtttatgtaacatcagttttatatttcaacagaggtgtagactatcttaaaaatgaagtatttgtgggccaactctcaccggaaaacatgcagagagtggttgtcgaagcatttaatacgacacaacaaaaggctgttgaatactaccactggatttataaaaaagttcagacaagcatcaaatgaaatatgtatgttgattaattaggtttttcaatttatttgaaccaaaaatccgttactaccacaccaacttaggttcagtttcagaaataattttgcatacccctgtatacaagatctatttcgaatgtttgatattagaacttgcagatgtttgtgactttactgttaatattttcataggaatcgtttggttgcgagatattgagtacagtacaaaaataagtttgttggtagttctgctggacagtaataaatctacaattttttatacatttcttgtctttggttatagggtgagaaactagatgaatgaaagcgtactgctaagacatactattatttaagtttattgttttaatttataagttagatgtgcatgtagagaagcggtgtgtaattaggttccatgaaatctcgtaacgtgacagttcgtaactatacaaattcgtaactccaacctttaatttttttagcaaatttagtattactgaatttaataaaaaattcattttgcattcctttgtatactaaaagtaatggtactttttaagacgactttttttttagatatatttcacaccaatttttgcatatgttcttgttaatatgacaactaaagaatacattttttcattttcaacgaaaacatttcgtttataaattcgcaaaagtgtgtgtgttgttgcgttgccgctcgatggattcttatgtagttttttcttctgaatccaaatctgaaaacggcatttcgatatttctaaccgtcttcgagataatcgacctcaaagtctaaaatgtgacgtcacgatcgttttattttctgccgacacactacacgtccagctgaaatcgttgctattaagtaggctagttttttaatctcgattttttaagcaaagcacaggttatttacatttgagtttgacacttcgtgaatgtcaaactaaattttaattaagtattaataaaacatcaatgacatttgatagtgaatttaattattatataaaataaataagatgtccaaaaatacaatttgagtatagtttaaaagcaataatttattaacagctttaaaaaggtttatacgagtatacggcctcccctttatgataaatggactgttccatttgctatgaaattaaaatatagtcggttcgctaaactcgacacaactggctagtgattttagtaggtaatttttttgttttttgcgaattttgccaaaattgggaaaattactaattatttagtaattattaactaatttgtaatcatttttttttgcccaattggcaaaattatcgactaaaatcactagccagttgtgtctgagttaagcgaaccgacagtatatgaaataatattgtttggtataaaaaattatggtctgatatatgcaattacattcttctaatggaaaaaatatttgaagatttttctcaaattatggataccaacaacattttcatttataactcttttatttttaatgtgacgaaaaaaaaagttattcttcataaaaatctcttcatgttctaagatttatgatgtaaccatatataaaattttattaattttatacgaggtatataaaaaatatgaatttcgatcaagagtaaactacctttatagttcataacatttaaattagaatgatataattgcacattaaaacataattattaattctaaacacttttcataatagcaattttccatattatgaattaaaatacgtaaataaacaaagttttcgttatgataatgctcgcattttcagcttgttattatgttttgttattgctattaaaatttactgttttctttttatggggttttagaacaagcaaaatgttgatcaagaatgacagttcacaagataaattccttgttgaacgcattgtcgaaaaaatgacaattcgcaaattatttatcggagttgacagttactaagctacactgtagcttaggaataccagactattgtttcgatttcgaacccagtgcaaaaatgtatagggatttacgtaaaattggctacaaaattcagctggtttgaaaaacttgaattttatttcgtttaatgaggtttcagaacaagcaacttcatatcaagaatg

SEQ ID NO: 1238 - DNA, 3017 bp, Diabrotica virgifera
  SmartBlast Evalue=4E-19; Info=Transmembrane protein 214-A n=1 Tax=Camponotus floridanus RepID=E2A8B1_9HYME
cacaagcattcactgttaatccaagaaagaaagacggttgcgcagttttcgtgattcagataaagatagaatgactttctatatccgttagggtaaatcagctttattttaggtgcgtttatttatctgcaccgtgttgttatcgtttatccttgaacctttaaaatatcaaaaatcgattgttagctgttgttatcctgttaaagaaaattataaattacagacagtttaaacaggtcgtgtaataaattaatgtgagacatggcttctaaaaagaaaatccaagagaaattggcaatcaaaaagaaaggaggtttcccatataaactattaattctgttgacattggcagttggaggtgcaatttcttatgatatcaaacaacatggcagttggaatgattctcttacaaggaaaacgttaaaagaatataaagtatgtgaatactcacatttggcgatagacagagttaagggcggattacattggacaagtgaaaaaattgaagaacagttcccaggtttgcaacaaaatgttgccgtcttttcagaaccttacgttgagttgctcgttaatctaggaaagattggtcgtaacgtcgcatttaacgtgaaagatgttatcgttgagaagtatcctgttgttgttgaatcggtagaagcttatttaccgggattagttgagaattcacagaaggccataagtgaagtttatataacatcagttttatatttcaacagaggtgtagactatcttaaaaatgaagtatttgtgggccaactctcaccagaaaacatgcagagagtggttgtcgaagcatttaatacgacacaacaaaaggctgttgaatactaccactggatttataaaaaagttcagacgagcatcaaatgaaatacgtatgttgattaattaggtttttcaatttatttgaaccaaaaatccgttactaccacaccaacttaggttcagtttcagaaataattttgcatacccctgtatacaagatctatttcgaatgtttgatattagaacttgcagatgtttgtgactttactgttaatattttcataggaatcgtttggttgcgagatattgagtacagtacaaaaataagtttgttggtagttctgctggacagtaataaatctacaattttttatacatttcttgtctttggttatagggtgagaaactagatgaatgaaagcgtactgctaagacatactattatttaagtttattgttttaatttataagttagatgtgcatgtagagaagcggtgtgtaattaggttccatgaaatctcgtaacgtgacagttcgtaactatacaaattcgtaactccaacctttaatttttttagcaaatttagtattactgaatttaataaaaaattcattttgcattcctttgtatactaaaagtaatggtactttttaagacgactttttttttagatatatttcacaccaatttttgcatatgttcttgttaatatgacaactaaagaatacattttttcattttcaacgaaaacatttcgtttataaattcgcaaaagtgtgtgtgttgttgcgttgccgctcgatggattcttatgtagttttttcttctgaatccaaatctgaaaacggcatttcgatatttctaaccgtcttcgagataatcgacctcaaagtctaaaatgtgacgtcacgatcgttttattttctgccgacacactacacgtccagctgaaatcgttgctattaagtaggctagttttttaatctcgattttttaagcaaagcacaggttatttacatttgagtttgacacttcgtgaatgtcaaactaaattttaattaagtattaataaaacatcaatgacatttgatagtgaatttaattattatataaaataaataagatgtccaaaaatacaatttgagtatagtttaaaagcaataatttattaacagctttaaaaaggtttatacgagtatacggcctcccctttatgataaatggactgttccatttgctatgaaattaaaatatagtcggttcgctaaactcgacacaactggctagtgattttagtaggtaatttttttgttttttgcgaattttgccaaaattgggaaaattactaattatttagtaattattaactaatttgtaatcatttttttttgcccaattggcaaaattatcgactaaaatcactagccagttgtgtctgagttaagcgaaccgacagtatatgaaataatattgtttggtataaaaaattatggtctgatatatgcaattacattcttctaatggaaaaaatatttgaagatttttctcaaattatggataccaacaacattttcatttataactcttttatttttaatgtgacgaaaaaaaaagttattcttcataaaaatctcttcatgttctaagatttatgatgtaaccatatataaaattttattaattttatacgaggtatataaaaaatatgaatttcgatcaagagtaaactacctttatagttcataacatttaaattagaatgatataattgcacattaaaacataattattaattctaaacacttttcataatagcaattttccatattatgaattaaaatacgtaaataaacaaagttttcgttatgataatgctcgcattttcagcttgttattatgttttgttattgctattaaaatttactgttttctttttatggggttttagaacaagcaaaatgttgatcaagaatgacagttcacaagataaattccttgttgaacgcattgtcgaaaaaatgacaattcgcaaattatttatcggagttgacagttactaagctacactgtagcttaggaataccagactattgtttcgatttcgaacccagtgcaaaaatgtatagggatttacgtaaaattggctacaaaattcagctggtttgaaaaacttgaattttatttcgtttaatgaggtttcagaacaagcaacttcatatcaagaatg

SEQ ID NO: 1239 - DNA, 1857 bp, Diabrotica virgifera
ccccgatcaccagatttaactatttggttttctttttaattggggcttcttaacaacagaaagtttacgaaagaaatctaaatcatagataatattgaagatctgaaacaagcaattattaatgccgttagagaagtcaccccagacatgctaataagagcttataaagaatttaaaatagggagagttgttttaaagctaatggatgctacttcgaatagttgtttttttttatttactgctagttttcaacgaaatcatttcgtttataaattcgcaaaagtgtgtgtgttattgcgttgccgctcctgcaatactcagatcagatttatcgatggattcttatgtagtttcttcttctgaatccaaatctgaaaacgcatttcgatatttctaaccgtcttcgagataatcgacctcaaagtctaaaatgtgacgtcacaatcgttttattttctgccgacacactacacgtccagctgaaatcgttgctattaagtaggctagtttttttaatctcgatttgttaagcaaagcataggttatttacatttgagtttgacacttcgtgaatgtcaaactaaattttaaattaagtattaataaaacatcaatgacatttgatagtgaatttaattattatataaaataaataagatgttcaaaaatacaatttgagtatattttaaaagcaataatttattaacagctaaaggtttatacgagtatacggcctcccctttatgataaatggactgttccatttgctatgaaattaaaatgccaaaattggcaaaattactaattatttagtaattattaactaattagtaatctaaaatcactagacagttgtgtctgagtttagcgaaccgacagtatatgaaataatattgtttggtataaaaaattatggtctgatatgtgcaattacatccttctaatggaaaaaatatttgaagatttttctcaaattatggataccaacaacattttcatttataactcttttatttttaatttgacgaagaaaagttattcttcataaaaaagctcttcatgttctaagatttatgatgcaacaaccatcatatataaaattttattaattttatacgaggtatataaaaaatatgaatttcgatcaagagtaaactacctttatagttcataacatttaaattagaatgatataattgcacattaaaacataattattaattctaaacacttttcataatagcaattttccatattatgaattaaaatacgtaaataaacaaagttttcgttatgataatgctcgcattttcagcttgtttatcctgaattagaattatcattttaaagtagtaaaactactgttaatggtagattatatttattttaagaaataattttcaaaatagtatatttctccgcgaaatatgaaaaatgttttaacctgacgctcgttcgttaaattgacaaacgtaatttcaattttgtaactgtaataaaagttattttccacgtgaacaaaaataaacagaatttaattttgacgttacgaatatgtataatatgtagttactgtcgccgttacaaattgttctttaccacttgtacagttacgaactgccgcgttaagagatcacggtcacggtataatcactattatatgtaaaactgtcattttagggaagcatcacatgttagcatatgaatatttttaattaatataagtcatgacaatatgaacaaaaagtgattttatattgttttaacttaatttatttattaaaaatttttgaaaactaaatttacaatttatatttttaccactctgcgtaaacagccaataaacaaatttttgtt

SEQ ID NO: 1240 - DNA, 1745 bp, Diabrotica virgifera
ttagaattgtttcattaaatttataattattaaaatttattgcattaatgcacaatcttgagtttttaactttatcgcagagaaaatgttgaaaaaatattttttattattgtaagtaaataatattttaaaattattttcaacgaaaacatttcgtttataaattcgcaaaagtgtgtgtgttattgcgttgccgctcctgcaatactcagataagatttatcgatggattcttatgtaattgcttctgaatccaaatctgaaaacgcatttcgatatttctaaccgtcttcgagataatcgacctcaaagtctaaaatgtgacgtcacaatcgttttattttctgccgacacactacacgtccagctgaaatcgttgctattaagtaggctagtttttttaatctcgatttgttaagcaaagcataggttatttacatttgagtttgacacttcgtgaatgtcaaactaaattttaaattaagtattaataaaacatcaatgacatttgatagtgaatttaattattatataaaataaataagatgttcaaaaatacaatttgagtatattttaaaagcaataatttattaacagctaaaggtttatacgagtatacggcctcccctttatgataaatggactgttccatttgctatgaaattaaaatgccaaaattggcaaaattactaattatttagtaattattaactaattagtaatctaaaatcactagacagttgtgtctgagtttagcgaaccgacagtatatgaaataatattgtttggtataaaaaattatggtctgatatgtgcaattacatccttctaatggaaaaaatatttgaagatttttctcaaattatggataccaacaacattttcatttataactcttttatttttaatttgacgaagaaaagttattcttcataaaaaagctcttcatgttctaagatttatgatgcaacaaccatcatatataaaattttattaattttatacgaggtatataaaaaatatgaatttcgatcaagagtaaactacctttatagttcataacatttaaattagaatgatataattgcacattaaaacataattattaattctaaacacttttcataatagcaattttccatattatgaattaaaatacgtaaataaacaaagttttcgttatgataatgctcgcattttcagcttgtttatcctgaattagaattatcattttaaagtagtaaaactactgttaatggtagattatatttattttaagaaataattttcaaaatagtatatttctccgcgaaatatgaaaaatgttttaacctgacgctcgttcgttaaattgacaaacgtaatttcaattttgtaactgtaataaaagttattttccacgtgaacaaaaataaacagaatttaattttgacgttacgaatatgtataatatgtagttactgtcgccgttacaaattgttctttaccacttgtacagttacgaactgccgcgttaagagatcacggtcacggtataatcactattatatgtaaaactgtcattttagggaagcatcacatgttagcatatgaatatttttaattaatataagtcatgacaatatgaacaaaaagtgattttatattgttttaacttaatttatttattaaaaatttttgaaaactaaatttacaatttatatttttaccactctgcgtaaacagccaataaacaaatttttgtt

SEQ ID NO: 1241 - DNA, 1655 bp, Diabrotica virgifera
ccccgatcaccagatttaactatttggttttctttttaattggggcttcttaacaacagaaagtttacgaaagaaatctaaatcatagataatattgaagatctgaaacaagcaattattaatgccgttagagaagtcaccccagacatgctaataagagcttataaagaatttaaaatagggagagttgttttaaagctaatggatgctacttcgaatagttgtttttttttatttactgctagttttcaacgaaatcatttcgtttataaattcgcaaaagtgtgtgtgttattgcgttgccgctcctgcaatactcagatcagatttatcgatggattcttatgtagtttcttcttctgaatccaaatctgaaaacgcatttcgatatttctaaccgtcttcgagataatcgacctcaaagtctaaaatgtgacgtcacaatcgttttattttctgccgacacactacacgtccagctgaaatcgttgctattaagtaggctagtttttttaatctcgatttgttaagcaaagcataggttatttacatttgagtttgacacttcgtgaatgtcaaactaaattttaaattaagtattaataaaacatcaatgacatttgatagtgaatttaattattatataaaataaataagatgttcaaaaatacaatttgagtatattttaaaagcaataatttattaacagctaaaggtttatacgagtatacggcctcccctttatgataaatggactgttccatttgctatgaaattaaaatgccaaaattggcaaaattactaattatttagtaattattaactaattagtaatctaaaatcactagacagttgtgtctgagtttagcgaaccgacagtatatgaaataatattgtttggtataaaaaattatggtctgatatgtgcaattacatccttctaatggaaaaaatatttgaagatttttctcaaattatggataccaacaacattttcatttataactcttttatttttaatttgacgaagaaaagttattcttcataaaaaagctcttcatgttctaagatttatgatgcaacaaccatcatatataaaattttattaattttatacgaggtatataaaaaatatgaatttcgatcaagagtaaactacctttatagttcataacatttaaattagaatgatataattgcacattaaaacataattattaattctaaacacttttcataatagcaattttccatattatgaattaaaatacgtaaataaacaaagttttcgttatgataatgctcgcattttcagcttgttattatgttttgttattgctattaaaatttactgttttctttttatggggttttagaacaagcaaaatgttgatcaagaatgacagttcacaagataaattccttgttgaacgcattgtcgaaaaaatgacaattcgcaaattatttatcggagttgacagttactaagctacactgtagcttaggaataccagactattgtttcgatttcgaacccagtgcaaaaatgtatagggatttacgtaaaattggctacaaaattcagctggtttgaaaaacttgaattttatttcgtttaatgaggtttcagaacaagcaacttcatatcaagaatg

SEQ ID NO: 1242 - DNA, 1543 bp, Diabrotica virgifera
ttagaattgtttcattaaatttataattattaaaatttattgcattaatgcacaatcttgagtttttaactttatcgcagagaaaatgttgaaaaaatattttttattattgtaagtaaataatattttaaaattattttcaacgaaaacatttcgtttataaattcgcaaaagtgtgtgtgttattgcgttgccgctcctgcaatactcagataagatttatcgatggattcttatgtaattgcttctgaatccaaatctgaaaacgcatttcgatatttctaaccgtcttcgagataatcgacctcaaagtctaaaatgtgacgtcacaatcgttttattttctgccgacacactacacgtccagctgaaatcgttgctattaagtaggctagtttttttaatctcgatttgttaagcaaagcataggttatttacatttgagtttgacacttcgtgaatgtcaaactaaattttaaattaagtattaataaaacatcaatgacatttgatagtgaatttaattattatataaaataaataagatgttcaaaaatacaatttgagtatattttaaaagcaataatttattaacagctaaaggtttatacgagtatacggcctcccctttatgataaatggactgttccatttgctatgaaattaaaatgccaaaattggcaaaattactaattatttagtaattattaactaattagtaatctaaaatcactagacagttgtgtctgagtttagcgaaccgacagtatatgaaataatattgtttggtataaaaaattatggtctgatatgtgcaattacatccttctaatggaaaaaatatttgaagatttttctcaaattatggataccaacaacattttcatttataactcttttatttttaatttgacgaagaaaagttattcttcataaaaaagctcttcatgttctaagatttatgatgcaacaaccatcatatataaaattttattaattttatacgaggtatataaaaaatatgaatttcgatcaagagtaaactacctttatagttcataacatttaaattagaatgatataattgcacattaaaacataattattaattctaaacacttttcataatagcaattttccatattatgaattaaaatacgtaaataaacaaagttttcgttatgataatgctcgcattttcagcttgttattatgttttgttattgctattaaaatttactgttttctttttatggggttttagaacaagcaaaatgttgatcaagaatgacagttcacaagataaattccttgttgaacgcattgtcgaaaaaatgacaattcgcaaattatttatcggagttgacagttactaagctacactgtagcttaggaataccagactattgtttcgatttcgaacccagtgcaaaaatgtatagggatttacgtaaaattggctacaaaattcagctggtttgaaaaacttgaattttatttcgtttaatgaggtttcagaacaagcaacttcatatcaagaatg

SEQ ID NO: 1243 - DNA, 4395 bp, Diabrotica virgifera
  SmartBlast Evalue=2E-81; Info=Transmembrane protein 214-A n=1 Tax=Camponotus floridanus RepID=E2A8B1_9HYME
acaactagcggtggtccagttgtttgaaaagtgtttgaaaatagtaatttttttactttaatatatagatatatagtgtttgtaaaattaaatagtattcaaaaatgtctggacaatgggaagtagtaactaaaaaacgcgataagggaagtaaactgccagtaccaaaagttaataatccaaaggaaataaaaaataataaaaacattctcaatggtgtaaaaatagaggaagttttgccaaaagctcaggtacagagcctttatggtaaatcgaaagaaaataaagttcaagacaaaaataaacctaaggagagtgtgaagaaagcagctgttaagaaagataaacctgtggaaccaccaaagcctaagccaccgaagtccattgaaagtgctcttaattctatcgatgttaacgaatttaaagatatatatgaaaaaaatagaaatcattttcctgatgctcctattgtatggttgaaggaattactgcagtatttaaatcaaaagattcccatcgagagccatgatccagtttttgcatcaaaacctgttaactaccctctcaatgtggttccttctgatttactctctatcatagaaaaagcagtaaaagaagcaggaaaaaacaatgctcagttgtttttcgacatatgcttaacttctatggctactgatatgagcaaaggtcttccttcgataggatataaaatatttttacaatatattgccttgcaagaaccacgtttagttacagaaaatcttcaaaaacacgttagtctaaggaattcgtatcaaaatagacctaacattgggcaatctattctttggggcgtgagccatgtcggatataaagatttcagcagtgggttgatagtttttcaagatctatttctacccttgatagacatgaagaactactcccgctacattctcacttatttagtaaacctaatcaagaacaccaacgaaaaatcacttacactggaagaatctttatcgatattaaacattgtttacagcaacagaaagaacatgcccagtgatttggtacaagaagtgtcgaacaacgtcgctcgtattaaacctttaaactctaaaaaaggcagctctaacattgaaataatgctcaagaatatcgtattaaataataatgcctcatatcaaaagtgcctgtgtgatattttagtggaagctttccaccaagatcaatcggcttttgctgcttggagtaaggcttactctaaaaatgtacaatcaagtgccgtagttcttgaacatataagcaataactggtccacggtatcacataagatcaacaaaagtgctttaactaatttactcaataatttaagtacggtaaacgtagaattatcttcgaaaaaacgtaaggaagaaggactgaaatccagtattaactctatacagaaaatccaagagaaattggcaatcaaaaagaaaggaggtttcccatataaactattaattctgttgacattggcagttggaggtgcaatttcttatgatatcaaacaacatggcagttggaatgattctcttacaaggaaaacgttaaaagaatataaagtatgtgaatactcacatttggcgatagacagagttaagggcggattacattggacaagtgaaaaaattgaagaacagttcccaggtttgcaacaaaatgttgccgtcttttcagaaccttacgttgagttgctcgttaatctaggaaagattggtcgtaacgtcgcatttaacgtgaaagatgttatcgttgagaagtatcctgttgttgttgaatcggtagaagcttatttaccgggattagttgagaattcacagaaggccataagtgaagtttatataacatcagttttatatttcaacagaggtgtagactatcttaaaaatgaagtatttgtgggccaactctcaccagaaaacatgcagagagtggttgtcgaagcatttaatacgacacaacaaaaggctgttgaatactaccactggatttataaaaaagttcagacgagcatcaaatgaaatacgtatgttgattaattaggtttttcaatttatttgaaccaaaaatccgttactaccacaccaacttaggttcagtttcagaaataattttgcatacccctgtatacaagatctatttcgaatgtttgatattagaacttgcagatgtttgtgactttactgttaatattttcataggaatcgtttggttgcgagatattgagtacagtacaaaaataagtttgttggtagttctgctggacagtaataaatctacaattttttatacatttcttgtctttggttatagggtgagaaactagatgaatgaaagcgtactgctaagacatactattatttaagtttattgttttaatttataagttagatgtgcatgtagagaagcggtgtgtaattaggttccatgaaatctcgtaacgtgacagttcgtaactatacaaattcgtaactccaacctttaatttttttagcaaatttagtattactgaatttaataaaaaattcattttgcattcctttgtatactaaaagtaatggtactttttaagacgactttttttttagatatatttcacaccaatttttgcatatgttcttgttaatatgacaactaaagaatacattttttcattttcaacgaaaacatttcgtttataaattcgcaaaagtgtgtgtgttattgcgttgccgctcctgcaatactcagatcagatttatcaatggattcttatgtagttttttcttctgaatccaaatctgaaaacggcatttcgatatttctaaccgtcttcgagataatcgacctcaaagtctaaaatgtgacgtcacgatagttttattttctgccgacacactacacgtccagctgaaatcgttgctattaagtaggctagttttttaatctcgattttttaagcaaagcacaggttatttacatttgagtttgacacttcgtgaatgtcaaactaaattttaattaagtattaataaaacatcaatgacatttgatagtgaatttaattattatataaaataaataagatgtccaaaaatacaatttgagtatagtttaaaagcaataatttattaacagctttaaaaaggtttatacgagtatacggcctcccctttatgataaatggactgttccatttgctatgaaattaaaatatagtcggttcgctaaactcgacacaactggctagtgattttagtaggtaatttttttgttttttgcgaattttgccaaaattgggaaaattactaattatttagtaattattaactaatttgtaatcatttttttttgcccaattggcaaaattatcgactaaaatcactagccagttgtgtctgagttaagcgaaccgacagtatatgaaataatattgtttggtataaaaaattatggtctgatatatgcaattacattcttctaatggaaaaaatatttgaagatttttctcaaattatggataccaacaacattttcatttataactcttttatttttaatgtgacgaaaaaaaaagttattcttcataaaaatctcttcatgttctaagatttatgatgtaaccatatataaaattttattaattttatacgaggtatataaaaaatatgaatttcgatcaagagtaaactacctttatagttcataacatttaaattagaatgatataattgcacattaaaacataattattaattctaaacacttttcataatagcaattttccatattatgaattaaaatacgtaaataaacaaagttttcgttatgataatgctcgcattttcagcttgtttatcctgaattagaattatcattttaaagtagtaaaactactgttaatggtagattatatttattttaagaaataattttcaaaatagtatatttctccgcgaaatatgaaaaatgttttaacctgacgctcgttcgttaaattgacaaacgtaatttcaattttgtaactgtaataaaagttattttccacgtgaacaaaaataaacagaatttaattttgacgttacgaatatgtataatatgtagttactgtcgccgttacaaattgttctttaccacttgtacagttacgaactgccgcgttaagagatcacggtcacggtataatcactattatatgtaaaactgtcattttagggaagcatcacatgttagcatatgaatatttttaattaatataagtcatgacaatatgaacaaaaagtgattttatattgttttaacttaatttatttattaaaaatttttgaaaactaaatttacaatttatatttttaccactctgcgtaaacagccaataaacaaatttttgtt

SEQ ID NO: 1244 - DNA, 4370 bp, Diabrotica virgifera
  SmartBlast Evalue=2E-81; Info=Transmembrane protein 214-A n=1 Tax=Camponotus floridanus RepID=E2A8B1_9HYME
acaactagcggtggtccagttgtttgaaaagtgtttgaaaatagtaatttttttactttaatatatagatatatagtgtttgtaaaattaaatagtattcaaaaatgtctggacaatgggaagtagtaactaaaaaacgcgataagggaagtaaactgccagtaccaaaagttaataatccaaaggaaataaaaaataataaaaacattctcaatggtgtaaaaatagaggaagttttgccaaaagctcaggtacagagcctttatggtaaatcgaaagaaaataaagttcaagacaaaaataaacctaaggagagtgtgaagaaagcagctgttaagaaagataaacctgtggaaccaccaaagcctaagccaccgaagtccattgaaagtgctcttaattctatcgatgttaacgaatttaaagatatatatgaaaaaaatagaaatcattttcctgatgctcctattgtatggttgaaggaattactgcagtatttaaatcaaaagattcccatcgagagccatgatccagtttttgcatcaaaacctgttaactaccctctcaatgtggttccttctgatttactctctatcatagaaaaagcagtaaaagaagcaggaaaaaacaatgctcagttgtttttcgacatatgcttaacttctatggctactgatatgagcaaaggtcttccttcgataggatataaaatatttttacaatatattgccttgcaagaaccacgtttagttacagaaaatcttcaaaaacacgttagtctaaggaattcgtatcaaaatagacctaacattgggcaatctattctttggggcgtgagccatgtcggatataaagatttcagcagtgggttgatagtttttcaagatctatttctacccttgatagacatgaagaactactcccgctacattctcacttatttagtaaacctaatcaagaacaccaacgaaaaatcacttacactggaagaatctttatcgatattaaacattgtttacagcaacagaaagaacatgcccagtgatttggtacaagaagtgtcgaacaacgtcgctcgtattaaacctttaaactctaaaaaaggcagctctaacattgaaataatgctcaagaatatcgtattaaataataatgcctcatatcaaaagtgcctgtgtgatattttagtggaagctttccaccaagatcaatcggcttttgctgcttggagtaaggcttactctaaaaatgtacaatcaagtgccgtagttcttgaacatataagcaataactggtccacggtatcacataagatcaacaaaagtgctttaactaatttactcaataatttaagtacggtaaacgtagaattatcttcgaaaaaacgtaaggaagaaggactgaaatccagtattaactctatacagaaaatccaagagaaattggcaatcaaaaagaaaggaggtttcccatataaactattaattctgttgacattggcagttggaggtgcaatttcttatgatatcaaacaacatggcagttggaatgattctcttacaaggaaaacgttaaaagaatataaagtatgtgaatactcacatttggcgatagacagagttaagggcggattacattggacaagtgaaaaaattgaagaacagttcccaggtttgcaacaaaatgttgccgtcttttcagaaccttacgttgagttgctcgttaatctaggaaagattggtcgtaacgtcgcatttaacgtgaaagatgttatcgttgagaagtatcctgttgttgttgaatcggtagaagcttatttaccgggattagttgagaattcacagaaggccataagtgaagtttatgtaacatcagttttatatttcaacagaggtgtagactatcttaaaaatgaagtatttgtgggccaactctcaccggaaaacatgcagagagtggttgtcgaagcatttaatacgacacaacaaaaggctgttgaatactaccactggatttataaaaaagttcagacaagcatcaaatgaaatatgtatgttgattaattaggtttttcaatttatttgaaccaaaaatccgttactaccacaccaacttaggttcagtttcagaaataattttgcatacccctgtatacaagatctatttcgaatgtttgatattagaacttgcagatgtttgtgactttactgttaatattttcataggaatcgtttggttgcgagatattgagtacagtacaaaaataagtttgttggtagttctgctggacagtaataaatctacaattttttatacatttcttgtctttggttatagggtgagaaactagatgaatgaaagcgtactgctaagacatactattatttaagtttattgttttaatttataagttagatgtgcatgtagagaagcggtgtgtaattaggttccatgaaatctcgtaacgtgacagttcgtaactatacaaattcgtaactccaacctttaatttttttagcaaatttagtattactgaatttaataaaaaattcattttgcattcctttgtatactaaaagtaatggtactttttaagacgactttttttttagatatatttcacaccaatttttgcatatgttcttgttaatatgacaactaaagaatacattttttcattttcaacgaaaacatttcgtttataaattcgcaaaagtgtgtgtgttgttgcgttgccgctcgatggattcttatgtagttttttcttctgaatccaaatctgaaaacggcatttcgatatttctaaccgtcttcgagataatcgacctcaaagtctaaaatgtgacgtcacgatcgttttattttctgccgacacactacacgtccagctgaaatcgttgctattaagtaggctagttttttaatctcgattttttaagcaaagcacaggttatttacatttgagtttgacacttcgtgaatgtcaaactaaattttaattaagtattaataaaacatcaatgacatttgatagtgaatttaattattatataaaataaataagatgtccaaaaatacaatttgagtatagtttaaaagcaataatttattaacagctttaaaaaggtttatacgagtatacggcctcccctttatgataaatggactgttccatttgctatgaaattaaaatatagtcggttcgctaaactcgacacaactggctagtgattttagtaggtaatttttttgttttttgcgaattttgccaaaattgggaaaattactaattatttagtaattattaactaatttgtaatcatttttttttgcccaattggcaaaattatcgactaaaatcactagccagttgtgtctgagttaagcgaaccgacagtatatgaaataatattgtttggtataaaaaattatggtctgatatatgcaattacattcttctaatggaaaaaatatttgaagatttttctcaaattatggataccaacaacattttcatttataactcttttatttttaatgtgacgaaaaaaaaagttattcttcataaaaatctcttcatgttctaagatttatgatgtaaccatatataaaattttattaattttatacgaggtatataaaaaatatgaatttcgatcaagagtaaactacctttatagttcataacatttaaattagaatgatataattgcacattaaaacataattattaattctaaacacttttcataatagcaattttccatattatgaattaaaatacgtaaataaacaaagttttcgttatgataatgctcgcattttcagcttgtttatcctgaattagaattatcattttaaagtagtaaaactactgttaatggtagattatatttattttaagaaataattttcaaaatagtatatttctccgcgaaatatgaaaaatgttttaacctgacgctcgttcgttaaattgacaaacgtaatttcaattttgtaactgtaataaaagttattttccacgtgaacaaaaataaacagaatttaattttgacgttacgaatatgtataatatgtagttactgtcgccgttacaaattgttctttaccacttgtacagttacgaactgccgcgttaagagatcacggtcacggtataatcactattatatgtaaaactgtcattttagggaagcatcacatgttagcatatgaatatttttaattaatataagtcatgacaatatgaacaaaaagtgattttatattgttttaacttaatttatttattaaaaatttttgaaaactaaatttacaatttatatttttaccactctgcgtaaacagccaataaacaaatttttgtt

SEQ ID NO: 1245 - DNA, 4370 bp, Diabrotica virgifera
  SmartBlast Evalue=2E-81; Info=Transmembrane protein 214-A n=1 Tax=Camponotus floridanus RepID=E2A8B1_9HYME
acaactagcggtggtccagttgtttgaaaagtgtttgaaaatagtaatttttttactttaatatatagatatatagtgtttgtaaaattaaatagtattcaaaaatgtctggacaatgggaagtagtaactaaaaaacgcgataagggaagtaaactgccagtaccaaaagttaataatccaaaggaaataaaaaataataaaaacattctcaatggtgtaaaaatagaggaagttttgccaaaagctcaggtacagagcctttatggtaaatcgaaagaaaataaagttcaagacaaaaataaacctaaggagagtgtgaagaaagcagctgttaagaaagataaacctgtggaaccaccaaagcctaagccaccgaagtccattgaaagtgctcttaattctatcgatgttaacgaatttaaagatatatatgaaaaaaatagaaatcattttcctgatgctcctattgtatggttgaaggaattactgcagtatttaaatcaaaagattcccatcgagagccatgatccagtttttgcatcaaaacctgttaactaccctctcaatgtggttccttctgatttactctctatcatagaaaaagcagtaaaagaagcaggaaaaaacaatgctcagttgtttttcgacatatgcttaacttctatggctactgatatgagcaaaggtcttccttcgataggatataaaatatttttacaatatattgccttgcaagaaccacgtttagttacagaaaatcttcaaaaacacgttagtctaaggaattcgtatcaaaatagacctaacattgggcaatctattctttggggcgtgagccatgtcggatataaagatttcagcagtgggttgatagtttttcaagatctatttctacccttgatagacatgaagaactactcccgctacattctcacttatttagtaaacctaatcaagaacaccaacgaaaaatcacttacactggaagaatctttatcgatattaaacattgtttacagcaacagaaagaacatgcccagtgatttggtacaagaagtgtcgaacaacgtcgctcgtattaaacctttaaactctaaaaaaggcagctctaacattgaaataatgctcaagaatatcgtattaaataataatgcctcatatcaaaagtgcctgtgtgatattttagtggaagctttccaccaagatcaatcggcttttgctgcttggagtaaggcttactctaaaaatgtacaatcaagtgccgtagttcttgaacatataagcaataactggtccacggtatcacataagatcaacaaaagtgctttaactaatttactcaataatttaagtacggtaaacgtagaattatcttcgaaaaaacgtaaggaagaaggactgaaatccagtattaactctatacagaaaatccaagagaaattggcaatcaaaaagaaaggaggtttcccatataaactattaattctgttgacattggcagttggaggtgcaatttcttatgatatcaaacaacatggcagttggaatgattctcttacaaggaaaacgttaaaagaatataaagtatgtgaatactcacatttggcgatagacagagttaagggcggattacattggacaagtgaaaaaattgaagaacagttcccaggtttgcaacaaaatgttgccgtcttttcagaaccttacgttgagttgctcgttaatctaggaaagattggtcgtaacgtcgcatttaacgtgaaagatgttatcgttgagaagtatcctgttgttgttgaatcggtagaagcttatttaccgggattagttgagaattcacagaaggccataagtgaagtttatataacatcagttttatatttcaacagaggtgtagactatcttaaaaatgaagtatttgtgggccaactctcaccagaaaacatgcagagagtggttgtcgaagcatttaatacgacacaacaaaaggctgttgaatactaccactggatttataaaaaagttcagacgagcatcaaatgaaatacgtatgttgattaattaggtttttcaatttatttgaaccaaaaatccgttactaccacaccaacttaggttcagtttcagaaataattttgcatacccctgtatacaagatctatttcgaatgtttgatattagaacttgcagatgtttgtgactttactgttaatattttcataggaatcgtttggttgcgagatattgagtacagtacaaaaataagtttgttggtagttctgctggacagtaataaatctacaattttttatacatttcttgtctttggttatagggtgagaaactagatgaatgaaagcgtactgctaagacatactattatttaagtttattgttttaatttataagttagatgtgcatgtagagaagcggtgtgtaattaggttccatgaaatctcgtaacgtgacagttcgtaactatacaaattcgtaactccaacctttaatttttttagcaaatttagtattactgaatttaataaaaaattcattttgcattcctttgtatactaaaagtaatggtactttttaagacgactttttttttagatatatttcacaccaatttttgcatatgttcttgttaatatgacaactaaagaatacattttttcattttcaacgaaaacatttcgtttataaattcgcaaaagtgtgtgtgttgttgcgttgccgctcgatggattcttatgtagttttttcttctgaatccaaatctgaaaacggcatttcgatatttctaaccgtcttcgagataatcgacctcaaagtctaaaatgtgacgtcacgatcgttttattttctgccgacacactacacgtccagctgaaatcgttgctattaagtaggctagttttttaatctcgattttttaagcaaagcacaggttatttacatttgagtttgacacttcgtgaatgtcaaactaaattttaattaagtattaataaaacatcaatgacatttgatagtgaatttaattattatataaaataaataagatgtccaaaaatacaatttgagtatagtttaaaagcaataatttattaacagctttaaaaaggtttatacgagtatacggcctcccctttatgataaatggactgttccatttgctatgaaattaaaatatagtcggttcgctaaactcgacacaactggctagtgattttagtaggtaatttttttgttttttgcgaattttgccaaaattgggaaaattactaattatttagtaattattaactaatttgtaatcatttttttttgcccaattggcaaaattatcgactaaaatcactagccagttgtgtctgagttaagcgaaccgacagtatatgaaataatattgtttggtataaaaaattatggtctgatatatgcaattacattcttctaatggaaaaaatatttgaagatttttctcaaattatggataccaacaacattttcatttataactcttttatttttaatgtgacgaaaaaaaaagttattcttcataaaaatctcttcatgttctaagatttatgatgtaaccatatataaaattttattaattttatacgaggtatataaaaaatatgaatttcgatcaagagtaaactacctttatagttcataacatttaaattagaatgatataattgcacattaaaacataattattaattctaaacacttttcataatagcaattttccatattatgaattaaaatacgtaaataaacaaagttttcgttatgataatgctcgcattttcagcttgtttatcctgaattagaattatcattttaaagtagtaaaactactgttaatggtagattatatttattttaagaaataattttcaaaatagtatatttctccgcgaaatatgaaaaatgttttaacctgacgctcgttcgttaaattgacaaacgtaatttcaattttgtaactgtaataaaagttattttccacgtgaacaaaaataaacagaatttaattttgacgttacgaatatgtataatatgtagttactgtcgccgttacaaattgttctttaccacttgtacagttacgaactgccgcgttaagagatcacggtcacggtataatcactattatatgtaaaactgtcattttagggaagcatcacatgttagcatatgaatatttttaattaatataagtcatgacaatatgaacaaaaagtgattttatattgttttaacttaatttatttattaaaaatttttgaaaactaaatttacaatttatatttttaccactctgcgtaaacagccaataaacaaatttttgtt

SEQ ID NO: 1246 - DNA, 4402 bp, Diabrotica virgifera
  SmartBlast Evalue=2E-81; Info=Transmembrane protein 214-A n=1 Tax=Camponotus floridanus RepID=E2A8B1_9HYME
acaactagcggtggtccagttgtttgaaaagtgtttgaaaatagtaatttttttactttaatatatagatatatagtgtttgtaaaattaaatagtattcaaaaatgtctggacaatgggaagtagtaactaaaaaacgcgataagggaagtaaactgccagtaccaaaagttaataatccaaaggaaataaaaaataataaaaacattctcaatggtgtaaaaatagaggaagttttgccaaaagctcaggtacagagcctttatggtaaatcgaaagaaaataaagttcaagacaaaaataaacctaaggagagtgtgaagaaagcagctgttaagaaagataaacctgtggaaccaccaaagcctaagccaccgaagtccattgaaagtgctcttaattctatcgatgttaacgaatttaaagatatatatgaaaaaaatagaaatcattttcctgatgctcctattgtatggttgaaggaattactgcagtatttaaatcaaaagattcccatcgagagccatgatccagtttttgcatcaaaacctgttaactaccctctcaatgtggttccttctgatttactctctatcatagaaaaagcagtaaaagaagcaggaaaaaacaatgctcagttgtttttcgacatatgcttaacttctatggctactgatatgagcaaaggtcttccttcgataggatataaaatatttttacaatatattgccttgcaagaaccacgtttagttacagaaaatcttcaaaaacacgttagtctaaggaattcgtatcaaaatagacctaacattgggcaatctattctttggggcgtgagccatgtcggatataaagatttcagcagtgggttgatagtttttcaagatctatttctacccttgatagacatgaagaactactcccgctacattctcacttatttagtaaacctaatcaagaacaccaacgaaaaatcacttacactggaagaatctttatcgatattaaacattgtttacagcaacagaaagaacatgcccagtgatttggtacaagaagtgtcgaacaacgtcgctcgtattaaacctttaaactctaaaaaaggcagctctaacattgaaataatgctcaagaatatcgtattaaataataatgcctcatatcaaaagtgcctgtgtgatattttagtggaagctttccaccaagatcaatcggcttttgctgcttggagtaaggcttactctaaaaatgtacaatcaagtgccgtagttcttgaacatataagcaataactggtccacggtatcacataagatcaacaaaagtgctttaactaatttactcaataatttaagtacggtaaacgtagaattatcttcgaaaaaacgtaaggaagaaggactgaaatccagtattaactctatacagaaaatccaagagaaattggcaatcaaaaagaaaggaggtttcccatataaactattaattctgttgacattggcagttggaggtgcaatttcttatgatatcaaacaacatggcagttggaatgattctcttacaaggaaaacgttaaaagaatataaagtatgtgaatactcacatttggcgatagacagagttaagggcggattacattggacaagtgaaaaaattgaagaacagttcccaggtttgcaacaaaatgttgccgtcttttcagaaccttacgttgagttgctcgttaatctaggaaagattggtcgtaacgtcgcatttaacgtgaaagatgttatcgttgagaagtatcctgttgttgttgaatcggtagaagcttatttaccgggattagttgagaattcacagaaggccataagtgaagtttatgtaacatcagttttatatttcaacagaggtgtagactatcttaaaaatgaagtatttgtgggccaactctcaccggaaaacatgcagagagtggttgtcgaagcatttaatacgacacaacaaaaggctgttgaatactaccactggatttataaaaaagttcagacaagcatcaaatgaaatatgtatgttgattaattaggtttttcaatttatttgaaccaaaaatccgttactaccacaccaacttaggttcagtttcagaaataattttgcatacccctgtatacaagatctatttcgaatgtttgatattagaacttgcagatgtttgtgactttactgttaatattttcataggaatcgtttggttgcgagatattgagtacagtacaaaaataagtttgttggtagttctgctggacagtaataaatctacaattttttatacatttcttgtctttggttatagggtgagaaactagatgaatgaaagcgtactgctaagacatactattatttaagtttattgttttaatttataagttagatgtgcatgtagagaagcggtgtgtaattaggttccatgaaatctcgtaacgtgacagttcgtaactatacaaattcgtaactccaacctttaatttttttagcaaatttagtattactgaatttaataaaaaattcattttgcattcctttgtatactaaaagtaatggtactttttaagacgactttttttttagatatatttcacaccaatttttgcatatgttcttgttaatatgacaactaaagaatacattttttcattttcaacgaaaacatttcgtttataaattcgcaaaagtgtgtgtgttattgcgttgccgctcctgcaatactcagatcagatttatcaatggattcttatgtagttttttcttctgaatccaaatctgaaaacggcatttcgatatttctaaccgtcttcgagataatcgacctcaaagtctaaaatgtgacgtcacgatagttttattttctgccgacacactacacgtccagctgaaatcgttgctattaagtaggctagttttttaatctcgattttttaagcaaagcacaggttatttacatttgagtttgacacttcgtgaatgtcaaactaaattttaattaagtattaataaaacatcaatgacatttgatagtgaatttaattattatataaaataaataagatgtccaaaaatacaatttgagtatagtttaaaagcaataatttattaacagctttaaaaaggtttatacgagtatacggcctcccctttatgataaatggactgttccatttgctatgaaattaaaatatagtcggttcgctaaactcgacacaactggctagtgattttagtaggtaatttttttgttttttgcgaattttgccaaaattgggaaaattactaattatttagtaattattaactaatttgtaatcatttttttttgcccaattggcaaaattatcgactaaaatcactagccagttgtgtctgagttaagcgaaccgacagtatatgaaataatattgtttggtataaaaaattatggtctgatatatgcaattacattcttctaatggaaaaaatatttgaagatttttctcaaattatggataccaacaacattttcatttataactcttttatttttaatgtgacgaaaaaaaaagttattcttcataaaaatctcttcatgttctaagatttatgatgtaaccatatataaaattttattaattttatacgaggtatataaaaaatatgaatttcgatcaagagtaaactacctttatagttcataacttttaaatagttcataacatttaaattagaatgatataattgcacattaaaacataattattaattctaaaccacttttcataatagcaattttcgcaaatgcctatataaacaaagttttcgttatgataatgctcacattttcagcttgtttatcctgaattagaattatcattttaaagtagtaaaactactgttaatggtagattatatttattttaagaaataattttcaaaatagtatatttctccgcgaaatatgaaaaatgttttaacctgacgctcgttcgttaaattgacaaacgtaatttcaattttgtaactgtaataaaagttattttccacgtgaacaaaaataaacagaatttaattttgacgttacgaatatgtataatatgtagttactgtcgccgttacaaattgttctttaccacttgtacagttacgaactgccgcgttaagagatcacggtcacggtataatcactattatatgtaaaactgtcattttagggaagcatcacatgttagcatatgaatatttttaattaatataagtcatgacaatatgaacaaaaagtgattttatattgttttaacttaatttatttattaaaaatttttgaaaactaaatttacaatttatatttttaccactctgcgtaaacagccaataaacaaatttttgtt

SEQ ID NO: 1247 - DNA, 4402 bp, Diabrotica virgifera
  SmartBlast Evalue=2E-81; Info=Transmembrane protein 214-A n=1 Tax=Camponotus floridanus RepID=E2A8B1_9HYME
acaactagcggtggtccagttgtttgaaaagtgtttgaaaatagtaatttttttactttaatatatagatatatagtgtttgtaaaattaaatagtattcaaaaatgtctggacaatgggaagtagtaactaaaaaacgcgataagggaagtaaactgccagtaccaaaagttaataatccaaaggaaataaaaaataataaaaacattctcaatggtgtaaaaatagaggaagttttgccaaaagctcaggtacagagcctttatggtaaatcgaaagaaaataaagttcaagacaaaaataaacctaaggagagtgtgaagaaagcagctgttaagaaagataaacctgtggaaccaccaaagcctaagccaccgaagtccattgaaagtgctcttaattctatcgatgttaacgaatttaaagatatatatgaaaaaaatagaaatcattttcctgatgctcctattgtatggttgaaggaattactgcagtatttaaatcaaaagattcccatcgagagccatgatccagtttttgcatcaaaacctgttaactaccctctcaatgtggttccttctgatttactctctatcatagaaaaagcagtaaaagaagcaggaaaaaacaatgctcagttgtttttcgacatatgcttaacttctatggctactgatatgagcaaaggtcttccttcgataggatataaaatatttttacaatatattgccttgcaagaaccacgtttagttacagaaaatcttcaaaaacacgttagtctaaggaattcgtatcaaaatagacctaacattgggcaatctattctttggggcgtgagccatgtcggatataaagatttcagcagtgggttgatagtttttcaagatctatttctacccttgatagacatgaagaactactcccgctacattctcacttatttagtaaacctaatcaagaacaccaacgaaaaatcacttacactggaagaatctttatcgatattaaacattgtttacagcaacagaaagaacatgcccagtgatttggtacaagaagtgtcgaacaacgtcgctcgtattaaacctttaaactctaaaaaaggcagctctaacattgaaataatgctcaagaatatcgtattaaataataatgcctcatatcaaaagtgcctgtgtgatattttagtggaagctttccaccaagatcaatcggcttttgctgcttggagtaaggcttactctaaaaatgtacaatcaagtgccgtagttcttgaacatataagcaataactggtccacggtatcacataagatcaacaaaagtgctttaactaatttactcaataatttaagtacggtaaacgtagaattatcttcgaaaaaacgtaaggaagaaggactgaaatccagtattaactctatacagaaaatccaagagaaattggcaatcaaaaagaaaggaggtttcccatataaactattaattctgttgacattggcagttggaggtgcaatttcttatgatatcaaacaacatggcagttggaatgattctcttacaaggaaaacgttaaaagaatataaagtatgtgaatactcacatttggcgatagacagagttaagggcggattacattggacaagtgaaaaaattgaagaacagttcccaggtttgcaacaaaatgttgccgtcttttcagaaccttacgttgagttgctcgttaatctaggaaagattggtcgtaacgtcgcatttaacgtgaaagatgttatcgttgagaagtatcctgttgttgttgaatcggtagaagcttatttaccgggattagttgagaattcacagaaggccataagtgaagtttatataacatcagttttatatttcaacagaggtgtagactatcttaaaaatgaagtatttgtgggccaactctcaccagaaaacatgcagagagtggttgtcgaagcatttaatacgacacaacaaaaggctgttgaatactaccactggatttataaaaaagttcagacgagcatcaaatgaaatacgtatgttgattaattaggtttttcaatttatttgaaccaaaaatccgttactaccacaccaacttaggttcagtttcagaaataattttgcatacccctgtatacaagatctatttcgaatgtttgatattagaacttgcagatgtttgtgactttactgttaatattttcataggaatcgtttggttgcgagatattgagtacagtacaaaaataagtttgttggtagttctgctggacagtaataaatctacaattttttatacatttcttgtctttggttatagggtgagaaactagatgaatgaaagcgtactgctaagacatactattatttaagtttattgttttaatttataagttagatgtgcatgtagagaagcggtgtgtaattaggttccatgaaatctcgtaacgtgacagttcgtaactatacaaattcgtaactccaacctttaatttttttagcaaatttagtattactgaatttaataaaaaattcattttgcattcctttgtatactaaaagtaatggtactttttaagacgactttttttttagatatatttcacaccaatttttgcatatgttcttgttaatatgacaactaaagaatacattttttcattttcaacgaaaacatttcgtttataaattcgcaaaagtgtgtgtgttattgcgttgccgctcctgcaatactcagatcagatttatcaatggattcttatgtagttttttcttctgaatccaaatctgaaaacggcatttcgatatttctaaccgtcttcgagataatcgacctcaaagtctaaaatgtgacgtcacgatagttttattttctgccgacacactacacgtccagctgaaatcgttgctattaagtaggctagttttttaatctcgattttttaagcaaagcacaggttatttacatttgagtttgacacttcgtgaatgtcaaactaaattttaattaagtattaataaaacatcaatgacatttgatagtgaatttaattattatataaaataaataagatgtccaaaaatacaatttgagtatagtttaaaagcaataatttattaacagctttaaaaaggtttatacgagtatacggcctcccctttatgataaatggactgttccatttgctatgaaattaaaatatagtcggttcgctaaactcgacacaactggctagtgattttagtaggtaatttttttgttttttgcgaattttgccaaaattgggaaaattactaattatttagtaattattaactaatttgtaatcatttttttttgcccaattggcaaaattatcgactaaaatcactagccagttgtgtctgagttaagcgaaccgacagtatatgaaataatattgtttggtataaaaaattatggtctgatatatgcaattacattcttctaatggaaaaaatatttgaagatttttctcaaattatggataccaacaacattttcatttataactcttttatttttaatgtgacgaaaaaaaaagttattcttcataaaaatctcttcatgttctaagatttatgatgtaaccatatataaaattttattaattttatacgaggtatataaaaaatatgaatttcgatcaagagtaaactacctttatagttcataacttttaaatagttcataacatttaaattagaatgatataattgcacattaaaacataattattaattctaaaccacttttcataatagcaattttcgcaaatgcctatataaacaaagttttcgttatgataatgctcacattttcagcttgtttatcctgaattagaattatcattttaaagtagtaaaactactgttaatggtagattatatttattttaagaaataattttcaaaatagtatatttctccgcgaaatatgaaaaatgttttaacctgacgctcgttcgttaaattgacaaacgtaatttcaattttgtaactgtaataaaagttattttccacgtgaacaaaaataaacagaatttaattttgacgttacgaatatgtataatatgtagttactgtcgccgttacaaattgttctttaccacttgtacagttacgaactgccgcgttaagagatcacggtcacggtataatcactattatatgtaaaactgtcattttagggaagcatcacatgttagcatatgaatatttttaattaatataagtcatgacaatatgaacaaaaagtgattttatattgttttaacttaatttatttattaaaaatttttgaaaactaaatttacaatttatatttttaccactctgcgtaaacagccaataaacaaatttttgtt

SEQ ID NO: 1248 - DNA, 4377 bp, Diabrotica virgifera
  SmartBlast Evalue=2E-81; Info=Transmembrane protein 214-A n=1 Tax=Camponotus floridanus RepID=E2A8B1_9HYME
acaactagcggtggtccagttgtttgaaaagtgtttgaaaatagtaatttttttactttaatatatagatatatagtgtttgtaaaattaaatagtattcaaaaatgtctggacaatgggaagtagtaactaaaaaacgcgataagggaagtaaactgccagtaccaaaagttaataatccaaaggaaataaaaaataataaaaacattctcaatggtgtaaaaatagaggaagttttgccaaaagctcaggtacagagcctttatggtaaatcgaaagaaaataaagttcaagacaaaaataaacctaaggagagtgtgaagaaagcagctgttaagaaagataaacctgtggaaccaccaaagcctaagccaccgaagtccattgaaagtgctcttaattctatcgatgttaacgaatttaaagatatatatgaaaaaaatagaaatcattttcctgatgctcctattgtatggttgaaggaattactgcagtatttaaatcaaaagattcccatcgagagccatgatccagtttttgcatcaaaacctgttaactaccctctcaatgtggttccttctgatttactctctatcatagaaaaagcagtaaaagaagcaggaaaaaacaatgctcagttgtttttcgacatatgcttaacttctatggctactgatatgagcaaaggtcttccttcgataggatataaaatatttttacaatatattgccttgcaagaaccacgtttagttacagaaaatcttcaaaaacacgttagtctaaggaattcgtatcaaaatagacctaacattgggcaatctattctttggggcgtgagccatgtcggatataaagatttcagcagtgggttgatagtttttcaagatctatttctacccttgatagacatgaagaactactcccgctacattctcacttatttagtaaacctaatcaagaacaccaacgaaaaatcacttacactggaagaatctttatcgatattaaacattgtttacagcaacagaaagaacatgcccagtgatttggtacaagaagtgtcgaacaacgtcgctcgtattaaacctttaaactctaaaaaaggcagctctaacattgaaataatgctcaagaatatcgtattaaataataatgcctcatatcaaaagtgcctgtgtgatattttagtggaagctttccaccaagatcaatcggcttttgctgcttggagtaaggcttactctaaaaatgtacaatcaagtgccgtagttcttgaacatataagcaataactggtccacggtatcacataagatcaacaaaagtgctttaactaatttactcaataatttaagtacggtaaacgtagaattatcttcgaaaaaacgtaaggaagaaggactgaaatccagtattaactctatacagaaaatccaagagaaattggcaatcaaaaagaaaggaggtttcccatataaactattaattctgttgacattggcagttggaggtgcaatttcttatgatatcaaacaacatggcagttggaatgattctcttacaaggaaaacgttaaaagaatataaagtatgtgaatactcacatttggcgatagacagagttaagggcggattacattggacaagtgaaaaaattgaagaacagttcccaggtttgcaacaaaatgttgccgtcttttcagaaccttacgttgagttgctcgttaatctaggaaagattggtcgtaacgtcgcatttaacgtgaaagatgttatcgttgagaagtatcctgttgttgttgaatcggtagaagcttatttaccgggattagttgagaattcacagaaggccataagtgaagtttatgtaacatcagttttatatttcaacagaggtgtagactatcttaaaaatgaagtatttgtgggccaactctcaccggaaaacatgcagagagtggttgtcgaagcatttaatacgacacaacaaaaggctgttgaatactaccactggatttataaaaaagttcagacaagcatcaaatgaaatatgtatgttgattaattaggtttttcaatttatttgaaccaaaaatccgttactaccacaccaacttaggttcagtttcagaaataattttgcatacccctgtatacaagatctatttcgaatgtttgatattagaacttgcagatgtttgtgactttactgttaatattttcataggaatcgtttggttgcgagatattgagtacagtacaaaaataagtttgttggtagttctgctggacagtaataaatctacaattttttatacatttcttgtctttggttatagggtgagaaactagatgaatgaaagcgtactgctaagacatactattatttaagtttattgttttaatttataagttagatgtgcatgtagagaagcggtgtgtaattaggttccatgaaatctcgtaacgtgacagttcgtaactatacaaattcgtaactccaacctttaatttttttagcaaatttagtattactgaatttaataaaaaattcattttgcattcctttgtatactaaaagtaatggtactttttaagacgactttttttttagatatatttcacaccaatttttgcatatgttcttgttaatatgacaactaaagaatacattttttcattttcaacgaaaacatttcgtttataaattcgcaaaagtgtgtgtgttgttgcgttgccgctcgatggattcttatgtagttttttcttctgaatccaaatctgaaaacggcatttcgatatttctaaccgtcttcgagataatcgacctcaaagtctaaaatgtgacgtcacgatcgttttattttctgccgacacactacacgtccagctgaaatcgttgctattaagtaggctagttttttaatctcgattttttaagcaaagcacaggttatttacatttgagtttgacacttcgtgaatgtcaaactaaattttaattaagtattaataaaacatcaatgacatttgatagtgaatttaattattatataaaataaataagatgtccaaaaatacaatttgagtatagtttaaaagcaataatttattaacagctttaaaaaggtttatacgagtatacggcctcccctttatgataaatggactgttccatttgctatgaaattaaaatatagtcggttcgctaaactcgacacaactggctagtgattttagtaggtaatttttttgttttttgcgaattttgccaaaattgggaaaattactaattatttagtaattattaactaatttgtaatcatttttttttgcccaattggcaaaattatcgactaaaatcactagccagttgtgtctgagttaagcgaaccgacagtatatgaaataatattgtttggtataaaaaattatggtctgatatatgcaattacattcttctaatggaaaaaatatttgaagatttttctcaaattatggataccaacaacattttcatttataactcttttatttttaatgtgacgaaaaaaaaagttattcttcataaaaatctcttcatgttctaagatttatgatgtaaccatatataaaattttattaattttatacgaggtatataaaaaatatgaatttcgatcaagagtaaactacctttatagttcataacttttaaatagttcataacatttaaattagaatgatataattgcacattaaaacataattattaattctaaaccacttttcataatagcaattttcgcaaatgcctatataaacaaagttttcgttatgataatgctcacattttcagcttgtttatcctgaattagaattatcattttaaagtagtaaaactactgttaatggtagattatatttattttaagaaataattttcaaaatagtatatttctccgcgaaatatgaaaaatgttttaacctgacgctcgttcgttaaattgacaaacgtaatttcaattttgtaactgtaataaaagttattttccacgtgaacaaaaataaacagaatttaattttgacgttacgaatatgtataatatgtagttactgtcgccgttacaaattgttctttaccacttgtacagttacgaactgccgcgttaagagatcacggtcacggtataatcactattatatgtaaaactgtcattttagggaagcatcacatgttagcatatgaatatttttaattaatataagtcatgacaatatgaacaaaaagtgattttatattgttttaacttaatttatttattaaaaatttttgaaaactaaatttacaatttatatttttaccactctgcgtaaacagccaataaacaaatttttgtt

SEQ ID NO: 1249 - DNA, 4377 bp, Diabrotica virgifera
  SmartBlast Evalue=2E-81; Info=Transmembrane protein 214-A n=1 Tax=Camponotus floridanus RepID=E2A8B1_9HYME
acaactagcggtggtccagttgtttgaaaagtgtttgaaaatagtaatttttttactttaatatatagatatatagtgtttgtaaaattaaatagtattcaaaaatgtctggacaatgggaagtagtaactaaaaaacgcgataagggaagtaaactgccagtaccaaaagttaataatccaaaggaaataaaaaataataaaaacattctcaatggtgtaaaaatagaggaagttttgccaaaagctcaggtacagagcctttatggtaaatcgaaagaaaataaagttcaagacaaaaataaacctaaggagagtgtgaagaaagcagctgttaagaaagataaacctgtggaaccaccaaagcctaagccaccgaagtccattgaaagtgctcttaattctatcgatgttaacgaatttaaagatatatatgaaaaaaatagaaatcattttcctgatgctcctattgtatggttgaaggaattactgcagtatttaaatcaaaagattcccatcgagagccatgatccagtttttgcatcaaaacctgttaactaccctctcaatgtggttccttctgatttactctctatcatagaaaaagcagtaaaagaagcaggaaaaaacaatgctcagttgtttttcgacatatgcttaacttctatggctactgatatgagcaaaggtcttccttcgataggatataaaatatttttacaatatattgccttgcaagaaccacgtttagttacagaaaatcttcaaaaacacgttagtctaaggaattcgtatcaaaatagacctaacattgggcaatctattctttggggcgtgagccatgtcggatataaagatttcagcagtgggttgatagtttttcaagatctatttctacccttgatagacatgaagaactactcccgctacattctcacttatttagtaaacctaatcaagaacaccaacgaaaaatcacttacactggaagaatctttatcgatattaaacattgtttacagcaacagaaagaacatgcccagtgatttggtacaagaagtgtcgaacaacgtcgctcgtattaaacctttaaactctaaaaaaggcagctctaacattgaaataatgctcaagaatatcgtattaaataataatgcctcatatcaaaagtgcctgtgtgatattttagtggaagctttccaccaagatcaatcggcttttgctgcttggagtaaggcttactctaaaaatgtacaatcaagtgccgtagttcttgaacatataagcaataactggtccacggtatcacataagatcaacaaaagtgctttaactaatttactcaataatttaagtacggtaaacgtagaattatcttcgaaaaaacgtaaggaagaaggactgaaatccagtattaactctatacagaaaatccaagagaaattggcaatcaaaaagaaaggaggtttcccatataaactattaattctgttgacattggcagttggaggtgcaatttcttatgatatcaaacaacatggcagttggaatgattctcttacaaggaaaacgttaaaagaatataaagtatgtgaatactcacatttggcgatagacagagttaagggcggattacattggacaagtgaaaaaattgaagaacagttcccaggtttgcaacaaaatgttgccgtcttttcagaaccttacgttgagttgctcgttaatctaggaaagattggtcgtaacgtcgcatttaacgtgaaagatgttatcgttgagaagtatcctgttgttgttgaatcggtagaagcttatttaccgggattagttgagaattcacagaaggccataagtgaagtttatataacatcagttttatatttcaacagaggtgtagactatcttaaaaatgaagtatttgtgggccaactctcaccagaaaacatgcagagagtggttgtcgaagcatttaatacgacacaacaaaaggctgttgaatactaccactggatttataaaaaagttcagacgagcatcaaatgaaatacgtatgttgattaattaggtttttcaatttatttgaaccaaaaatccgttactaccacaccaacttaggttcagtttcagaaataattttgcatacccctgtatacaagatctatttcgaatgtttgatattagaacttgcagatgtttgtgactttactgttaatattttcataggaatcgtttggttgcgagatattgagtacagtacaaaaataagtttgttggtagttctgctggacagtaataaatctacaattttttatacatttcttgtctttggttatagggtgagaaactagatgaatgaaagcgtactgctaagacatactattatttaagtttattgttttaatttataagttagatgtgcatgtagagaagcggtgtgtaattaggttccatgaaatctcgtaacgtgacagttcgtaactatacaaattcgtaactccaacctttaatttttttagcaaatttagtattactgaatttaataaaaaattcattttgcattcctttgtatactaaaagtaatggtactttttaagacgactttttttttagatatatttcacaccaatttttgcatatgttcttgttaatatgacaactaaagaatacattttttcattttcaacgaaaacatttcgtttataaattcgcaaaagtgtgtgtgttgttgcgttgccgctcgatggattcttatgtagttttttcttctgaatccaaatctgaaaacggcatttcgatatttctaaccgtcttcgagataatcgacctcaaagtctaaaatgtgacgtcacgatcgttttattttctgccgacacactacacgtccagctgaaatcgttgctattaagtaggctagttttttaatctcgattttttaagcaaagcacaggttatttacatttgagtttgacacttcgtgaatgtcaaactaaattttaattaagtattaataaaacatcaatgacatttgatagtgaatttaattattatataaaataaataagatgtccaaaaatacaatttgagtatagtttaaaagcaataatttattaacagctttaaaaaggtttatacgagtatacggcctcccctttatgataaatggactgttccatttgctatgaaattaaaatatagtcggttcgctaaactcgacacaactggctagtgattttagtaggtaatttttttgttttttgcgaattttgccaaaattgggaaaattactaattatttagtaattattaactaatttgtaatcatttttttttgcccaattggcaaaattatcgactaaaatcactagccagttgtgtctgagttaagcgaaccgacagtatatgaaataatattgtttggtataaaaaattatggtctgatatatgcaattacattcttctaatggaaaaaatatttgaagatttttctcaaattatggataccaacaacattttcatttataactcttttatttttaatgtgacgaaaaaaaaagttattcttcataaaaatctcttcatgttctaagatttatgatgtaaccatatataaaattttattaattttatacgaggtatataaaaaatatgaatttcgatcaagagtaaactacctttatagttcataacttttaaatagttcataacatttaaattagaatgatataattgcacattaaaacataattattaattctaaaccacttttcataatagcaattttcgcaaatgcctatataaacaaagttttcgttatgataatgctcacattttcagcttgtttatcctgaattagaattatcattttaaagtagtaaaactactgttaatggtagattatatttattttaagaaataattttcaaaatagtatatttctccgcgaaatatgaaaaatgttttaacctgacgctcgttcgttaaattgacaaacgtaatttcaattttgtaactgtaataaaagttattttccacgtgaacaaaaataaacagaatttaattttgacgttacgaatatgtataatatgtagttactgtcgccgttacaaattgttctttaccacttgtacagttacgaactgccgcgttaagagatcacggtcacggtataatcactattatatgtaaaactgtcattttagggaagcatcacatgttagcatatgaatatttttaattaatataagtcatgacaatatgaacaaaaagtgattttatattgttttaacttaatttatttattaaaaatttttgaaaactaaatttacaatttatatttttaccactctgcgtaaacagccaataaacaaatttttgtt

SEQ ID NO: 1250 - DNA, 4193 bp, Diabrotica virgifera
  SmartBlast Evalue=2E-81; Info=Transmembrane protein 214-A n=1 Tax=Camponotus floridanus RepID=E2A8B1_9HYME
acaactagcggtggtccagttgtttgaaaagtgtttgaaaatagtaatttttttactttaatatatagatatatagtgtttgtaaaattaaatagtattcaaaaatgtctggacaatgggaagtagtaactaaaaaacgcgataagggaagtaaactgccagtaccaaaagttaataatccaaaggaaataaaaaataataaaaacattctcaatggtgtaaaaatagaggaagttttgccaaaagctcaggtacagagcctttatggtaaatcgaaagaaaataaagttcaagacaaaaataaacctaaggagagtgtgaagaaagcagctgttaagaaagataaacctgtggaaccaccaaagcctaagccaccgaagtccattgaaagtgctcttaattctatcgatgttaacgaatttaaagatatatatgaaaaaaatagaaatcattttcctgatgctcctattgtatggttgaaggaattactgcagtatttaaatcaaaagattcccatcgagagccatgatccagtttttgcatcaaaacctgttaactaccctctcaatgtggttccttctgatttactctctatcatagaaaaagcagtaaaagaagcaggaaaaaacaatgctcagttgtttttcgacatatgcttaacttctatggctactgatatgagcaaaggtcttccttcgataggatataaaatatttttacaatatattgccttgcaagaaccacgtttagttacagaaaatcttcaaaaacacgttagtctaaggaattcgtatcaaaatagacctaacattgggcaatctattctttggggcgtgagccatgtcggatataaagatttcagcagtgggttgatagtttttcaagatctatttctacccttgatagacatgaagaactactcccgctacattctcacttatttagtaaacctaatcaagaacaccaacgaaaaatcacttacactggaagaatctttatcgatattaaacattgtttacagcaacagaaagaacatgcccagtgatttggtacaagaagtgtcgaacaacgtcgctcgtattaaacctttaaactctaaaaaaggcagctctaacattgaaataatgctcaagaatatcgtattaaataataatgcctcatatcaaaagtgcctgtgtgatattttagtggaagctttccaccaagatcaatcggcttttgctgcttggagtaaggcttactctaaaaatgtacaatcaagtgccgtagttcttgaacatataagcaataactggtccacggtatcacataagatcaacaaaagtgctttaactaatttactcaataatttaagtacggtaaacgtagaattatcttcgaaaaaacgtaaggaagaaggactgaaatccagtattaactctatacagaaaatccaagagaaattggcaatcaaaaagaaaggaggtttcccatataaactattaattctgttgacattggcagttggaggtgcaatttcttatgatatcaaacaacatggcagttggaatgattctcttacaaggaaaacgttaaaagaatataaagtatgtgaatactcacatttggcgatagacagagttaagggcggattacattggacaagtgaaaaaattgaagaacagttcccaggtttgcaacaaaatgttgccgtcttttcagaaccttacgttgagttgctcgttaatctaggaaagattggtcgtaacgtcgcatttaacgtgaaagatgttatcgttgagaagtatcctgttgttgttgaatcggtagaagcttatttaccgggattagttgagaattcacagaaggccataagtgaagtttatgtaacatcagttttatatttcaacagaggtgtagactatcttaaaaatgaagtatttgtgggccaactctcaccggaaaacatgcagagagtggttgtcgaagcatttaatacgacacaacaaaaggctgttgaatactaccactggatttataaaaaagttcagacaagcatcaaatgaaatatgtatgttgattaattaggtttttcaatttatttgaaccaaaaatccgttactaccacaccaacttaggttcagtttcagaaataattttgcatacccctgtatacaagatctatttcgaatgtttgatattagaacttgcagatgtttgtgactttactgttaatattttcataggaatcgtttggttgcgagatattgagtacagtacaaaaataagtttgttggtagttctgctggacagtaataaatctacaattttttatacatttcttgtctttggttatagggtgagaaactagatgaatgaaagcgtactgctaagacatactattatttaagtttattgttttaatttataagttagatgtgcatgtagagaagcggtgtgtaattaggttccatgaaatctcgtaacgtgacagttcgtaactatacaaattcgtaactccaacctttaatttttttagcaaatttagtattactgaatttaataaaaaattcattttgcattcctttgtatactaaaagtaatggtactttttaagacgactttttttttagatatatttcacaccaatttttgcatatgttcttgttaatatgacaactaaagaatacattttttcattttcaacgaaaacatttcgtttataaattcgcaaaagtgtgtgtgttattgcgttgccgctcctgcaatactcagatcagatttatcaatggattcttatgtagttttttcttctgaatccaaatctgaaaacggcatttcgatatttctaaccgtcttcgagataatcgacctcaaagtctaaaatgtgacgtcacgatagttttattttctgccgacacactacacgtccagctgaaatcgttgctattaagtaggctagttttttaatctcgattttttaagcaaagcacaggttatttacatttgagtttgacacttcgtgaatgtcaaactaaattttaattaagtattaataaaacatcaatgacatttgatagtgaatttaattattatataaaataaataagatgtccaaaaatacaatttgagtatagtttaaaagcaataatttattaacagctttaaaaaggtttatacgagtatacggcctcccctttatgataaatggactgttccatttgctatgaaattaaaatatagtcggttcgctaaactcgacacaactggctagtgattttagtaggtaatttttttgttttttgcgaattttgccaaaattgggaaaattactaattatttagtaattattaactaatttgtaatcatttttttttgcccaattggcaaaattatcgactaaaatcactagccagttgtgtctgagttaagcgaaccgacagtatatgaaataatattgtttggtataaaaaattatggtctgatatatgcaattacattcttctaatggaaaaaatatttgaagatttttctcaaattatggataccaacaacattttcatttataactcttttatttttaatgtgacgaaaaaaaaagttattcttcataaaaatctcttcatgttctaagatttatgatgtaaccatatataaaattttattaattttatacgaggtatataaaaaatatgaatttcgatcaagagtaaactacctttatagttcataacatttaaattagaatgatataattgcacattaaaacataattattaattctaaacacttttcataatagcaattttccatattatgaattaaaatacgtaaataaacaaagttttcgttatgataatgctcgcattttcagcttgttattatgttttgttattgctattaaaatttactgttttctttttatggggttttagaacaagcaaaatgttgatcaagaatgacagttcacaagataaattccttgttgaacgcattgtcgaaaaaatgacaattcgcaaattatttatcggagttgacagttactaagctacactgtagcttaggaataccagactattgtttcgatttcgaacccagtgcaaaaatgtatagggatttacgtaaaattggctacaaaattcagctggtttgaaaaacttgaattttatttcgtttaatgaggtttcagaacaagcaacttcatatcaagaatg

SEQ ID NO: 1251 - DNA, 3170 bp, Diabrotica virgifera
  SmartBlast Evalue=1E-74; Info=Endonuclease-reverse transcriptase n=1 Tax=Bombyx mori RepID=D7F171_BOMMO
gtgactcggtcagtccacggaattttaagaattctccgatatagccatatctcaaatgctttcaattttctgcacatatcttcgtttccacgattcaattccataaaaaaggatagagaagacgtaacaccgcaacattcttacttttacaccaagagaaaagttgtggctcttgaaagaggcctccatatggttaaaggtggatctagcttttccgacgcgcgcactgatctcttggttgttggtccattcttcatttattatggttacgaggtagttttattgcgtcactctttctacagaagtttggttgatatagagttgaccttctgttatctttttcttgctaatgatcataagctttgtcttctttacatttatattgagtccatattgttgactgtaatacgtgattttgttcatgaggacttgtaggtcttctaggttgtccgcaaatactatgtatcatctgtatacctgatgttatttagccggtacccgtttggcgaataatgactgaataataattttttcaatagatatttcgattatcttattattgccgttttcttcttcttcttcttccttcttgtatgtaggctttaaaacctgtttcttcttcaatattagcctcctaaattgtttaagttatcgcaccatctttttcttggtctgccaatacttcttcgtccatttggtgacttatctcgtgctattcgtactatcctatcctctgccattctactaatgtgttcgttccactcctgtttccgttttgtcacccatccatttatgtcttctacattgcatgatcttcttatgttttcgcttctctccctatccaacagacttttccctgatattcgtcagagtatcttcatctctgttgtttctagtagtcgtctcgttttagatgtgtcaggtcttgtctccgccgtgtatgtcaatataggtctaattgctgctttatagattcttgcttttgtgtcttgtcttaggtgtttgttcttccagattgtgtcattaagagatcccgccgctttacttgcttttaagctttgttgtcgtacttcctcttcaacatctccgtaactggttatatctattcccagatatctaaaccttgcttcctgctttattattttcccatcaatttcgattttacatcgtagtgggtatttagatgttgtcatacatttggttttttctgctgatattatcatattgtatttcttggctgttgtattgaagatgtgtgttaatctttggagatcgtcttctgtctcggcgattaatgcggcgtcgtctgcataacataatactttgatttctttattccccattctgtaaccatgacctttacgtactgcttctattatttcgtccattattatattaaagagcagtgggcttaatgagtcaccttgtctgactccgctttgtactggtataaactgcgttagttttccatttatctttgcctgtattcgattatgaaagtagatgttttcgatggtttgtataatattgattggtatgtttcttctcatacagtaaatgtaagacgtcttcgacttggatgcgatcgaaagcctttgtcaggtctataaaacatagatatgctggtttattgtactcaatggccttttctgtgatttgtctcagtacaaatacggcgtctacgcaggatcttccggatctgaatccttgttgttcatctgataaagttgttagtttattgattttgttggttaggacttttgtggttagcttaagtgcggtgttcagtagatttatacctctataattgttggggtcttctttgtctcctttcttgaacattggtatcattatgctgtttctccatgcgtctggtatcttgcagtgcaatattaatttttgataagttttgtcatctctagggttatactttctcctccgtattttagaagctcgttggttattccgtctggtcctggtgactttctatttttgagtgagtttatggctatctctacttcctgaaaactgatttctatttcgtgtcttaattcaggtacgttattgtgttgattattattttcctttcctttaaacagttccgtcaagtatctttcccattcgtttgctggtatgttattgtattccttcaattcggccatttctttccggtggtttcttatgaatctccatatttgtttttgtgtaccgtagaagtcgctttccatcctttttgtaaaccgttcccagtgttcattttttgttcttcttaccaattgctttgtttcatttcgtattcttctataggtgtctctggattctggagtgtttgatgttttatacttcatgtaggcgtctctcttctctttacatttgtcttttatttcttttctgaaccatggtgtattgttgttgtttcttttgttcagtatgactttgcgttttcctagagcttctgttgctgcctcttcaatattgtttttaattttctcccagctcgcgtttatatcttcgatgtcgtctatctgcttcagctgtatcttctgtgctagcctcctttggtacatttctttggtagaatcgttccacagtgattctacattgaatttttcctcggtgatttcctgtggaaaatgttttggtgttagtttcattcttatttttgctaggactaatttgtgttcactccctgcgtctgccgagtttaaagttcgaatatctagaatctgctctgggtggatttttctattagtgactataaagtcaatcatagatttgtgccccctggagttttcaaacgtatatttatactgaagcttatggtcgaaaaatgtattattgattcgcagttcgttaaaagcacagagattagccatgagttctccatttgagttgacatggttttcattgaatctttgttttactcctggaactatttcatttccgattcgtgcattaaaatcccccataagaattaagtgttcttcatgaggtatgtcgtccaggatgatttgcaactgttcgtagaatgcctctcgttccttcttaggtttgcagtcctcggggctatagatagatataacatttaatttttggtagtccattgtgatgttcatatgtattattctttcggagatgtaacggcagttacttatgttgtctttaaattt

SEQ ID NO: 1252 - DNA, 3169 bp, Diabrotica virgifera
  SmartBlast Evalue=6E-72; Info=Endonuclease-reverse transcriptase n=1 Tax=Bombyx mori RepID=D7F171_BOMMO
gtgactcggtcagtccacggaattttaagaattctccgatatagccatatctcaaatgctttcaattttctgcacatatcttcgtttccacgattcaattccataaaaaaggatagagaagacgtaacaccgcaacattcttacttttacaccaagagaaaagttgtggctcttgaaagaggcctccatatggttaaaggtggatctagcttttccgacgcgcgcactgatctcttggttgttggtccattcttcatttattatggttacgaggtagttttattgcgtcactctttctacagaagtttggttgatatagagttgaccttctgttatctttttcttgctaatgatcataagctttgtcttctttacatttatattgagtccatattgttgactgtaatacgtgattttgttcatgaggacttgtaggtcttctaggttgtccgcaaatactatgtatcatctgtatacctgatgttatttagccggtacccgtttggcgaataatgactgaataataattttttcaatagatatttcgattatcttattattgccgttttcttcttcttcttcttccttcttgtatgtaggctttaaaacctgtttcttcttcaatattagcctcctaaattgtttaagttatcgcaccatctttttcttggtctgccaatacttcttcgtccatttggtgacttatctcgtgctattcgtactatcctatcctctgccattctactaatgtgttcgttccactcctgtttccgttttgtcacccatccatttatgtcttctatattgcatgatcttcttatgttttcgctcctctccctatccaacagacttttccctgatattcgtcggagtattttcatctctgttgtttctagtagtcgtctcgttttagatgtgtcaggccttgtctccgccgtgtatgttaatataggtctaattgctgctttatagattcttgcttttgtgtcttgtcttaagtgtttgttcttccagattgtgtcattaagagatcccgccgctttacttgcttttaagctttgttgtcgtacttcctcttcaacatctccgtaactggttatatcaattcccagatatctaaaccttgcttcctgctttattattttcccatcaatttcgattttacatcgtagtgggtatttagatgttgtcatacatttggtttttctgctgatattatcatattgtatttcttggctgttgtattgaagatgtgtgttaatctttggagatcgtcttctgtctcggcgattaatgcggcgtcgtctgcataacataatactttgatttctttattccccattctgtaaccatgacctttacgtactgcttctattatttcgtccattattatattaaagagcagtgggcttaatgagtcaccttgtctgactccgctttgtactggtataaactgcgttagttttccatttatctttgcctgtattcgattatgaaagtagatgttttcgatggtttgtataatattgattggtatgtttcttctcatacagtaaatgtaagacgtcttcgacttggatgcgatcgaaagcctttgtcaggtctataaaacatagatatgctggtttattgtactcaatggccttttctgtgatttgtctcagtacaaatacggcgtctacgcaggatcttccggatctgaatccttgttgttcatctgataaagttgttagtttattgattttgttggttaggacttttgtggttagcttaagtgcggtgttcagtagatttatacctctataattgttggggtcttctttgtctcctttcttgaacattggtatcattatgctgtttctccatgcgtctggtatcttgcagtgcaatattaatttttgataagttttgtcatctctagggttatactttctcctccgtattttagaagctcgttggttattccgtctggtcctggtgactttctatttttgagtgagtttatggctatctctacttcctgaaaactgatttctatttcgtgtcttaattcaggtacgttattgtgttgattattattttcctttcctttaaacagttccgtcaagtatctttcccattcgtttgctggtatgttattgtattccttcaattcggccatttctttccggtggtttcttatgaatctccatatttgtttttgtgtaccgtagaagtcgctttccatcctttttgtaaaccgttcccagtgttcattttttgttcttcttaccaattgctttgtttcatttcgtattcttctataggtgtctctggattctggagtgtttgatgttttatacttcatgtaggcgtctctcttctctttacatttgtcttttatttcttttctgaaccatggtgtattgttgttgtttcttttgttcagtatgactttgcgttttcctagagcttctgttgctgcctcttcaatattgtttttaattttctcccagctcgcgtttatatcttcgatgtcgtctatctgcttcagctgtatcttctgtgctagcctcctttggtacatttctttggtagaatcgttccacagtgattctacattgaatttttcctcggtgatttcctgtggaaaatgttttggtgttagtttcattcttatttttgctaggactaatttgtgttcactccctgcgtctgccgagtttaaagttcgaatatctagaatctgctctgggtggatttttctattagtgactataaagtcaatcatagatttgtgccccctggagttttcaaacgtatatttatactgaagcttatggtcgaaaaatgtattattgattcgcagttcgttaaaagcacagagattagccatgagttctccatttgagttgacatggttttcattgaatctttgttttactcctggaactatttcatttccgattcgtgcattaaaatcccccataagaattaagtgttcttcatgaggtatgtcgtccaggatgatttgcaactgttcgtagaatgcctctcgttccttcttaggtttgcagtcctcggggctatagatagatataacatttaatttttggtagtccattgtgatgttcatatgtattattctttcggagatgtaacggcagttacttatgttgtctttaaattt

SEQ ID NO: 1253 - DNA, 3058 bp, Diabrotica virgifera
  SmartBlast Evalue=3E-68; Info=Endonuclease-reverse transcriptase n=1 Tax=Bombyx mori RepID=D7F171_BOMMO
gggacgtgtacgacacgggccgtggaacaaacgggctccgcacggggtttgatttatggtacgacgggtcgcttccggcttctgcacgggtttttttaaattagttttatttgcgagtgtctttagtggatttaacactttcgttcaccgtgtcctcatttgaggacaacctattctgtagttttttgtatatagctccatatgtttttactcttgtaacacattgtccacgattatggacatcttattccgtccaaagagtacttgtgctgcaatctaacagctttcgaacaaaatatttaattttttgaaatataggtttctataattcgtgcgacatttctatattgacatgcgacaaatgcaatgttcatatctgtgtaagtatcatcagttcatagagtatagtataaaaaactcattggctcacgatatcctcaataaatgagggcatcttgtagtgaccaaactgtgcatttcgaaaatgtaaaacttcttccttcttgtaaacttcaaaatattagcctcctaaattgtttaaattatcgcaccatctttttcttggtctgccaatacttcttcgtctatttggtgacatatcgtgcttttcgtactatcctatcctctgccattctactaatgtgttagttccactcctttttctgttttgtcacccattcatttatgtcttctatattgcatgatcttatgttttcacttctctccctacccaacagacttttccctgattttcgtcggagtattttcatctctgttgtttctagtaatcgtctcgttttagatgcgtcaggtcttgtctccaccgtgtatgtcaaaataggtataattgctgctttatagattcttgcttttgtgtcttgtcttaggtgtttgttcttccagattgtgtcattaagagatcccgccgctttacttgcttttaagctttgttgtcgtacttcctcttcaacatctccgtaactggttatatcaattcccagatatctaaaccttgcttcctgctttattattttcccatcaatttcgattttacatcgtagtgggtatttagatgttgtcatacatttggtttttctgctgatattatcatattgtatttcttggctgttgtattgaagatgtgtgttaatctttggagatcgtcttctgtctcggcgattaatgcggcgtcgtctgcataacataatactttgatttctttattccccattctgtaaccatgacctttacgtactgcttctattatttcgtccattattatattaaagagcagtgggcttaatgagtcaccttgtctgactccgctttgtactggtataaactgcgttagttttccatttatctttgcctgtattcgattatgaaagtagatgttttcgatggtttgtataatattgattggtatgtttcttctcatacagtaaatgtaagacgtcttcgacttggatgcgatcgaaagcctttgtcaggtctataaaacatagatatgctggtttattgtactcaatggccttttctgtgatttgtctcagtacaaatacggcgtctacgcaggatcttccggatctgaatccttgttgttcatctgataaagttgttagtttattgattttgttggttaggacttttgtggttagcttaagtgcggtgttcagtagatttatacctctataattgttggggtcttctttgtctcctttcttgaacattggtatcattatgctgtttctccatgcgtctggtatcttgcagtgcaatattaatttttgataagttttgtcatctctagggttatactttctcctccgtattttagaagctcgttggttattccgtctggtcctggtgactttctatttttgagtgagtttatggctatctctacttcctgaaaactgatttctatttcgtgtcttaattcaggtacgttattgtgttgattattattttcctttcctttaaacagttccgtcaagtatctttcccattcgtttgctggtatgttattgtattccttcaattcggccatttctttccggtggtttcttatgaatctccatatttgtttttgtgtaccgtagaagtcgctttccatcctttttgtaaaccgttcccagtgttcattttttgttcttcttaccaattgctttgtttcatttcgtattcttctataggtgtctctggattctggagtgtttgatgttttatacttcatgtaggcgtctctcttctctttacatttgtcttttatttcttttctgaaccatggtgtattgttgttgtttcttttgttcagtatgactttgcgttttcctagagcttctgttgctgcctcttcaatattgtttttaattttctcccagctcgcgtttatatcttcgatgtcgtctatctgcttcagctgtatcttctgtgctagcctcctttggtacatttctttggtagaatcgttccacagtgattctacattgaatttttcctcggtgatttcctgtggaaaatgttttggtgttagtttcattcttatttttgctaggactaatttgtgttcactccctgcgtctgccgagtttaaagttcgaatatctagaatctgctctgggtggatttttctattagtgactataaagtcaatcatagatttgtgccccctggagttttcaaacgtatatttatactgaagcttatggtcgaaaaatgtattattgattcgcagttcgttaaaagcacagagattagccatgagttctccatttgagttgacatggttttcattgaatctttgttttactcctggaactatttcatttccgattcgtgcattaaaatcccccataagaattaagtgttcttcatgaggtatgtcgtccaggatgatttgcaactgttcgtagaatgcctctcgttccttcttaggtttgcagtcctcggggctatagatagatataacatttaatttttggtagtccattgtgatgttcatatgtattattctttcggagatgtaacggcagttacttatgttgtctttaaattt

SEQ ID NO: 1254 - DNA, 2703 bp, Diabrotica virgifera
  SmartBlast Evalue=5E-53; Info=Endonuclease-reverse transcriptase n=1 Tax=Bombyx mori RepID=D5LB38_BOMMO
gccggttattagcgcgctcaccactgtataccataaacttataaaaatatactttaaattcttcttcttgatgtgctatccgtgacgaatgttggcgatcatcatggcaatcttcactttatctgcagcaacgcggaaaagctgcacagatgttgtgttgaaccaggttctgaggttctttaaccaggatgttcttcttcttcctggacctcgctttccaaatatttttccttgcaggatggcttgtaggagggcatatctggattcatttcgcataatgtgtccaaagtattccaactttcgagatttgatggtggttagtacttctcggttcttccccattcttctaaggacctcctcatttgtgacccgatcagtccatgggattttaagaattctccgatatagccacatctcaaatgcttccaattttcggcacatatcctcgttcaaggtccatgattcaacaccataaaaaaggacagagaagacgtaacatctcagcattcttacttttataccaagagaaaggttgtggctcttgaaaaacgccccatacggttgaagattgatctagcttttccgatgcgcgctcttatctcttggttgttggtccattcttcatttattatggtgccgaggtagttgtagtgcctcactctttctacagaagtttggttgatatagagttgaccttctgttatctttttcttgctaatgatcataagctttgtcttctttacatttatattgagtccatattgttgactgtaatacgtgattttgttcatgaggacttgtaggtcttctaggttgtccgcaaatactatgtgtcatctgtatacctgatgttatttagccggtacccgtttggcgaataatgactgaataataattttttcaatagatatttcgattatcttattattgccgttttcttcttcttcttcttccttcttgtatgtaggctttaaaacctgtttcttcttcaatattagcctcctaaattgtttaagttatcgcaccatctttttcttggtctgccaatacttcttcgtccatttggtgacttatctcgtgctattcgtactatcctatcctctgccattctactaatgtgttcgttccactcctgtttccgttttgtcacccatccatttatgtcttctacattgcatgatcttcttatgttttcgcttctctccctatccaacagacttttccctgatattcgtcagagtatcttcatctctgttgtttctagtagtcgtctcgttttagatgtgtcaggtcttgtctccgccgtgtatgtcaatataggtctaattgctgctttatagattcttgcttttgtgtcttgtcttaggtgtttgttcttccagattgtgtcattaagagatcccgccgctttacttgcttttaagctttgttgtcgtacttcctcttcaacatctccgtaactggttatatctattcccagatatctaaaccttgcttcctgctttattattttcccatcaatttcgattttacatcgtagtgggtatttagatgttgtcatacatttggttttttctgctgatattatcatattgtatttcttggctgttgtattgaagatgtgtgttaatctttggagatcgtcttctgtctcggcgattaatgcggcgtcgtctgcataacataatactttgatttctttattccccattctgtaaccatgacctttacgtactgcttctattatttcgtccattattatattaaagagcagtgggcttaatgagtcaccttgtctgactccgctttgtactggtataaactgcgttagttttccatttatctttgcctgtattcgattatgaaagtagatgttttcgatggtttgtataatattgattggtatgtttcttctcatacagtaaatgtaagacgtcttcgacttggatgcgatcgaaagcctttgtcaggtctataaaacatagatatgctggtttattgtactcaatggccttttctgtgatttgtctcagtacaaatacggcgtctacgcaggatcttccggatctgaatccttgttgttcatctgataaagttgttagtttattgattttgttggttaggacttttgtggttagcttaagtgcggtgttcagtagatttatacctctataattgttggggtcttctttgtctcctttcttgaacattggtatcattatgctgtttctccatgcgtctggtatctcaggaaccactaatcacaattaaacgtttttcccttaaaagaagcgtccctgccgctttttttccaataccgttttcatgatttaattcaatataacattccccgagatattccatttgtttataagccaaaaaattgtttataatttcaaaacattcccgaggccgcccaaacagttcaatttcaactctgcaaagtacaccagacaggcacaaggtccccttatacaaaaatcatagttcttcttcttgatcgtaattattgtggttattatagcaaccgtaaattaattaacaattcaaccgttgccaaactattcactcaattttcatcgacttccggaattacaatccatacgaaaagagctcttgcattaccaagtcatccaattattgacaaacaattaatataaaattttagttgaaaattaaagaccttgttgaaaaacccgcact

SEQ ID NO: 1255 - DNA, 2855 bp, Diabrotica virgifera
  SmartBlast Evalue=1E-74; Info=Endonuclease-reverse transcriptase n=1 Tax=Bombyx mori RepID=D7F171_BOMMO
gtgggtatttggtcttaaatttggtttgctctcaggactaataccaggttctgactttgatatacaatatatatgttgtttggattacaaatggtattgataatacatagatatataagtgacactcaaatgtgaaatgtgtactggctcgatatgttgttgacgcggtattttctttctattgatttcctctttcagtgtggatgaccgcatcctactgcattctaccgaggaatttgcaacacaattggtttcttcttcttcttcttccttcttgtatgtaggctttaaagcctgtttcttcttcaatattatcctcctaaattgtttaggttatcgcaccacctttttcttggtctgccaatacttcttcgtccatttggtgacttatctcgtgctattcgtactatcctatcctctgccattctactaatgtgttcgttccactcctgtttccgttttgtcacccatccatttatgtcttctacattgcatgatcttcttatgttttcgcttctctccctatccaacagacttttccctgatattcgtcagagtatcttcatctctgttgtttctagtagtcgtctcgttttagatgtgtcaggtcttgtctccgccgtgtatgtcaatataggtctaattgctgctttatagattcttgcttttgtgtcttgtcttaggtgtttgttcttccagattgtgtcattaagagatcccgccgctttacttgcttttaagctttgttgtcgtacttcctcttcaacatctccgtaactggttatatctattcccagatatctaaaccttgcttcctgctttattattttcccatcaatttcgattttacatcgtagtgggtatttagatgttgtcatacatttggttttttctgctgatattatcatattgtatttcttggctgttgtattgaagatgtgtgttaatctttggagatcgtcttctgtctcggcgattaatgcggcgtcgtctgcataacataatactttgatttctttattccccattctgtaaccatgacctttacgtactgcttctattatttcgtccattattatattaaagagcagtgggcttaatgagtcaccttgtctgactccgctttgtactggtataaactgcgttagttttccatttatctttgcctgtattcgattatgaaagtagatgttttcgatggtttgtataatattgattggtatgtttcttctcatacagtaaatgtaagacgtcttcgacttggatgcgatcgaaagcctttgtcaggtctataaaacatagatatgctggtttattgtactcaatggccttttctgtgatttgtctcagtacaaatacggcgtctacgcaggatcttccggatctgaatccttgttgttcatctgataaagttgttagtttattgattttgttggttaggacttttgtggttagcttaagtgcggtgttcagtagatttatacctctataattgttggggtcttctttgtctcctttcttgaacattggtatcattatgctgtttctccatgcgtctggtatcttgcagtgcaatattaatttttgataagttttgtcatctctagggttatactttctcctccgtattttagaagctcgttggttattccgtctggtcctggtgactttctatttttgagtgagtttatggctatctctacttcctgaaaactgatttctatttcgtgtcttaattcaggtacgttattgtgttgattattattttcctttcctttaaacagttccgtcaagtatctttcccattcgtttgctggtatgttattgtattccttcaattcggccatttctttccggtggtttcttatgaatctccatatttgtttttgtgtaccgtagaagtcgctttccatcctttttgtaaaccgttcccagtgttcattttttgttcttcttaccaattgctttgtttcatttcgtattcttctataggtgtctctggattctggagtgtttgatgttttatacttcatgtaggcgtctctcttctctttacatttgtcttttatttcttttctgaaccatggtgtattgttgttgtttcttttgttcagtatgactttgcgttttcctagagcttctgttgctgcctcttcaatattgtttttaattttctcccagctcgcgtttatatcttcgatgtcgtctatctgcttcagctgtatcttctgtgctagcctcctttggtacatttctttggtagaatcgttccacagtgattctacattgaatttttcctcggtgatttcctgtggaaaatgttttggtgttagtttcattcttatttttgctaggactaatttgtgttcactccctgcgtctgccgagtttaaagttcgaatatctagaatctgctctgggtggatttttctattagtgactataaagtcaatcatagatttgtgccccctggagttttcaaacgtatatttatactgaagcttatggtcgaaaaatgtattattgattcgcagttcgttaaaagcacagagattagccatgagttctccatttgagttgacatggttttcattgaatctttgttttactcctggaactatttcatttccgattcgtgcattaaaatcccccataagaattaagtgttcttcatgaggtatgtcgtccaggatgatttgcaactgttcgtagaatgcctctcgttccttcttaggtttgcagtcctcggggctatagatagatataacatttaatttttggtagtccattgtgatgttcatatgtattattctttcggagatgtaacggcagttacttatgttgtctttaaattt

SEQ ID NO: 1256 - DNA, 2702 bp, Diabrotica virgifera
  SmartBlast Evalue=5E-53; Info=Endonuclease-reverse transcriptase n=1 Tax=Bombyx mori RepID=D5LB38_BOMMO
gccggttattagcgcgctcaccactgtataccataaacttataaaaatatactttaaattcttcttcttgatgtgctatccgtgacgaatgttggcgatcatcatggcaatcttcactttatctgcagcaacgcggaaaagctgcacagatgttgtgttgaaccaggttctgaggttctttaaccaggatgttcttcttcttcctggacctcgctttccaaatatttttccttgcaggatggcttgtaggagggcatatctggattcatttcgcataatgtgtccaaagtattccaactttcgagatttgatggtggttagtacttctcggttcttccccattcttctaaggacctcctcatttgtgacccgatcagtccatgggattttaagaattctccgatatagccacatctcaaatgcttccaattttcggcacatatcctcgttcaaggtccatgattcaacaccataaaaaaggacagagaagacgtaacatctcagcattcttacttttataccaagagaaaggttgtggctcttgaaaaacgccccatacggttgaagattgatctagcttttccgatgcgcgctcttatctcttggttgttggtccattcttcatttattatggtgccgaggtagttgtagtgcctcactctttctacagaagtttggttgatatagagttgaccttctgttatctttttcttgctaatgatcataagctttgtcttctttacatttatattgagtccatattgttgactgtaatacgtgattttgttcatgaggacttgtaggtcttctaggttgtccgcaaatactatgtgtcatctgtatacctgatgttatttagccggtacccgtttggcgaataatgactgaataataattttttcaatagatatttcgattatcttattattgccgttttcttcttcttcttcttccttcttgtatgtaggctttaaaacctgtttcttcttcaatattagcctcctaaattgtttaagttatcgcaccatctttttcttggtctgccaatacttcttcgtccatttggtgacttatctcgtgctattcgtactatcctatcctctgccattctactaatgtgttcgttccactcctgtttccgttttgtcacccatccatttatgtcttctatattgcatgatcttcttatgttttcgctcctctccctatccaacagacttttccctgatattcgtcggagtattttcatctctgttgtttctagtagtcgtctcgttttagatgtgtcaggccttgtctccgccgtgtatgttaatataggtctaattgctgctttatagattcttgcttttgtgtcttgtcttaagtgtttgttcttccagattgtgtcattaagagatcccgccgctttacttgcttttaagctttgttgtcgtacttcctcttcaacatctccgtaactggttatatcaattcccagatatctaaaccttgcttcctgctttattattttcccatcaatttcgattttacatcgtagtgggtatttagatgttgtcatacatttggtttttctgctgatattatcatattgtatttcttggctgttgtattgaagatgtgtgttaatctttggagatcgtcttctgtctcggcgattaatgcggcgtcgtctgcataacataatactttgatttctttattccccattctgtaaccatgacctttacgtactgcttctattatttcgtccattattatattaaagagcagtgggcttaatgagtcaccttgtctgactccgctttgtactggtataaactgcgttagttttccatttatctttgcctgtattcgattatgaaagtagatgttttcgatggtttgtataatattgattggtatgtttcttctcatacagtaaatgtaagacgtcttcgacttggatgcgatcgaaagcctttgtcaggtctataaaacatagatatgctggtttattgtactcaatggccttttctgtgatttgtctcagtacaaatacggcgtctacgcaggatcttccggatctgaatccttgttgttcatctgataaagttgttagtttattgattttgttggttaggacttttgtggttagcttaagtgcggtgttcagtagatttatacctctataattgttggggtcttctttgtctcctttcttgaacattggtatcattatgctgtttctccatgcgtctggtatctcaggaaccactaatcacaattaaacgtttttcccttaaaagaagcgtccctgccgctttttttccaataccgttttcatgatttaattcaatataacattccccgagatattccatttgtttataagccaaaaaattgtttataatttcaaaacattcccgaggccgcccaaacagttcaatttcaactctgcaaagtacaccagacaggcacaaggtccccttatacaaaaatcatagttcttcttcttgatcgtaattattgtggttattatagcaaccgtaaattaattaacaattcaaccgttgccaaactattcactcaattttcatcgacttccggaattacaatccatacgaaaagagctcttgcattaccaagtcatccaattattgacaaacaattaatataaaattttagttgaaaattaaagaccttgttgaaaaacccgcact

SEQ ID NO: 1257 - DNA, 2854 bp, Diabrotica virgifera
  SmartBlast Evalue=5E-72; Info=Endonuclease-reverse transcriptase n=1 Tax=Bombyx mori RepID=D7F171_BOMMO
gtgggtatttggtcttaaatttggtttgctctcaggactaataccaggttctgactttgatatacaatatatatgttgtttggattacaaatggtattgataatacatagatatataagtgacactcaaatgtgaaatgtgtactggctcgatatgttgttgacgcggtattttctttctattgatttcctctttcagtgtggatgaccgcatcctactgcattctaccgaggaatttgcaacacaattggtttcttcttcttcttcttccttcttgtatgtaggctttaaagcctgtttcttcttcaatattatcctcctaaattgtttaggttatcgcaccacctttttcttggtctgccaatacttcttcgtccatttggtgacttatctcgtgctattcgtactatcctatcctctgccattctactaatgtgttcgttccactcctgtttccgttttgtcacccatccatttatgtcttctatattgcatgatcttcttatgttttcgctcctctccctatccaacagacttttccctgatattcgtcggagtattttcatctctgttgtttctagtagtcgtctcgttttagatgtgtcaggccttgtctccgccgtgtatgttaatataggtctaattgctgctttatagattcttgcttttgtgtcttgtcttaagtgtttgttcttccagattgtgtcattaagagatcccgccgctttacttgcttttaagctttgttgtcgtacttcctcttcaacatctccgtaactggttatatcaattcccagatatctaaaccttgcttcctgctttattattttcccatcaatttcgattttacatcgtagtgggtatttagatgttgtcatacatttggtttttctgctgatattatcatattgtatttcttggctgttgtattgaagatgtgtgttaatctttggagatcgtcttctgtctcggcgattaatgcggcgtcgtctgcataacataatactttgatttctttattccccattctgtaaccatgacctttacgtactgcttctattatttcgtccattattatattaaagagcagtgggcttaatgagtcaccttgtctgactccgctttgtactggtataaactgcgttagttttccatttatctttgcctgtattcgattatgaaagtagatgttttcgatggtttgtataatattgattggtatgtttcttctcatacagtaaatgtaagacgtcttcgacttggatgcgatcgaaagcctttgtcaggtctataaaacatagatatgctggtttattgtactcaatggccttttctgtgatttgtctcagtacaaatacggcgtctacgcaggatcttccggatctgaatccttgttgttcatctgataaagttgttagtttattgattttgttggttaggacttttgtggttagcttaagtgcggtgttcagtagatttatacctctataattgttggggtcttctttgtctcctttcttgaacattggtatcattatgctgtttctccatgcgtctggtatcttgcagtgcaatattaatttttgataagttttgtcatctctagggttatactttctcctccgtattttagaagctcgttggttattccgtctggtcctggtgactttctatttttgagtgagtttatggctatctctacttcctgaaaactgatttctatttcgtgtcttaattcaggtacgttattgtgttgattattattttcctttcctttaaacagttccgtcaagtatctttcccattcgtttgctggtatgttattgtattccttcaattcggccatttctttccggtggtttcttatgaatctccatatttgtttttgtgtaccgtagaagtcgctttccatcctttttgtaaaccgttcccagtgttcattttttgttcttcttaccaattgctttgtttcatttcgtattcttctataggtgtctctggattctggagtgtttgatgttttatacttcatgtaggcgtctctcttctctttacatttgtcttttatttcttttctgaaccatggtgtattgttgttgtttcttttgttcagtatgactttgcgttttcctagagcttctgttgctgcctcttcaatattgtttttaattttctcccagctcgcgtttatatcttcgatgtcgtctatctgcttcagctgtatcttctgtgctagcctcctttggtacatttctttggtagaatcgttccacagtgattctacattgaatttttcctcggtgatttcctgtggaaaatgttttggtgttagtttcattcttatttttgctaggactaatttgtgttcactccctgcgtctgccgagtttaaagttcgaatatctagaatctgctctgggtggatttttctattagtgactataaagtcaatcatagatttgtgccccctggagttttcaaacgtatatttatactgaagcttatggtcgaaaaatgtattattgattcgcagttcgttaaaagcacagagattagccatgagttctccatttgagttgacatggttttcattgaatctttgttttactcctggaactatttcatttccgattcgtgcattaaaatcccccataagaattaagtgttcttcatgaggtatgtcgtccaggatgatttgcaactgttcgtagaatgcctctcgttccttcttaggtttgcagtcctcggggctatagatagatataacatttaatttttggtagtccattgtgatgttcatatgtattattctttcggagatgtaacggcagttacttatgttgtctttaaattt

SEQ ID NO: 1258 - DNA, 2335 bp, Diabrotica virgifera
  SmartBlast Evalue=7E-40; Info=Endonuclease-reverse transcriptase n=1 Tax=Bombyx mori RepID=D7F165_BOMMO
gtgactcggtcagtccacggaattttaagaattctccgatatagccatatctcaaatgctttcaattttctgcacatatcttcgtttccacgattcaattccataaaaaaggatagagaagacgtaacaccgcaacattcttacttttacaccaagagaaaagttgtggctcttgaaagaggcctccatatggttaaaggtggatctagcttttccgacgcgcgcactgatctcttggttgttggtccattcttcatttattatggttacgaggtagttttattgcgtcactctttctacagaagtttggttgatatagagttgaccttctgttatctttttcttgctaatgatcataagctttgtcttctttacatttatattgagtccatattgttgactgtaatacgtgattttgttcatgaggacttgtaggtcttctaggttgtccgcaaatactatgtatcatctgtatacctgatgttatttagccggtacccgtttggcgaataatgactgaataataattttttcaatagatatttcgattatcttattattgccgttttcttcttcttcttcttccttcttgtatgtaggctttaaaacctgtttcttcttcaatattagcctcctaaattgtttaagttatcgcaccatctttttcttggtctgccaatacttcttcgtccatttggtgacttatctcgtgctattcgtactatcctatcctctgccattctactaatgtgttcgttccactcctgtttccgttttgtcacccatccatttatgtcttctacattgcatgatcttcttatgttttcgcttctctccctatccaacagacttttccctgatattcgtcagagtatcttcatctctgttgtttctagtagtcgtctcgttttagatgtgtcaggtcttgtctccgccgtgtatgtcaatataggtctaattgctgctttatagattcttgcttttgtgtcttgtcttaggtgtttgttcttccagattgtgtcattaagagatcccgccgctttacttgcttttaagctttgttgtcgtacttcctcttcaacatctccgtaactggttatatctattcccagatatctaaaccttgcttcctgctttattattttcccatcaatttcgattttacatcgtagtgggtatttagatgttgtcatacatttggttttttctgctgatattatcatattgtatttcttggctgttgtattgaagatgtgtgttaatctttggagatcgtcttctgtctcggcgattaatgcggcgtcgtctgcataacataatactttgatttctttattccccattctgtaaccatgacctttacgtactgcttctattatttcgtccattattatattaaagagcagtgggcttaatgagtcaccttgtctgactccgctttgtactggtataaactgcgttagttttccatttatctttgcctgtattcgattatgaaagtagatgttttcgatggtttgtataatattgattggtatgtttcttctcatacagtaaatgtaagacgtcttcgacttggatgcgatcgaaagcctttgtcaggtctataaaacatagatatgctggtttattgtactcaatggccttttctgtgatttgtctcagtacaaatacggcgtctacgcaggatcttccggatctgaatccttgttgttcatctgataaagttgttagtttattgattttgttggttaggacttttgtggttagcttaagtgcggtgttcagtagatttatacctctataattgttggggtcttctttgtctcctttcttgaacattggtatcattatgctgtttctccatgcgtctggtatctcaggaaccactaatcacaattaaacgtttttcccttaaaagaagcgtccctgccgctttttttccaataccgttttcatgatttaattcaatataacattccccgagatattccatttgtttataagccaaaaaattgtttataatttcaaaacattcccgaggccgcccaaacagttcaatttcaactctgcaaagtacaccagacaggcacaaggtccccttatacaaaaatcatagttcttcttcttgatcgtaattattgtggttattatagcaaccgtaaattaattaacaattcaaccgttgccaaactattcactcaattttcatcgacttccggaattacaatccatacgaaaagagctcttgcattaccaagtcatccaattattgacaaacaattaatataaaattttagttgaaaattaaagaccttgttgaaaaacccgcact

SEQ ID NO: 1259 - DNA, 2334 bp, Diabrotica virgifera
  SmartBlast Evalue=2E-37; Info=Endonuclease-reverse transcriptase n=1 Tax=Bombyx mori RepID=D7F165_BOMMO
gtgactcggtcagtccacggaattttaagaattctccgatatagccatatctcaaatgctttcaattttctgcacatatcttcgtttccacgattcaattccataaaaaaggatagagaagacgtaacaccgcaacattcttacttttacaccaagagaaaagttgtggctcttgaaagaggcctccatatggttaaaggtggatctagcttttccgacgcgcgcactgatctcttggttgttggtccattcttcatttattatggttacgaggtagttttattgcgtcactctttctacagaagtttggttgatatagagttgaccttctgttatctttttcttgctaatgatcataagctttgtcttctttacatttatattgagtccatattgttgactgtaatacgtgattttgttcatgaggacttgtaggtcttctaggttgtccgcaaatactatgtatcatctgtatacctgatgttatttagccggtacccgtttggcgaataatgactgaataataattttttcaatagatatttcgattatcttattattgccgttttcttcttcttcttcttccttcttgtatgtaggctttaaaacctgtttcttcttcaatattagcctcctaaattgtttaagttatcgcaccatctttttcttggtctgccaatacttcttcgtccatttggtgacttatctcgtgctattcgtactatcctatcctctgccattctactaatgtgttcgttccactcctgtttccgttttgtcacccatccatttatgtcttctatattgcatgatcttcttatgttttcgctcctctccctatccaacagacttttccctgatattcgtcggagtattttcatctctgttgtttctagtagtcgtctcgttttagatgtgtcaggccttgtctccgccgtgtatgttaatataggtctaattgctgctttatagattcttgcttttgtgtcttgtcttaagtgtttgttcttccagattgtgtcattaagagatcccgccgctttacttgcttttaagctttgttgtcgtacttcctcttcaacatctccgtaactggttatatcaattcccagatatctaaaccttgcttcctgctttattattttcccatcaatttcgattttacatcgtagtgggtatttagatgttgtcatacatttggtttttctgctgatattatcatattgtatttcttggctgttgtattgaagatgtgtgttaatctttggagatcgtcttctgtctcggcgattaatgcggcgtcgtctgcataacataatactttgatttctttattccccattctgtaaccatgacctttacgtactgcttctattatttcgtccattattatattaaagagcagtgggcttaatgagtcaccttgtctgactccgctttgtactggtataaactgcgttagttttccatttatctttgcctgtattcgattatgaaagtagatgttttcgatggtttgtataatattgattggtatgtttcttctcatacagtaaatgtaagacgtcttcgacttggatgcgatcgaaagcctttgtcaggtctataaaacatagatatgctggtttattgtactcaatggccttttctgtgatttgtctcagtacaaatacggcgtctacgcaggatcttccggatctgaatccttgttgttcatctgataaagttgttagtttattgattttgttggttaggacttttgtggttagcttaagtgcggtgttcagtagatttatacctctataattgttggggtcttctttgtctcctttcttgaacattggtatcattatgctgtttctccatgcgtctggtatctcaggaaccactaatcacaattaaacgtttttcccttaaaagaagcgtccctgccgctttttttccaataccgttttcatgatttaattcaatataacattccccgagatattccatttgtttataagccaaaaaattgtttataatttcaaaacattcccgaggccgcccaaacagttcaatttcaactctgcaaagtacaccagacaggcacaaggtccccttatacaaaaatcatagttcttcttcttgatcgtaattattgtggttattatagcaaccgtaaattaattaacaattcaaccgttgccaaactattcactcaattttcatcgacttccggaattacaatccatacgaaaagagctcttgcattaccaagtcatccaattattgacaaacaattaatataaaattttagttgaaaattaaagaccttgttgaaaaacccgcact

SEQ ID NO: 1260 - DNA, 2223 bp, Diabrotica virgifera
  SmartBlast Evalue=2E-32; Info=Endonuclease-reverse transcriptase n=1 Tax=Bombyx mori RepID=D7F165_BOMMO
gggacgtgtacgacacgggccgtggaacaaacgggctccgcacggggtttgatttatggtacgacgggtcgcttccggcttctgcacgggtttttttaaattagttttatttgcgagtgtctttagtggatttaacactttcgttcaccgtgtcctcatttgaggacaacctattctgtagttttttgtatatagctccatatgtttttactcttgtaacacattgtccacgattatggacatcttattccgtccaaagagtacttgtgctgcaatctaacagctttcgaacaaaatatttaattttttgaaatataggtttctataattcgtgcgacatttctatattgacatgcgacaaatgcaatgttcatatctgtgtaagtatcatcagttcatagagtatagtataaaaaactcattggctcacgatatcctcaataaatgagggcatcttgtagtgaccaaactgtgcatttcgaaaatgtaaaacttcttccttcttgtaaacttcaaaatattagcctcctaaattgtttaaattatcgcaccatctttttcttggtctgccaatacttcttcgtctatttggtgacatatcgtgcttttcgtactatcctatcctctgccattctactaatgtgttagttccactcctttttctgttttgtcacccattcatttatgtcttctatattgcatgatcttatgttttcacttctctccctacccaacagacttttccctgattttcgtcggagtattttcatctctgttgtttctagtaatcgtctcgttttagatgcgtcaggtcttgtctccaccgtgtatgtcaaaataggtataattgctgctttatagattcttgcttttgtgtcttgtcttaggtgtttgttcttccagattgtgtcattaagagatcccgccgctttacttgcttttaagctttgttgtcgtacttcctcttcaacatctccgtaactggttatatcaattcccagatatctaaaccttgcttcctgctttattattttcccatcaatttcgattttacatcgtagtgggtatttagatgttgtcatacatttggtttttctgctgatattatcatattgtatttcttggctgttgtattgaagatgtgtgttaatctttggagatcgtcttctgtctcggcgattaatgcggcgtcgtctgcataacataatactttgatttctttattccccattctgtaaccatgacctttacgtactgcttctattatttcgtccattattatattaaagagcagtgggcttaatgagtcaccttgtctgactccgctttgtactggtataaactgcgttagttttccatttatctttgcctgtattcgattatgaaagtagatgttttcgatggtttgtataatattgattggtatgtttcttctcatacagtaaatgtaagacgtcttcgacttggatgcgatcgaaagcctttgtcaggtctataaaacatagatatgctggtttattgtactcaatggccttttctgtgatttgtctcagtacaaatacggcgtctacgcaggatcttccggatctgaatccttgttgttcatctgataaagttgttagtttattgattttgttggttaggacttttgtggttagcttaagtgcggtgttcagtagatttatacctctataattgttggggtcttctttgtctcctttcttgaacattggtatcattatgctgtttctccatgcgtctggtatctcaggaaccactaatcacaattaaacgtttttcccttaaaagaagcgtccctgccgctttttttccaataccgttttcatgatttaattcaatataacattccccgagatattccatttgtttataagccaaaaaattgtttataatttcaaaacattcccgaggccgcccaaacagttcaatttcaactctgcaaagtacaccagacaggcacaaggtccccttatacaaaaatcatagttcttcttcttgatcgtaattattgtggttattatagcaaccgtaaattaattaacaattcaaccgttgccaaactattcactcaattttcatcgacttccggaattacaatccatacgaaaagagctcttgcattaccaagtcatccaattattgacaaacaattaatataaaattttagttgaaaattaaagaccttgttgaaaaacccgcact

SEQ ID NO: 1261 - DNA, 4170 bp, Diabrotica virgifera
  SmartBlast Evalue=8E-53; Info=Endonuclease-reverse transcriptase n=1 Tax=Bombyx mori RepID=D5LB38_BOMMO
gccggttattagcgcgctcaccactgtataccataaacttataaaaatatactttaaattcttcttcttgatgtgctatccgtgacgaatgttggcgatcatcatggcaatcttcactttatctgcagcaacgcggaaaagctgcacagatgttgtgttgaaccaggttctgaggttctttaaccaggatgttcttcttcttcctggacctcgctttccaaatatttttccttgcaggatggcttgtaggagggcatatctggattcatttcgcataatgtgtccaaagtattccaactttcgagatttgatggtggttagtacttctcggttcttccccattcttctaaggacctcctcatttgtgacccgatcagtccatgggattttaagaattctccgatatagccacatctcaaatgcttccaattttcggcacatatcctcgttcaaggtccatgattcaacaccataaaaaaggacagagaagacgtaacatctcagcattcttacttttataccaagagaaaggttgtggctcttgaaaaacgccccatacggttgaagattgatctagcttttccgatgcgcgctcttatctcttggttgttggtccattcttcatttattatggtgccgaggtagttgtagtgcctcactctttctacagaagtttggttgatatagagttgaccttctgttatctttttcttgctaatgatcataagctttgtcttctttacatttatattgagtccatattgttgactgtaatacgtgattttgttcatgaggacttgtaggtcttctaggttgtccgcaaatactatgtgtcatctgtatacctgatgttatttagccggtacccgtttggcgaataatgactgaataataattttttcaatagatatttcgattatcttattattgccgttttcttcttcttcttcttccttcttgtatgtaggctttaaaacctgtttcttcttcaatattagcctcctaaattgtttaagttatcgcaccatctttttcttggtctgccaatacttcttcgtccatttggtgacttatctcgtgctattcgtactatcctatcctctgccattctactaatgtgttcgttccactcctgtttccgttttgtcacccatccatttatgtcttctacattgcatgatcttcttatgttttcgcttctctccctatccaacagacttttccctgatattcgtcagagtatcttcatctctgttgtttctagtagtcgtctcgttttagatgtgtcaggtcttgtctccgccgtgtatgtcaatataggtctaattgctgctttatagattcttgcttttgtgtcttgtcttaggtgtttgttcttccagattgtgtcattaagagatcccgccgctttacttgcttttaagctttgttgtcgtacttcctcttcaacatctccgtaactggttatatctattcccagatatctaaaccttgcttcctgctttattattttcccatcaatttcgattttacatcgtagtgggtatttagatgttgtcatacatttggttttttctgctgatattatcatattgtatttcttggctgttgtattgaagatgtgtgttaatctttggagatcgtcttctgtctcggcgattaatgcggcgtcgtctgcataacataatactttgatttctttattccccattctgtaaccatgacctttacgtactgcttctattatttcgtccattattatattaaagagcagtgggcttaatgagtcaccttgtctgactccgctttgtactggtataaactgcgttagttttccatttatctttgcctgtattcgattatgaaagtagatgttttcgatggtttgtataatattgattggtatgtttcttctcatacagtaaatgtaagacgtcttcgacttggatgcgatcgaaagcctttgtcaggtctataaaacatagatatgctggtttattgtactcaatggccttttctgtgatttgtctcagtacaaatacggcgtctacgcaggatcttccggatctgaatccttgttgttcatctgataaagttgttagtttattgattttgttggttaggacttttgtggttagcttaagtgcggtgttcagtagatttatacctctataattgttggggtcttctttgtctcctttcttgaacattggtatcattatgctgtttctccatgcgtctggtatcttgcagtgcaatattaatttttgataagttttgtcatctctagggttatactttctcctccgtattttagaagctcgttggttattccgtctggtcctggtgactttctatttttgagtgagtttatggctatctctacttcctgaaaactgatttctatttcgtgtcttaattcaggtacgttattgtgttgattattattttcctttcctttaaacagttccgtcaagtatctttcccattcgtttgctggtatgttattgtattccttcaattcggccatttctttccggtggtttcttatgaatctccatatttgtttttgtgtaccgtagaagtcgctttccatcctttttgtaaaccgttcccagtgttcattttttgttcttcttgccaactgctttgtttcacttcgtattcttctataggtgtctctggattctggagtatttgatgttttatacttcatgtaggcccctcgtttcacttaacattttaatataataatgaaacatattaatataataatgtttcaatatactatcataatataatgtataataatatataaacacaccgagaagccagactgatcaaaaacaatagttgcccgtgaatagcacgttgcgaccgccgacacgtagtttatgttaagatggagtggggcgagcacggccggtagacggggcctatccccgttgccggcccgtcacgttataccataaactatccaatgtctttcatatcacacgattcttcaacgtctcctgcaacacggccgttttgtacacgacccgttctaacataaatcagacttaattatacaaagagtgggttgtattcggacttctgcttcttttaaaaaataaatctgccaataaattaatatacaatgggtgacaaaattagaaccatttcataaaatttaaaagccacaacagaaaaaattaacaaatcacagcaaaacatgatgaaggaaaagttcgcgacattttcttggcaaaaaatagaataacaaaatgttaagcaaaattatggctggcatgaatatttcatcaatgacacttcgttggcatataaaagatatgcagattccaatatgtcagcctggaaaaagccgctacttatccctccgtaaaataaaataaaaatataacataaaataaaatatactcactgacaaaaatattgcatatgcatgtgcaatgaaattttttgtgctgctgtccgtagccatatggtatagatagatgctgctgtcatatagtatagatactataatcggatttaaatctgatctggactatatgccggccagtataatttttaaattgaatttcatcaaggcaactatatattcactatgctagcgacatgaagacgtccattagcaccgatatgtcatatccaatatggctttcaaatagcaaaacatgatcttgtaaaacgcttcaatgtacatatcagctttcattcgcccaagcacatccacgtgttcgggatgtcctttcaaaacaataccgctccgtagaattatgccgccgccaccaaaagtaacgcattgtatgaggttacaactgacatactgttcgccaactcttctgtagactaagttttgtaaatcttgcttccatataatgaacggtattccagatgtaacttcatagtgttaattttggtagcgccggcatagtgctagggagtggtattttttggaaaggagatacctaacttgtggagatgattgggtgaatgacagctgatatgtacattaaaaacattttagaagatcatgcttgccatttgcagccatatgggataacacattcgtgttaatgcaccaagacgcaagacgggggacatgaaaggagcctccacgtagattgtgatcacttgtgaatacaattgggcgtcccctggaaa

SEQ ID NO: 1262 - DNA, 2020 bp, Diabrotica virgifera
  SmartBlast Evalue=6E-40; Info=Endonuclease-reverse transcriptase n=1 Tax=Bombyx mori RepID=D7F165_BOMMO
gtgggtatttggtcttaaatttggtttgctctcaggactaataccaggttctgactttgatatacaatatatatgttgtttggattacaaatggtattgataatacatagatatataagtgacactcaaatgtgaaatgtgtactggctcgatatgttgttgacgcggtattttctttctattgatttcctctttcagtgtggatgaccgcatcctactgcattctaccgaggaatttgcaacacaattggtttcttcttcttcttcttccttcttgtatgtaggctttaaagcctgtttcttcttcaatattatcctcctaaattgtttaggttatcgcaccacctttttcttggtctgccaatacttcttcgtccatttggtgacttatctcgtgctattcgtactatcctatcctctgccattctactaatgtgttcgttccactcctgtttccgttttgtcacccatccatttatgtcttctacattgcatgatcttcttatgttttcgcttctctccctatccaacagacttttccctgatattcgtcagagtatcttcatctctgttgtttctagtagtcgtctcgttttagatgtgtcaggtcttgtctccgccgtgtatgtcaatataggtctaattgctgctttatagattcttgcttttgtgtcttgtcttaggtgtttgttcttccagattgtgtcattaagagatcccgccgctttacttgcttttaagctttgttgtcgtacttcctcttcaacatctccgtaactggttatatctattcccagatatctaaaccttgcttcctgctttattattttcccatcaatttcgattttacatcgtagtgggtatttagatgttgtcatacatttggttttttctgctgatattatcatattgtatttcttggctgttgtattgaagatgtgtgttaatctttggagatcgtcttctgtctcggcgattaatgcggcgtcgtctgcataacataatactttgatttctttattccccattctgtaaccatgacctttacgtactgcttctattatttcgtccattattatattaaagagcagtgggcttaatgagtcaccttgtctgactccgctttgtactggtataaactgcgttagttttccatttatctttgcctgtattcgattatgaaagtagatgttttcgatggtttgtataatattgattggtatgtttcttctcatacagtaaatgtaagacgtcttcgacttggatgcgatcgaaagcctttgtcaggtctataaaacatagatatgctggtttattgtactcaatggccttttctgtgatttgtctcagtacaaatacggcgtctacgcaggatcttccggatctgaatccttgttgttcatctgataaagttgttagtttattgattttgttggttaggacttttgtggttagcttaagtgcggtgttcagtagatttatacctctataattgttggggtcttctttgtctcctttcttgaacattggtatcattatgctgtttctccatgcgtctggtatctcaggaaccactaatcacaattaaacgtttttcccttaaaagaagcgtccctgccgctttttttccaataccgttttcatgatttaattcaatataacattccccgagatattccatttgtttataagccaaaaaattgtttataatttcaaaacattcccgaggccgcccaaacagttcaatttcaactctgcaaagtacaccagacaggcacaaggtccccttatacaaaaatcatagttcttcttcttgatcgtaattattgtggttattatagcaaccgtaaattaattaacaattcaaccgttgccaaactattcactcaattttcatcgacttccggaattacaatccatacgaaaagagctcttgcattaccaagtcatccaattattgacaaacaattaatataaaattttagttgaaaattaaagaccttgttgaaaaacccgcact

SEQ ID NO: 1263 - DNA, 2019 bp, Diabrotica virgifera
  SmartBlast Evalue=2E-37; Info=Endonuclease-reverse transcriptase n=1 Tax=Bombyx mori RepID=D7F165_BOMMO
gtgggtatttggtcttaaatttggtttgctctcaggactaataccaggttctgactttgatatacaatatatatgttgtttggattacaaatggtattgataatacatagatatataagtgacactcaaatgtgaaatgtgtactggctcgatatgttgttgacgcggtattttctttctattgatttcctctttcagtgtggatgaccgcatcctactgcattctaccgaggaatttgcaacacaattggtttcttcttcttcttcttccttcttgtatgtaggctttaaagcctgtttcttcttcaatattatcctcctaaattgtttaggttatcgcaccacctttttcttggtctgccaatacttcttcgtccatttggtgacttatctcgtgctattcgtactatcctatcctctgccattctactaatgtgttcgttccactcctgtttccgttttgtcacccatccatttatgtcttctatattgcatgatcttcttatgttttcgctcctctccctatccaacagacttttccctgatattcgtcggagtattttcatctctgttgtttctagtagtcgtctcgttttagatgtgtcaggccttgtctccgccgtgtatgttaatataggtctaattgctgctttatagattcttgcttttgtgtcttgtcttaagtgtttgttcttccagattgtgtcattaagagatcccgccgctttacttgcttttaagctttgttgtcgtacttcctcttcaacatctccgtaactggttatatcaattcccagatatctaaaccttgcttcctgctttattattttcccatcaatttcgattttacatcgtagtgggtatttagatgttgtcatacatttggtttttctgctgatattatcatattgtatttcttggctgttgtattgaagatgtgtgttaatctttggagatcgtcttctgtctcggcgattaatgcggcgtcgtctgcataacataatactttgatttctttattccccattctgtaaccatgacctttacgtactgcttctattatttcgtccattattatattaaagagcagtgggcttaatgagtcaccttgtctgactccgctttgtactggtataaactgcgttagttttccatttatctttgcctgtattcgattatgaaagtagatgttttcgatggtttgtataatattgattggtatgtttcttctcatacagtaaatgtaagacgtcttcgacttggatgcgatcgaaagcctttgtcaggtctataaaacatagatatgctggtttattgtactcaatggccttttctgtgatttgtctcagtacaaatacggcgtctacgcaggatcttccggatctgaatccttgttgttcatctgataaagttgttagtttattgattttgttggttaggacttttgtggttagcttaagtgcggtgttcagtagatttatacctctataattgttggggtcttctttgtctcctttcttgaacattggtatcattatgctgtttctccatgcgtctggtatctcaggaaccactaatcacaattaaacgtttttcccttaaaagaagcgtccctgccgctttttttccaataccgttttcatgatttaattcaatataacattccccgagatattccatttgtttataagccaaaaaattgtttataatttcaaaacattcccgaggccgcccaaacagttcaatttcaactctgcaaagtacaccagacaggcacaaggtccccttatacaaaaatcatagttcttcttcttgatcgtaattattgtggttattatagcaaccgtaaattaattaacaattcaaccgttgccaaactattcactcaattttcatcgacttccggaattacaatccatacgaaaagagctcttgcattaccaagtcatccaattattgacaaacaattaatataaaattttagttgaaaattaaagaccttgttgaaaaacccgcact

SEQ ID NO: 1264 - DNA, 1797 bp, Diabrotica virgifera
  SmartBlast Evalue=3E-53; Info=Endonuclease-reverse transcriptase n=1 Tax=Bombyx mori RepID=D5LB38_BOMMO
gccggttattagcgcgctcaccactgtataccataaacttataaaaatatactttaaattcttcttcttgatgtgctatccgtgacgaatgttggcgatcatcatggcaatcttcactttatctgcagcaacgcggaaaagctgcacagatgttgtgttgaaccaggttctgaggttctttaaccaggatgttcttcttcttcctggacctcgctttccaaatatttttccttgcaggatggcttgtaggagggcatatctggattcatttcgcataatgtgtccaaagtattccaactttcgagatttgatggtggttagtacttctcggttcttccccattcttctaaggacctcctcatttgtgacccgatcagtccatgggattttaagaattctccgatatagccacatctcaaatgcttccaattttcggcacatatcctcgttcaaggtccatgattcaacaccataaaaaaggacagagaagacgtaacatctcagcattcttacttttataccaagagaaaggttgtggctcttgaaaaacgccccatacggttgaagattgatctagcttttccgatgcgcgctcttatctcttggttgttggtccattcttcatttattatggtgccgaggtagttgtagtgcctcactctttctacagaagtttggttgatatagagttgaccttctgttatctttttcttgctaatgatcataagctttgtcttctttacatttatattgagtccatattgttgactgtaatacgtgattttgttcatgaggacttgtaggtcttctaggttgtccgcaaatactatgtgtcatctgtatacctgatgttatttagccggtacccgtttggcgaataatgactgaataataattttttcaatagatatttcgattatcttattattgccgttttcttcttcttcttcttccttcttgtatgtaggctttaaaacctgtttcttcttcaatattagcctcctaaattgtttaagttatcgcaccatctttttcttggtctgccaatacttcttcgtccatttggtgacttatctcgtgctattcgtactatcctatcctctgccattctactaatgtgttcgttccactcctgtttccgttttgtcacccatccatttatgtcttctacattgcatgatcttcttatgttttcgcttctctccctatcccacagacttttccctgatattcgtcggagtattttcatctctgttgtttctagtagtcgtctcgttttagatgtgtcaggtcttgtctccattctgtcaatgtctaccattagaatgtcaagtttgatatttaacacaacgttaaaaaagtttggtcataattgtaaattctaatatttcagaagtggaattaactcttcaatagtaacatcataatgagaaatgaagaaatgtaattgaaatgacatttttactgaaaactgaagaaaaatgcttagggaataaaaatatctacactacctataaaactattctttgttttaaatgtacaaattaaaataacgccgttccttctaactaaccgtaacttgtcgttctgaacctgttcaatattcaactgccagtcgttctttcctggattctgcccgttcagctttagcttgagataattcgaaactagctgagtcctgttctgtttcagctactaacttccttagtctagcaactctggcttctctggcagcttgtttctcttgcatggctaccatttcttcttccaaatcgttaagtctgtcctttgagagtt

SEQ ID NO: 1265 - DNA, 1429 bp, Diabrotica virgifera
  SmartBlast Evalue=5E-20; Info=Endonuclease-reverse transcriptase n=1 Tax=Bombyx mori RepID=D5LB38_BOMMO
gtgactcggtcagtccacggaattttaagaattctccgatatagccatatctcaaatgctttcaattttctgcacatatcttcgtttccacgattcaattccataaaaaaggatagagaagacgtaacaccgcaacattcttacttttacaccaagagaaaagttgtggctcttgaaagaggcctccatatggttaaaggtggatctagcttttccgacgcgcgcactgatctcttggttgttggtccattcttcatttattatggttacgaggtagttttattgcgtcactctttctacagaagtttggttgatatagagttgaccttctgttatctttttcttgctaatgatcataagctttgtcttctttacatttatattgagtccatattgttgactgtaatacgtgattttgttcatgaggacttgtaggtcttctaggttgtccgcaaatactatgtatcatctgtatacctgatgttatttagccggtacccgtttggcgaataatgactgaataataattttttcaatagatatttcgattatcttattattgccgttttcttcttcttcttcttccttcttgtatgtaggctttaaaacctgtttcttcttcaatattagcctcctaaattgtttaagttatcgcaccatctttttcttggtctgccaatacttcttcgtccatttggtgacttatctcgtgctattcgtactatcctatcctctgccattctactaatgtgttcgttccactcctgtttccgttttgtcacccatccatttatgtcttctacattgcatgatcttcttatgttttcgcttctctccctatcccacagacttttccctgatattcgtcggagtattttcatctctgttgtttctagtagtcgtctcgttttagatgtgtcaggtcttgtctccattctgtcaatgtctaccattagaatgtcaagtttgatatttaacacaacgttaaaaaagtttggtcataattgtaaattctaatatttcagaagtggaattaactcttcaatagtaacatcataatgagaaatgaagaaatgtaattgaaatgacatttttactgaaaactgaagaaaaatgcttagggaataaaaatatctacactacctataaaactattctttgttttaaatgtacaaattaaaataacgccgttccttctaactaaccgtaacttgtcgttctgaacctgttcaatattcaactgccagtcgttctttcctggattctgcccgttcagctttagcttgagataattcgaaactagctgagtcctgttctgtttcagctactaacttccttagtctagcaactctggcttctctggcagcttgtttctcttgcatggctaccatttcttcttccaaatcgttaagtctgtcctttgagagtt

SEQ ID NO: 1266 - DNA, 1114 bp, Diabrotica virgifera
gtgggtatttggtcttaaatttggtttgctctcaggactaataccaggttctgactttgatatacaatatatatgttgtttggattacaaatggtattgataatacatagatatataagtgacactcaaatgtgaaatgtgtactggctcgatatgttgttgacgcggtattttctttctattgatttcctctttcagtgtggatgaccgcatcctactgcattctaccgaggaatttgcaacacaattggtttcttcttcttcttcttccttcttgtatgtaggctttaaagcctgtttcttcttcaatattatcctcctaaattgtttaggttatcgcaccacctttttcttggtctgccaatacttcttcgtccatttggtgacttatctcgtgctattcgtactatcctatcctctgccattctactaatgtgttcgttccactcctgtttccgttttgtcacccatccatttatgtcttctacattgcatgatcttcttatgttttcgcttctctccctatcccacagacttttccctgatattcgtcggagtattttcatctctgttgtttctagtagtcgtctcgttttagatgtgtcaggtcttgtctccattctgtcaatgtctaccattagaatgtcaagtttgatatttaacacaacgttaaaaaagtttggtcataattgtaaattctaatatttcagaagtggaattaactcttcaatagtaacatcataatgagaaatgaagaaatgtaattgaaatgacatttttactgaaaactgaagaaaaatgcttagggaataaaaatatctacactacctataaaactattctttgttttaaatgtacaaattaaaataacgccgttccttctaactaaccgtaacttgtcgttctgaacctgttcaatattcaactgccagtcgttctttcctggattctgcccgttcagctttagcttgagataattcgaaactagctgagtcctgttctgtttcagctactaacttccttagtctagcaactctggcttctctggcagcttgtttctcttgcatggctaccatttcttcttccaaatcgttaagtctgtcctttgagagtt

SEQ ID NO: 1267 - DNA, 4169 bp, Diabrotica virgifera
  SmartBlast Evalue=8E-53; Info=Endonuclease-reverse transcriptase n=1 Tax=Bombyx mori RepID=D5LB38_BOMMO
gccggttattagcgcgctcaccactgtataccataaacttataaaaatatactttaaattcttcttcttgatgtgctatccgtgacgaatgttggcgatcatcatggcaatcttcactttatctgcagcaacgcggaaaagctgcacagatgttgtgttgaaccaggttctgaggttctttaaccaggatgttcttcttcttcctggacctcgctttccaaatatttttccttgcaggatggcttgtaggagggcatatctggattcatttcgcataatgtgtccaaagtattccaactttcgagatttgatggtggttagtacttctcggttcttccccattcttctaaggacctcctcatttgtgacccgatcagtccatgggattttaagaattctccgatatagccacatctcaaatgcttccaattttcggcacatatcctcgttcaaggtccatgattcaacaccataaaaaaggacagagaagacgtaacatctcagcattcttacttttataccaagagaaaggttgtggctcttgaaaaacgccccatacggttgaagattgatctagcttttccgatgcgcgctcttatctcttggttgttggtccattcttcatttattatggtgccgaggtagttgtagtgcctcactctttctacagaagtttggttgatatagagttgaccttctgttatctttttcttgctaatgatcataagctttgtcttctttacatttatattgagtccatattgttgactgtaatacgtgattttgttcatgaggacttgtaggtcttctaggttgtccgcaaatactatgtgtcatctgtatacctgatgttatttagccggtacccgtttggcgaataatgactgaataataattttttcaatagatatttcgattatcttattattgccgttttcttcttcttcttcttccttcttgtatgtaggctttaaaacctgtttcttcttcaatattagcctcctaaattgtttaagttatcgcaccatctttttcttggtctgccaatacttcttcgtccatttggtgacttatctcgtgctattcgtactatcctatcctctgccattctactaatgtgttcgttccactcctgtttccgttttgtcacccatccatttatgtcttctatattgcatgatcttcttatgttttcgctcctctccctatccaacagacttttccctgatattcgtcggagtattttcatctctgttgtttctagtagtcgtctcgttttagatgtgtcaggccttgtctccgccgtgtatgttaatataggtctaattgctgctttatagattcttgcttttgtgtcttgtcttaagtgtttgttcttccagattgtgtcattaagagatcccgccgctttacttgcttttaagctttgttgtcgtacttcctcttcaacatctccgtaactggttatatcaattcccagatatctaaaccttgcttcctgctttattattttcccatcaatttcgattttacatcgtagtgggtatttagatgttgtcatacatttggtttttctgctgatattatcatattgtatttcttggctgttgtattgaagatgtgtgttaatctttggagatcgtcttctgtctcggcgattaatgcggcgtcgtctgcataacataatactttgatttctttattccccattctgtaaccatgacctttacgtactgcttctattatttcgtccattattatattaaagagcagtgggcttaatgagtcaccttgtctgactccgctttgtactggtataaactgcgttagttttccatttatctttgcctgtattcgattatgaaagtagatgttttcgatggtttgtataatattgattggtatgtttcttctcatacagtaaatgtaagacgtcttcgacttggatgcgatcgaaagcctttgtcaggtctataaaacatagatatgctggtttattgtactcaatggccttttctgtgatttgtctcagtacaaatacggcgtctacgcaggatcttccggatctgaatccttgttgttcatctgataaagttgttagtttattgattttgttggttaggacttttgtggttagcttaagtgcggtgttcagtagatttatacctctataattgttggggtcttctttgtctcctttcttgaacattggtatcattatgctgtttctccatgcgtctggtatcttgcagtgcaatattaatttttgataagttttgtcatctctagggttatactttctcctccgtattttagaagctcgttggttattccgtctggtcctggtgactttctatttttgagtgagtttatggctatctctacttcctgaaaactgatttctatttcgtgtcttaattcaggtacgttattgtgttgattattattttcctttcctttaaacagttccgtcaagtatctttcccattcgtttgctggtatgttattgtattccttcaattcggccatttctttccggtggtttcttatgaatctccatatttgtttttgtgtaccgtagaagtcgctttccatcctttttgtaaaccgttcccagtgttcattttttgttcttcttgccaactgctttgtttcacttcgtattcttctataggtgtctctggattctggagtatttgatgttttatacttcatgtaggcccctcgtttcacttaacattttaatataataatgaaacatattaatataataatgtttcaatatactatcataatataatgtataataatatataaacacaccgagaagccagactgatcaaaaacaatagttgcccgtgaatagcacgttgcgaccgccgacacgtagtttatgttaagatggagtggggcgagcacggccggtagacggggcctatccccgttgccggcccgtcacgttataccataaactatccaatgtctttcatatcacacgattcttcaacgtctcctgcaacacggccgttttgtacacgacccgttctaacataaatcagacttaattatacaaagagtgggttgtattcggacttctgcttcttttaaaaaataaatctgccaataaattaatatacaatgggtgacaaaattagaaccatttcataaaatttaaaagccacaacagaaaaaattaacaaatcacagcaaaacatgatgaaggaaaagttcgcgacattttcttggcaaaaaatagaataacaaaatgttaagcaaaattatggctggcatgaatatttcatcaatgacacttcgttggcatataaaagatatgcagattccaatatgtcagcctggaaaaagccgctacttatccctccgtaaaataaaataaaaatataacataaaataaaatatactcactgacaaaaatattgcatatgcatgtgcaatgaaattttttgtgctgctgtccgtagccatatggtatagatagatgctgctgtcatatagtatagatactataatcggatttaaatctgatctggactatatgccggccagtataatttttaaattgaatttcatcaaggcaactatatattcactatgctagcgacatgaagacgtccattagcaccgatatgtcatatccaatatggctttcaaatagcaaaacatgatcttgtaaaacgcttcaatgtacatatcagctttcattcgcccaagcacatccacgtgttcgggatgtcctttcaaaacaataccgctccgtagaattatgccgccgccaccaaaagtaacgcattgtatgaggttacaactgacatactgttcgccaactcttctgtagactaagttttgtaaatcttgcttccatataatgaacggtattccagatgtaacttcatagtgttaattttggtagcgccggcatagtgctagggagtggtattttttggaaaggagatacctaacttgtggagatgattgggtgaatgacagctgatatgtacattaaaaacattttagaagatcatgcttgccatttgcagccatatgggataacacattcgtgttaatgcaccaagacgcaagacgggggacatgaaaggagcctccacgtagattgtgatcacttgtgaatacaattgggcgtcccctggaaa

SEQ ID NO: 1268 - DNA, 3802 bp, Diabrotica virgifera
  SmartBlast Evalue=2E-50; Info=Endonuclease-reverse transcriptase n=1 Tax=Bombyx mori RepID=D7F165_BOMMO
gtgactcggtcagtccacggaattttaagaattctccgatatagccatatctcaaatgctttcaattttctgcacatatcttcgtttccacgattcaattccataaaaaaggatagagaagacgtaacaccgcaacattcttacttttacaccaagagaaaagttgtggctcttgaaagaggcctccatatggttaaaggtggatctagcttttccgacgcgcgcactgatctcttggttgttggtccattcttcatttattatggttacgaggtagttttattgcgtcactctttctacagaagtttggttgatatagagttgaccttctgttatctttttcttgctaatgatcataagctttgtcttctttacatttatattgagtccatattgttgactgtaatacgtgattttgttcatgaggacttgtaggtcttctaggttgtccgcaaatactatgtatcatctgtatacctgatgttatttagccggtacccgtttggcgaataatgactgaataataattttttcaatagatatttcgattatcttattattgccgttttcttcttcttcttcttccttcttgtatgtaggctttaaaacctgtttcttcttcaatattagcctcctaaattgtttaagttatcgcaccatctttttcttggtctgccaatacttcttcgtccatttggtgacttatctcgtgctattcgtactatcctatcctctgccattctactaatgtgttcgttccactcctgtttccgttttgtcacccatccatttatgtcttctacattgcatgatcttcttatgttttcgcttctctccctatccaacagacttttccctgatattcgtcagagtatcttcatctctgttgtttctagtagtcgtctcgttttagatgtgtcaggtcttgtctccgccgtgtatgtcaatataggtctaattgctgctttatagattcttgcttttgtgtcttgtcttaggtgtttgttcttccagattgtgtcattaagagatcccgccgctttacttgcttttaagctttgttgtcgtacttcctcttcaacatctccgtaactggttatatctattcccagatatctaaaccttgcttcctgctttattattttcccatcaatttcgattttacatcgtagtgggtatttagatgttgtcatacatttggttttttctgctgatattatcatattgtatttcttggctgttgtattgaagatgtgtgttaatctttggagatcgtcttctgtctcggcgattaatgcggcgtcgtctgcataacataatactttgatttctttattccccattctgtaaccatgacctttacgtactgcttctattatttcgtccattattatattaaagagcagtgggcttaatgagtcaccttgtctgactccgctttgtactggtataaactgcgttagttttccatttatctttgcctgtattcgattatgaaagtagatgttttcgatggtttgtataatattgattggtatgtttcttctcatacagtaaatgtaagacgtcttcgacttggatgcgatcgaaagcctttgtcaggtctataaaacatagatatgctggtttattgtactcaatggccttttctgtgatttgtctcagtacaaatacggcgtctacgcaggatcttccggatctgaatccttgttgttcatctgataaagttgttagtttattgattttgttggttaggacttttgtggttagcttaagtgcggtgttcagtagatttatacctctataattgttggggtcttctttgtctcctttcttgaacattggtatcattatgctgtttctccatgcgtctggtatcttgcagtgcaatattaatttttgataagttttgtcatctctagggttatactttctcctccgtattttagaagctcgttggttattccgtctggtcctggtgactttctatttttgagtgagtttatggctatctctacttcctgaaaactgatttctatttcgtgtcttaattcaggtacgttattgtgttgattattattttcctttcctttaaacagttccgtcaagtatctttcccattcgtttgctggtatgttattgtattccttcaattcggccatttctttccggtggtttcttatgaatctccatatttgtttttgtgtaccgtagaagtcgctttccatcctttttgtaaaccgttcccagtgttcattttttgttcttcttgccaactgctttgtttcacttcgtattcttctataggtgtctctggattctggagtatttgatgttttatacttcatgtaggcccctcgtttcacttaacattttaatataataatgaaacatattaatataataatgtttcaatatactatcataatataatgtataataatatataaacacaccgagaagccagactgatcaaaaacaatagttgcccgtgaatagcacgttgcgaccgccgacacgtagtttatgttaagatggagtggggcgagcacggccggtagacggggcctatccccgttgccggcccgtcacgttataccataaactatccaatgtctttcatatcacacgattcttcaacgtctcctgcaacacggccgttttgtacacgacccgttctaacataaatcagacttaattatacaaagagtgggttgtattcggacttctgcttcttttaaaaaataaatctgccaataaattaatatacaatgggtgacaaaattagaaccatttcataaaatttaaaagccacaacagaaaaaattaacaaatcacagcaaaacatgatgaaggaaaagttcgcgacattttcttggcaaaaaatagaataacaaaatgttaagcaaaattatggctggcatgaatatttcatcaatgacacttcgttggcatataaaagatatgcagattccaatatgtcagcctggaaaaagccgctacttatccctccgtaaaataaaataaaaatataacataaaataaaatatactcactgacaaaaatattgcatatgcatgtgcaatgaaattttttgtgctgctgtccgtagccatatggtatagatagatgctgctgtcatatagtatagatactataatcggatttaaatctgatctggactatatgccggccagtataatttttaaattgaatttcatcaaggcaactatatattcactatgctagcgacatgaagacgtccattagcaccgatatgtcatatccaatatggctttcaaatagcaaaacatgatcttgtaaaacgcttcaatgtacatatcagctttcattcgcccaagcacatccacgtgttcgggatgtcctttcaaaacaataccgctccgtagaattatgccgccgccaccaaaagtaacgcattgtatgaggttacaactgacatactgttcgccaactcttctgtagactaagttttgtaaatcttgcttccatataatgaacggtattccagatgtaacttcatagtgttaattttggtagcgccggcatagtgctagggagtggtattttttggaaaggagatacctaacttgtggagatgattgggtgaatgacagctgatatgtacattaaaaacattttagaagatcatgcttgccatttgcagccatatgggataacacattcgtgttaatgcaccaagacgcaagacgggggacatgaaaggagcctccacgtagattgtgatcacttgtgaatacaattgggcgtcccctggaaa

SEQ ID NO: 1269 - DNA, 3801 bp, Diabrotica virgifera
  SmartBlast Evalue=4E-48; Info=Endonuclease-reverse transcriptase n=1 Tax=Bombyx mori RepID=D7F165_BOMMO
gtgactcggtcagtccacggaattttaagaattctccgatatagccatatctcaaatgctttcaattttctgcacatatcttcgtttccacgattcaattccataaaaaaggatagagaagacgtaacaccgcaacattcttacttttacaccaagagaaaagttgtggctcttgaaagaggcctccatatggttaaaggtggatctagcttttccgacgcgcgcactgatctcttggttgttggtccattcttcatttattatggttacgaggtagttttattgcgtcactctttctacagaagtttggttgatatagagttgaccttctgttatctttttcttgctaatgatcataagctttgtcttctttacatttatattgagtccatattgttgactgtaatacgtgattttgttcatgaggacttgtaggtcttctaggttgtccgcaaatactatgtatcatctgtatacctgatgttatttagccggtacccgtttggcgaataatgactgaataataattttttcaatagatatttcgattatcttattattgccgttttcttcttcttcttcttccttcttgtatgtaggctttaaaacctgtttcttcttcaatattagcctcctaaattgtttaagttatcgcaccatctttttcttggtctgccaatacttcttcgtccatttggtgacttatctcgtgctattcgtactatcctatcctctgccattctactaatgtgttcgttccactcctgtttccgttttgtcacccatccatttatgtcttctatattgcatgatcttcttatgttttcgctcctctccctatccaacagacttttccctgatattcgtcggagtattttcatctctgttgtttctagtagtcgtctcgttttagatgtgtcaggccttgtctccgccgtgtatgttaatataggtctaattgctgctttatagattcttgcttttgtgtcttgtcttaagtgtttgttcttccagattgtgtcattaagagatcccgccgctttacttgcttttaagctttgttgtcgtacttcctcttcaacatctccgtaactggttatatcaattcccagatatctaaaccttgcttcctgctttattattttcccatcaatttcgattttacatcgtagtgggtatttagatgttgtcatacatttggtttttctgctgatattatcatattgtatttcttggctgttgtattgaagatgtgtgttaatctttggagatcgtcttctgtctcggcgattaatgcggcgtcgtctgcataacataatactttgatttctttattccccattctgtaaccatgacctttacgtactgcttctattatttcgtccattattatattaaagagcagtgggcttaatgagtcaccttgtctgactccgctttgtactggtataaactgcgttagttttccatttatctttgcctgtattcgattatgaaagtagatgttttcgatggtttgtataatattgattggtatgtttcttctcatacagtaaatgtaagacgtcttcgacttggatgcgatcgaaagcctttgtcaggtctataaaacatagatatgctggtttattgtactcaatggccttttctgtgatttgtctcagtacaaatacggcgtctacgcaggatcttccggatctgaatccttgttgttcatctgataaagttgttagtttattgattttgttggttaggacttttgtggttagcttaagtgcggtgttcagtagatttatacctctataattgttggggtcttctttgtctcctttcttgaacattggtatcattatgctgtttctccatgcgtctggtatcttgcagtgcaatattaatttttgataagttttgtcatctctagggttatactttctcctccgtattttagaagctcgttggttattccgtctggtcctggtgactttctatttttgagtgagtttatggctatctctacttcctgaaaactgatttctatttcgtgtcttaattcaggtacgttattgtgttgattattattttcctttcctttaaacagttccgtcaagtatctttcccattcgtttgctggtatgttattgtattccttcaattcggccatttctttccggtggtttcttatgaatctccatatttgtttttgtgtaccgtagaagtcgctttccatcctttttgtaaaccgttcccagtgttcattttttgttcttcttgccaactgctttgtttcacttcgtattcttctataggtgtctctggattctggagtatttgatgttttatacttcatgtaggcccctcgtttcacttaacattttaatataataatgaaacatattaatataataatgtttcaatatactatcataatataatgtataataatatataaacacaccgagaagccagactgatcaaaaacaatagttgcccgtgaatagcacgttgcgaccgccgacacgtagtttatgttaagatggagtggggcgagcacggccggtagacggggcctatccccgttgccggcccgtcacgttataccataaactatccaatgtctttcatatcacacgattcttcaacgtctcctgcaacacggccgttttgtacacgacccgttctaacataaatcagacttaattatacaaagagtgggttgtattcggacttctgcttcttttaaaaaataaatctgccaataaattaatatacaatgggtgacaaaattagaaccatttcataaaatttaaaagccacaacagaaaaaattaacaaatcacagcaaaacatgatgaaggaaaagttcgcgacattttcttggcaaaaaatagaataacaaaatgttaagcaaaattatggctggcatgaatatttcatcaatgacacttcgttggcatataaaagatatgcagattccaatatgtcagcctggaaaaagccgctacttatccctccgtaaaataaaataaaaatataacataaaataaaatatactcactgacaaaaatattgcatatgcatgtgcaatgaaattttttgtgctgctgtccgtagccatatggtatagatagatgctgctgtcatatagtatagatactataatcggatttaaatctgatctggactatatgccggccagtataatttttaaattgaatttcatcaaggcaactatatattcactatgctagcgacatgaagacgtccattagcaccgatatgtcatatccaatatggctttcaaatagcaaaacatgatcttgtaaaacgcttcaatgtacatatcagctttcattcgcccaagcacatccacgtgttcgggatgtcctttcaaaacaataccgctccgtagaattatgccgccgccaccaaaagtaacgcattgtatgaggttacaactgacatactgttcgccaactcttctgtagactaagttttgtaaatcttgcttccatataatgaacggtattccagatgtaacttcatagtgttaattttggtagcgccggcatagtgctagggagtggtattttttggaaaggagatacctaacttgtggagatgattgggtgaatgacagctgatatgtacattaaaaacattttagaagatcatgcttgccatttgcagccatatgggataacacattcgtgttaatgcaccaagacgcaagacgggggacatgaaaggagcctccacgtagattgtgatcacttgtgaatacaattgggcgtcccctggaaa

SEQ ID NO: 1270 - DNA, 3538 bp, Diabrotica virgifera
  SmartBlast Evalue=1E-74; Info=Endonuclease-reverse transcriptase n=1 Tax=Bombyx mori RepID=D7F171_BOMMO
gccggttattagcgcgctcaccactgtataccataaacttataaaaatatactttaaattcttcttcttgatgtgctatccgtgacgaatgttggcgatcatcatggcaatcttcactttatctgcagcaacgcggaaaagctgcacagatgttgtgttgaaccaggttctgaggttctttaaccaggatgttcttcttcttcctggacctcgctttccaaatatttttccttgcaggatggcttgtaggagggcatatctggattcatttcgcataatgtgtccaaagtattccaactttcgagatttgatggtggttagtacttctcggttcttccccattcttctaaggacctcctcatttgtgacccgatcagtccatgggattttaagaattctccgatatagccacatctcaaatgcttccaattttcggcacatatcctcgttcaaggtccatgattcaacaccataaaaaaggacagagaagacgtaacatctcagcattcttacttttataccaagagaaaggttgtggctcttgaaaaacgccccatacggttgaagattgatctagcttttccgatgcgcgctcttatctcttggttgttggtccattcttcatttattatggtgccgaggtagttgtagtgcctcactctttctacagaagtttggttgatatagagttgaccttctgttatctttttcttgctaatgatcataagctttgtcttctttacatttatattgagtccatattgttgactgtaatacgtgattttgttcatgaggacttgtaggtcttctaggttgtccgcaaatactatgtgtcatctgtatacctgatgttatttagccggtacccgtttggcgaataatgactgaataataattttttcaatagatatttcgattatcttattattgccgttttcttcttcttcttcttccttcttgtatgtaggctttaaaacctgtttcttcttcaatattagcctcctaaattgtttaagttatcgcaccatctttttcttggtctgccaatacttcttcgtccatttggtgacttatctcgtgctattcgtactatcctatcctctgccattctactaatgtgttcgttccactcctgtttccgttttgtcacccatccatttatgtcttctacattgcatgatcttcttatgttttcgcttctctccctatccaacagacttttccctgatattcgtcagagtatcttcatctctgttgtttctagtagtcgtctcgttttagatgtgtcaggtcttgtctccgccgtgtatgtcaatataggtctaattgctgctttatagattcttgcttttgtgtcttgtcttaggtgtttgttcttccagattgtgtcattaagagatcccgccgctttacttgcttttaagctttgttgtcgtacttcctcttcaacatctccgtaactggttatatctattcccagatatctaaaccttgcttcctgctttattattttcccatcaatttcgattttacatcgtagtgggtatttagatgttgtcatacatttggttttttctgctgatattatcatattgtatttcttggctgttgtattgaagatgtgtgttaatctttggagatcgtcttctgtctcggcgattaatgcggcgtcgtctgcataacataatactttgatttctttattccccattctgtaaccatgacctttacgtactgcttctattatttcgtccattattatattaaagagcagtgggcttaatgagtcaccttgtctgactccgctttgtactggtataaactgcgttagttttccatttatctttgcctgtattcgattatgaaagtagatgttttcgatggtttgtataatattgattggtatgtttcttctcatacagtaaatgtaagacgtcttcgacttggatgcgatcgaaagcctttgtcaggtctataaaacatagatatgctggtttattgtactcaatggccttttctgtgatttgtctcagtacaaatacggcgtctacgcaggatcttccggatctgaatccttgttgttcatctgataaagttgttagtttattgattttgttggttaggacttttgtggttagcttaagtgcggtgttcagtagatttatacctctataattgttggggtcttctttgtctcctttcttgaacattggtatcattatgctgtttctccatgcgtctggtatcttgcagtgcaatattaatttttgataagttttgtcatctctagggttatactttctcctccgtattttagaagctcgttggttattccgtctggtcctggtgactttctatttttgagtgagtttatggctatctctacttcctgaaaactgatttctatttcgtgtcttaattcaggtacgttattgtgttgattattattttcctttcctttaaacagttccgtcaagtatctttcccattcgtttgctggtatgttattgtattccttcaattcggccatttctttccggtggtttcttatgaatctccatatttgtttttgtgtaccgtagaagtcgctttccatcctttttgtaaaccgttcccagtgttcattttttgttcttcttaccaattgctttgtttcatttcgtattcttctataggtgtctctggattctggagtgtttgatgttttatacttcatgtaggcgtctctcttctctttacatttgtcttttatttcttttctgaaccatggtgtattgttgttgtttcttttgttcagtatgactttgcgttttcctagagcttctgttgctgcctcttcaatattgtttttaattttctcccagctcgcgtttatatcttcgatgtcgtctatctgcttcagctgtatcttctgtgctagcctcctttggtacatttctttggtagaatcgttccacagtgattctacattgaatttttcctcggtgatttcctgtggaaaatgttttggtgttagtttcattcttatttttgctaggactaatttgtgttcactccctgcgtctgccgagtttaaagttcgaatatctagaatctgctctgggtggatttttctattagtgactataaagtcaatcatagatttgtgccccctggagttttcaaacgtatatttatactgaagcttatggtcgaaaaatgtattattgattcgcagttcgttaaaagcacagagattagccatgagttctccatttgagttgacatggttttcattgaatctttgttttactcctggaactatttcatttccgattcgtgcattaaaatcccccataagaattaagtgttcttcatgaggtatgtcgtccaggatgatttgcaactgttcgtagaatgcctctcgttccttcttaggtttgcagtcctcggggctatagatagatataacatttaatttttggtagtccattgtgatgttcatatgtattattctttcggagatgtaacggcagttacttatgttgtctttaaattt

SEQ ID NO: 1271 - DNA, 3537 bp, Diabrotica virgifera
  SmartBlast Evalue=7E-72; Info=Endonuclease-reverse transcriptase n=1 Tax=Bombyx mori RepID=D7F171_BOMMO
gccggttattagcgcgctcaccactgtataccataaacttataaaaatatactttaaattcttcttcttgatgtgctatccgtgacgaatgttggcgatcatcatggcaatcttcactttatctgcagcaacgcggaaaagctgcacagatgttgtgttgaaccaggttctgaggttctttaaccaggatgttcttcttcttcctggacctcgctttccaaatatttttccttgcaggatggcttgtaggagggcatatctggattcatttcgcataatgtgtccaaagtattccaactttcgagatttgatggtggttagtacttctcggttcttccccattcttctaaggacctcctcatttgtgacccgatcagtccatgggattttaagaattctccgatatagccacatctcaaatgcttccaattttcggcacatatcctcgttcaaggtccatgattcaacaccataaaaaaggacagagaagacgtaacatctcagcattcttacttttataccaagagaaaggttgtggctcttgaaaaacgccccatacggttgaagattgatctagcttttccgatgcgcgctcttatctcttggttgttggtccattcttcatttattatggtgccgaggtagttgtagtgcctcactctttctacagaagtttggttgatatagagttgaccttctgttatctttttcttgctaatgatcataagctttgtcttctttacatttatattgagtccatattgttgactgtaatacgtgattttgttcatgaggacttgtaggtcttctaggttgtccgcaaatactatgtgtcatctgtatacctgatgttatttagccggtacccgtttggcgaataatgactgaataataattttttcaatagatatttcgattatcttattattgccgttttcttcttcttcttcttccttcttgtatgtaggctttaaaacctgtttcttcttcaatattagcctcctaaattgtttaagttatcgcaccatctttttcttggtctgccaatacttcttcgtccatttggtgacttatctcgtgctattcgtactatcctatcctctgccattctactaatgtgttcgttccactcctgtttccgttttgtcacccatccatttatgtcttctatattgcatgatcttcttatgttttcgctcctctccctatccaacagacttttccctgatattcgtcggagtattttcatctctgttgtttctagtagtcgtctcgttttagatgtgtcaggccttgtctccgccgtgtatgttaatataggtctaattgctgctttatagattcttgcttttgtgtcttgtcttaagtgtttgttcttccagattgtgtcattaagagatcccgccgctttacttgcttttaagctttgttgtcgtacttcctcttcaacatctccgtaactggttatatcaattcccagatatctaaaccttgcttcctgctttattattttcccatcaatttcgattttacatcgtagtgggtatttagatgttgtcatacatttggtttttctgctgatattatcatattgtatttcttggctgttgtattgaagatgtgtgttaatctttggagatcgtcttctgtctcggcgattaatgcggcgtcgtctgcataacataatactttgatttctttattccccattctgtaaccatgacctttacgtactgcttctattatttcgtccattattatattaaagagcagtgggcttaatgagtcaccttgtctgactccgctttgtactggtataaactgcgttagttttccatttatctttgcctgtattcgattatgaaagtagatgttttcgatggtttgtataatattgattggtatgtttcttctcatacagtaaatgtaagacgtcttcgacttggatgcgatcgaaagcctttgtcaggtctataaaacatagatatgctggtttattgtactcaatggccttttctgtgatttgtctcagtacaaatacggcgtctacgcaggatcttccggatctgaatccttgttgttcatctgataaagttgttagtttattgattttgttggttaggacttttgtggttagcttaagtgcggtgttcagtagatttatacctctataattgttggggtcttctttgtctcctttcttgaacattggtatcattatgctgtttctccatgcgtctggtatcttgcagtgcaatattaatttttgataagttttgtcatctctagggttatactttctcctccgtattttagaagctcgttggttattccgtctggtcctggtgactttctatttttgagtgagtttatggctatctctacttcctgaaaactgatttctatttcgtgtcttaattcaggtacgttattgtgttgattattattttcctttcctttaaacagttccgtcaagtatctttcccattcgtttgctggtatgttattgtattccttcaattcggccatttctttccggtggtttcttatgaatctccatatttgtttttgtgtaccgtagaagtcgctttccatcctttttgtaaaccgttcccagtgttcattttttgttcttcttaccaattgctttgtttcatttcgtattcttctataggtgtctctggattctggagtgtttgatgttttatacttcatgtaggcgtctctcttctctttacatttgtcttttatttcttttctgaaccatggtgtattgttgttgtttcttttgttcagtatgactttgcgttttcctagagcttctgttgctgcctcttcaatattgtttttaattttctcccagctcgcgtttatatcttcgatgtcgtctatctgcttcagctgtatcttctgtgctagcctcctttggtacatttctttggtagaatcgttccacagtgattctacattgaatttttcctcggtgatttcctgtggaaaatgttttggtgttagtttcattcttatttttgctaggactaatttgtgttcactccctgcgtctgccgagtttaaagttcgaatatctagaatctgctctgggtggatttttctattagtgactataaagtcaatcatagatttgtgccccctggagttttcaaacgtatatttatactgaagcttatggtcgaaaaatgtattattgattcgcagttcgttaaaagcacagagattagccatgagttctccatttgagttgacatggttttcattgaatctttgttttactcctggaactatttcatttccgattcgtgcattaaaatcccccataagaattaagtgttcttcatgaggtatgtcgtccaggatgatttgcaactgttcgtagaatgcctctcgttccttcttaggtttgcagtcctcggggctatagatagatataacatttaatttttggtagtccattgtgatgttcatatgtattattctttcggagatgtaacggcagttacttatgttgtctttaaattt

SEQ ID NO: 1272 - DNA, 3690 bp, Diabrotica virgifera
  SmartBlast Evalue=4E-43; Info=Endonuclease-reverse transcriptase n=1 Tax=Bombyx mori RepID=D7F165_BOMMO
gggacgtgtacgacacgggccgtggaacaaacgggctccgcacggggtttgatttatggtacgacgggtcgcttccggcttctgcacgggtttttttaaattagttttatttgcgagtgtctttagtggatttaacactttcgttcaccgtgtcctcatttgaggacaacctattctgtagttttttgtatatagctccatatgtttttactcttgtaacacattgtccacgattatggacatcttattccgtccaaagagtacttgtgctgcaatctaacagctttcgaacaaaatatttaattttttgaaatataggtttctataattcgtgcgacatttctatattgacatgcgacaaatgcaatgttcatatctgtgtaagtatcatcagttcatagagtatagtataaaaaactcattggctcacgatatcctcaataaatgagggcatcttgtagtgaccaaactgtgcatttcgaaaatgtaaaacttcttccttcttgtaaacttcaaaatattagcctcctaaattgtttaaattatcgcaccatctttttcttggtctgccaatacttcttcgtctatttggtgacatatcgtgcttttcgtactatcctatcctctgccattctactaatgtgttagttccactcctttttctgttttgtcacccattcatttatgtcttctatattgcatgatcttatgttttcacttctctccctacccaacagacttttccctgattttcgtcggagtattttcatctctgttgtttctagtaatcgtctcgttttagatgcgtcaggtcttgtctccaccgtgtatgtcaaaataggtataattgctgctttatagattcttgcttttgtgtcttgtcttaggtgtttgttcttccagattgtgtcattaagagatcccgccgctttacttgcttttaagctttgttgtcgtacttcctcttcaacatctccgtaactggttatatcaattcccagatatctaaaccttgcttcctgctttattattttcccatcaatttcgattttacatcgtagtgggtatttagatgttgtcatacatttggtttttctgctgatattatcatattgtatttcttggctgttgtattgaagatgtgtgttaatctttggagatcgtcttctgtctcggcgattaatgcggcgtcgtctgcataacataatactttgatttctttattccccattctgtaaccatgacctttacgtactgcttctattatttcgtccattattatattaaagagcagtgggcttaatgagtcaccttgtctgactccgctttgtactggtataaactgcgttagttttccatttatctttgcctgtattcgattatgaaagtagatgttttcgatggtttgtataatattgattggtatgtttcttctcatacagtaaatgtaagacgtcttcgacttggatgcgatcgaaagcctttgtcaggtctataaaacatagatatgctggtttattgtactcaatggccttttctgtgatttgtctcagtacaaatacggcgtctacgcaggatcttccggatctgaatccttgttgttcatctgataaagttgttagtttattgattttgttggttaggacttttgtggttagcttaagtgcggtgttcagtagatttatacctctataattgttggggtcttctttgtctcctttcttgaacattggtatcattatgctgtttctccatgcgtctggtatcttgcagtgcaatattaatttttgataagttttgtcatctctagggttatactttctcctccgtattttagaagctcgttggttattccgtctggtcctggtgactttctatttttgagtgagtttatggctatctctacttcctgaaaactgatttctatttcgtgtcttaattcaggtacgttattgtgttgattattattttcctttcctttaaacagttccgtcaagtatctttcccattcgtttgctggtatgttattgtattccttcaattcggccatttctttccggtggtttcttatgaatctccatatttgtttttgtgtaccgtagaagtcgctttccatcctttttgtaaaccgttcccagtgttcattttttgttcttcttgccaactgctttgtttcacttcgtattcttctataggtgtctctggattctggagtatttgatgttttatacttcatgtaggcccctcgtttcacttaacattttaatataataatgaaacatattaatataataatgtttcaatatactatcataatataatgtataataatatataaacacaccgagaagccagactgatcaaaaacaatagttgcccgtgaatagcacgttgcgaccgccgacacgtagtttatgttaagatggagtggggcgagcacggccggtagacggggcctatccccgttgccggcccgtcacgttataccataaactatccaatgtctttcatatcacacgattcttcaacgtctcctgcaacacggccgttttgtacacgacccgttctaacataaatcagacttaattatacaaagagtgggttgtattcggacttctgcttcttttaaaaaataaatctgccaataaattaatatacaatgggtgacaaaattagaaccatttcataaaatttaaaagccacaacagaaaaaattaacaaatcacagcaaaacatgatgaaggaaaagttcgcgacattttcttggcaaaaaatagaataacaaaatgttaagcaaaattatggctggcatgaatatttcatcaatgacacttcgttggcatataaaagatatgcagattccaatatgtcagcctggaaaaagccgctacttatccctccgtaaaataaaataaaaatataacataaaataaaatatactcactgacaaaaatattgcatatgcatgtgcaatgaaattttttgtgctgctgtccgtagccatatggtatagatagatgctgctgtcatatagtatagatactataatcggatttaaatctgatctggactatatgccggccagtataatttttaaattgaatttcatcaaggcaactatatattcactatgctagcgacatgaagacgtccattagcaccgatatgtcatatccaatatggctttcaaatagcaaaacatgatcttgtaaaacgcttcaatgtacatatcagctttcattcgcccaagcacatccacgtgttcgggatgtcctttcaaaacaataccgctccgtagaattatgccgccgccaccaaaagtaacgcattgtatgaggttacaactgacatactgttcgccaactcttctgtagactaagttttgtaaatcttgcttccatataatgaacggtattccagatgtaacttcatagtgttaattttggtagcgccggcatagtgctagggagtggtattttttggaaaggagatacctaacttgtggagatgattgggtgaatgacagctgatatgtacattaaaaacattttagaagatcatgcttgccatttgcagccatatgggataacacattcgtgttaatgcaccaagacgcaagacgggggacatgaaaggagcctccacgtagattgtgatcacttgtgaatacaattgggcgtcccctggaaa

SEQ ID NO: 1273 - DNA, 3487 bp, Diabrotica virgifera
  SmartBlast Evalue=2E-50; Info=Endonuclease-reverse transcriptase n=1 Tax=Bombyx mori RepID=D7F165_BOMMO
gtgggtatttggtcttaaatttggtttgctctcaggactaataccaggttctgactttgatatacaatatatatgttgtttggattacaaatggtattgataatacatagatatataagtgacactcaaatgtgaaatgtgtactggctcgatatgttgttgacgcggtattttctttctattgatttcctctttcagtgtggatgaccgcatcctactgcattctaccgaggaatttgcaacacaattggtttcttcttcttcttcttccttcttgtatgtaggctttaaagcctgtttcttcttcaatattatcctcctaaattgtttaggttatcgcaccacctttttcttggtctgccaatacttcttcgtccatttggtgacttatctcgtgctattcgtactatcctatcctctgccattctactaatgtgttcgttccactcctgtttccgttttgtcacccatccatttatgtcttctacattgcatgatcttcttatgttttcgcttctctccctatccaacagacttttccctgatattcgtcagagtatcttcatctctgttgtttctagtagtcgtctcgttttagatgtgtcaggtcttgtctccgccgtgtatgtcaatataggtctaattgctgctttatagattcttgcttttgtgtcttgtcttaggtgtttgttcttccagattgtgtcattaagagatcccgccgctttacttgcttttaagctttgttgtcgtacttcctcttcaacatctccgtaactggttatatctattcccagatatctaaaccttgcttcctgctttattattttcccatcaatttcgattttacatcgtagtgggtatttagatgttgtcatacatttggttttttctgctgatattatcatattgtatttcttggctgttgtattgaagatgtgtgttaatctttggagatcgtcttctgtctcggcgattaatgcggcgtcgtctgcataacataatactttgatttctttattccccattctgtaaccatgacctttacgtactgcttctattatttcgtccattattatattaaagagcagtgggcttaatgagtcaccttgtctgactccgctttgtactggtataaactgcgttagttttccatttatctttgcctgtattcgattatgaaagtagatgttttcgatggtttgtataatattgattggtatgtttcttctcatacagtaaatgtaagacgtcttcgacttggatgcgatcgaaagcctttgtcaggtctataaaacatagatatgctggtttattgtactcaatggccttttctgtgatttgtctcagtacaaatacggcgtctacgcaggatcttccggatctgaatccttgttgttcatctgataaagttgttagtttattgattttgttggttaggacttttgtggttagcttaagtgcggtgttcagtagatttatacctctataattgttggggtcttctttgtctcctttcttgaacattggtatcattatgctgtttctccatgcgtctggtatcttgcagtgcaatattaatttttgataagttttgtcatctctagggttatactttctcctccgtattttagaagctcgttggttattccgtctggtcctggtgactttctatttttgagtgagtttatggctatctctacttcctgaaaactgatttctatttcgtgtcttaattcaggtacgttattgtgttgattattattttcctttcctttaaacagttccgtcaagtatctttcccattcgtttgctggtatgttattgtattccttcaattcggccatttctttccggtggtttcttatgaatctccatatttgtttttgtgtaccgtagaagtcgctttccatcctttttgtaaaccgttcccagtgttcattttttgttcttcttgccaactgctttgtttcacttcgtattcttctataggtgtctctggattctggagtatttgatgttttatacttcatgtaggcccctcgtttcacttaacattttaatataataatgaaacatattaatataataatgtttcaatatactatcataatataatgtataataatatataaacacaccgagaagccagactgatcaaaaacaatagttgcccgtgaatagcacgttgcgaccgccgacacgtagtttatgttaagatggagtggggcgagcacggccggtagacggggcctatccccgttgccggcccgtcacgttataccataaactatccaatgtctttcatatcacacgattcttcaacgtctcctgcaacacggccgttttgtacacgacccgttctaacataaatcagacttaattatacaaagagtgggttgtattcggacttctgcttcttttaaaaaataaatctgccaataaattaatatacaatgggtgacaaaattagaaccatttcataaaatttaaaagccacaacagaaaaaattaacaaatcacagcaaaacatgatgaaggaaaagttcgcgacattttcttggcaaaaaatagaataacaaaatgttaagcaaaattatggctggcatgaatatttcatcaatgacacttcgttggcatataaaagatatgcagattccaatatgtcagcctggaaaaagccgctacttatccctccgtaaaataaaataaaaatataacataaaataaaatatactcactgacaaaaatattgcatatgcatgtgcaatgaaattttttgtgctgctgtccgtagccatatggtatagatagatgctgctgtcatatagtatagatactataatcggatttaaatctgatctggactatatgccggccagtataatttttaaattgaatttcatcaaggcaactatatattcactatgctagcgacatgaagacgtccattagcaccgatatgtcatatccaatatggctttcaaatagcaaaacatgatcttgtaaaacgcttcaatgtacatatcagctttcattcgcccaagcacatccacgtgttcgggatgtcctttcaaaacaataccgctccgtagaattatgccgccgccaccaaaagtaacgcattgtatgaggttacaactgacatactgttcgccaactcttctgtagactaagttttgtaaatcttgcttccatataatgaacggtattccagatgtaacttcatagtgttaattttggtagcgccggcatagtgctagggagtggtattttttggaaaggagatacctaacttgtggagatgattgggtgaatgacagctgatatgtacattaaaaacattttagaagatcatgcttgccatttgcagccatatgggataacacattcgtgttaatgcaccaagacgcaagacgggggacatgaaaggagcctccacgtagattgtgatcacttgtgaatacaattgggcgtcccctggaaa

SEQ ID NO: 1274 - DNA, 3486 bp, Diabrotica virgifera
  SmartBlast Evalue=4E-48; Info=Endonuclease-reverse transcriptase n=1 Tax=Bombyx mori RepID=D7F165_BOMMO
gtgggtatttggtcttaaatttggtttgctctcaggactaataccaggttctgactttgatatacaatatatatgttgtttggattacaaatggtattgataatacatagatatataagtgacactcaaatgtgaaatgtgtactggctcgatatgttgttgacgcggtattttctttctattgatttcctctttcagtgtggatgaccgcatcctactgcattctaccgaggaatttgcaacacaattggtttcttcttcttcttcttccttcttgtatgtaggctttaaagcctgtttcttcttcaatattatcctcctaaattgtttaggttatcgcaccacctttttcttggtctgccaatacttcttcgtccatttggtgacttatctcgtgctattcgtactatcctatcctctgccattctactaatgtgttcgttccactcctgtttccgttttgtcacccatccatttatgtcttctatattgcatgatcttcttatgttttcgctcctctccctatccaacagacttttccctgatattcgtcggagtattttcatctctgttgtttctagtagtcgtctcgttttagatgtgtcaggccttgtctccgccgtgtatgttaatataggtctaattgctgctttatagattcttgcttttgtgtcttgtcttaagtgtttgttcttccagattgtgtcattaagagatcccgccgctttacttgcttttaagctttgttgtcgtacttcctcttcaacatctccgtaactggttatatcaattcccagatatctaaaccttgcttcctgctttattattttcccatcaatttcgattttacatcgtagtgggtatttagatgttgtcatacatttggtttttctgctgatattatcatattgtatttcttggctgttgtattgaagatgtgtgttaatctttggagatcgtcttctgtctcggcgattaatgcggcgtcgtctgcataacataatactttgatttctttattccccattctgtaaccatgacctttacgtactgcttctattatttcgtccattattatattaaagagcagtgggcttaatgagtcaccttgtctgactccgctttgtactggtataaactgcgttagttttccatttatctttgcctgtattcgattatgaaagtagatgttttcgatggtttgtataatattgattggtatgtttcttctcatacagtaaatgtaagacgtcttcgacttggatgcgatcgaaagcctttgtcaggtctataaaacatagatatgctggtttattgtactcaatggccttttctgtgatttgtctcagtacaaatacggcgtctacgcaggatcttccggatctgaatccttgttgttcatctgataaagttgttagtttattgattttgttggttaggacttttgtggttagcttaagtgcggtgttcagtagatttatacctctataattgttggggtcttctttgtctcctttcttgaacattggtatcattatgctgtttctccatgcgtctggtatcttgcagtgcaatattaatttttgataagttttgtcatctctagggttatactttctcctccgtattttagaagctcgttggttattccgtctggtcctggtgactttctatttttgagtgagtttatggctatctctacttcctgaaaactgatttctatttcgtgtcttaattcaggtacgttattgtgttgattattattttcctttcctttaaacagttccgtcaagtatctttcccattcgtttgctggtatgttattgtattccttcaattcggccatttctttccggtggtttcttatgaatctccatatttgtttttgtgtaccgtagaagtcgctttccatcctttttgtaaaccgttcccagtgttcattttttgttcttcttgccaactgctttgtttcacttcgtattcttctataggtgtctctggattctggagtatttgatgttttatacttcatgtaggcccctcgtttcacttaacattttaatataataatgaaacatattaatataataatgtttcaatatactatcataatataatgtataataatatataaacacaccgagaagccagactgatcaaaaacaatagttgcccgtgaatagcacgttgcgaccgccgacacgtagtttatgttaagatggagtggggcgagcacggccggtagacggggcctatccccgttgccggcccgtcacgttataccataaactatccaatgtctttcatatcacacgattcttcaacgtctcctgcaacacggccgttttgtacacgacccgttctaacataaatcagacttaattatacaaagagtgggttgtattcggacttctgcttcttttaaaaaataaatctgccaataaattaatatacaatgggtgacaaaattagaaccatttcataaaatttaaaagccacaacagaaaaaattaacaaatcacagcaaaacatgatgaaggaaaagttcgcgacattttcttggcaaaaaatagaataacaaaatgttaagcaaaattatggctggcatgaatatttcatcaatgacacttcgttggcatataaaagatatgcagattccaatatgtcagcctggaaaaagccgctacttatccctccgtaaaataaaataaaaatataacataaaataaaatatactcactgacaaaaatattgcatatgcatgtgcaatgaaattttttgtgctgctgtccgtagccatatggtatagatagatgctgctgtcatatagtatagatactataatcggatttaaatctgatctggactatatgccggccagtataatttttaaattgaatttcatcaaggcaactatatattcactatgctagcgacatgaagacgtccattagcaccgatatgtcatatccaatatggctttcaaatagcaaaacatgatcttgtaaaacgcttcaatgtacatatcagctttcattcgcccaagcacatccacgtgttcgggatgtcctttcaaaacaataccgctccgtagaattatgccgccgccaccaaaagtaacgcattgtatgaggttacaactgacatactgttcgccaactcttctgtagactaagttttgtaaatcttgcttccatataatgaacggtattccagatgtaacttcatagtgttaattttggtagcgccggcatagtgctagggagtggtattttttggaaaggagatacctaacttgtggagatgattgggtgaatgacagctgatatgtacattaaaaacattttagaagatcatgcttgccatttgcagccatatgggataacacattcgtgttaatgcaccaagacgcaagacgggggacatgaaaggagcctccacgtagattgtgatcacttgtgaatacaattgggcgtcccctggaaa

SEQ ID NO: 1275 - DNA, 1760 bp, Diabrotica virgifera
tatggtgttgacgtgagtacctcaattgtacggaaatgactcagcgtggaccaaaaaataccgatatggactgttgacgactgaaaaaaagtgattttcagtgatgaattacatttatttgtgagggatatacggatttaaatcaaagtgaaggtggacctctgcgaagagatcatatccaacagactacaaaataatcttctaaacagtttttttgggtttttttttaacaaatgacactgaaagtttagttccttaaaggcatgatgaattctgctaaatatattgaaatattacgcagaacaattgtttcattcatggaaattttcgacagaacatttaaacgtaacttggcttcttgttgcaattcgaaattggtccagactttgatgcgggaaataaaagtaaaagtgcttggttggcctcgtaattcaccagacctaaatcccattgagaacttctggcatattctcaagaaacctagttaagatgaattgcactagataagaaaaattgataacaatgactggagagggaatgcctagatgtgtaaggtcacttctgctaaacgaggacaaatttcgtactaatatatagattgttcagtctacttatggtacgtaatgcttaacccgccattacacgcgctatgagggaatccctcaccatatttgtttataagcaatgaaattgtgtaaactaatacgataaccttaagcacccaggaatgcctttagcatggttcatgagagggtatgaaaaagttatagaatatttcaggcggtcagtgtgctgtgtgatagttgaaagaagagacatccctcttcaagtgagggaattcctcactgcgcgtgcaatcacgtgaaatcacgtttctgttatctcaaagaaacttttaggtttttatttaatatttaggtaggtttaattaaaatattattgtttggattaggttaggaacagtggcacaccgagggggggtttgggggttaaaatcccacccagagcatatagaaatatatataaaagaaggtaggaaaatgtaacttgtctttcacaaataatacaaaaaactttcggtgcccaagcaaacccccctcccccccagaggaaaattctaggtgcgccactggttaagaacccatttttaaatttacctattctaattgggaaataagccacaatttaacttgaaaaattgattttattgacgtttcgaattccacctcggacgtcgttatcaaaatacaaaatattaatagttaattacataaatgccacaaagaaatagcttcagaacagttgtaaattttaatttgtatttttagtaaaatgaattcgcgtaaagaacgttaatttcttcagtggcttgctgaaattgaaaattaagaaaacttgcttttgatctatattatttttacttttgttttgttaaattaataaaaaaattggtttgcgagactttctataatatgtgagtacaacccattttatatttatacatgttgacattcattcttctcgaaataagtcgaatttatgtaggtgagggcgacgctcatacgcgtgcaaccacgtcacaatagaagacgcgtgtaacggcgggttaataagtcacagtggtgaaaaaagagaaaatttagtgtggtttttaatttcaaatatatcattcaaaagaaactttttgtttattctaagggactgtcagccctcggtaataatccactatttgattctgcgtttaaatttttcaaaaatac

SEQ ID NO: 1276 - DNA, 1852 bp, Diabrotica virgifera
gatgcccctcatccttctgaggtttctaatcaatcatcctgaaataggattctatatttaacctatacaaaaggattatactcttattattgcttcatcaccatgtttgtcatttctaacttttctaatgcctcatccacaaccaaaatcaaaattgagtgtatgtagttgattattaaaccaataaacaaacaaccatacctcgtttttaaactaggaggagtaattcaaatttaccgccccgtaatgttcgtttgtaattggtccaatcgcaggtaagtttattccactaatttattaaattttgacactattgatatttatgaaaattttgacactattggcatttaaaattaataggttaattaagctatatcagcgattttttgtgtgtttctgctttattcctttaatttttagatttttagtctgcatttatgaaaaaacagttgtttttagaactctttagcgaagtattagtataatacaatatttatggattaccgtcgaagccgacatgatcaaccaaaaaagaagatgaatttggtgatttttctagtgacattggatgtgaatctgtctcctgagtttactcctcctggtttaaaaacagggtatagtaatacgaaacctaaggaatcaacttcacaaatatggaaaggctgttgttacagtttcatgtagacatgtacatacgcaagtagaaccacaaacctacgcaggtagctgacagacatctcgttatggataaacctgttatactgcagatataggtactgatgaattcaatatatgagtatatctttattaaaacaaatattttgccagaacggtttacacgttgaaattccttaaggcgaatttatacgtgttaagtagctaaagcaagttactaaatcaagtggctaaaatttagtccgttcgtttaagtgtgcgttcacatgatttgttgtttagtgataatgtaaacatggctggaaaagttacgtgtacaacagtgcggaattgtatattaaaaatatgtggcgaattattagaaatacttgcagaagaaatgaacaaagacaaaaagaagcaaagtaagttatcaatcgaagtagcacagaaaacgacaataaatatcgtctccataccaccagattgacaacaggtggaatactttctttggttacacctcctgagattttcaaaatttataaatcatacaggatgccgaggaaattaagatgagagaattttaaataattcacaactcatctgctcagcgtggtaaaagctccaacaagaaagattccttaatactctaacaaaagagtaaatgaattaaaatgtataaacattctcaatttctttgcgacatgaaaatgcagcagctgcataatcctatggtcaaatctgagagtgcaggaagagtatatattctgttttatttttgtcaacgtggaaactaacttttattacagttacaattgaaattacgtttatcaatttaacgaaccagcatcagaataaaaacatttttgacacatttcatatttcgtggagaaatatatttttgatgttatccttctttaggcgccattggaaaaaatgttgagagtgattttttataaaagcgctcttaccaacagtattaagatagttgctaaatctgtcaaattacgtatgtatcagtgcaaatgaagtgtagaaaaaatatattgatgtttttagtaaatatatttattataagttttgtgtcttctttgggaatagaataattgaaatatgatgaaaagaaaattaaaaatatgtgtagaaaatctgacgtttttggattttctacgattcatcaacggaaaagtaattgtgg

SEQ ID NO: 1277 - DNA, 1477 bp, Diabrotica virgifera
aaaaacaaagtaagttatcaatcgaagtagcacagaaaacgacaataaatatcgtctccataccaccagattgacaacaggtggaatactttctttggttacacctcctgagattttcaaaatttataaatcatacaggatgccgaggaaattaagatgagagaattttaaataattcacaactcatctgttcagcgtggtaaaagttccaagaagaaagattccttaatactcttacaaaagagtaaatgaagagtttgctgtgtacttcgattgataacttactttgtaaatcaaaactgtttggctacagggttgcgataaaaaatcgatttaaaactattttaacccgccattacacgcgctatgagggaatccctcaccatatttgtttataagcaatgaaattgtgtaaactaatacgataaccttaagcacccaggaatgcctttagcatggttcatgagagggtatgaaaaagttatagaatatttcaggcggtcagtgtgctgtgtgatagttgaaagaagagacatccctcttcaagtgagggaattcctcactgcgcgtgcaatcacgtgaaatcacgtttctgttatctcaaagaaacttttaggtttttatttaatatttaggtaggtttaattaaaatattattgtttggattaggttaggaacagtggcacaccgagggggggtttgggggttaaaatcccacccagagcatatagaaatatatataaaagaaggtaggaaaatgtaacttgtctttcacaaataatacaaaaaactttcggtgcccaagcaaacccccctcccccccagaggaaaattctaggtgcgccactggttaagaacccatttttaaatttacctattctaattgggaaataagccacaatttaacttgaaaaattgattttattgacgtttcgaattccacctcggacgtcgttatcaaaatacaaaatattaatagttaattacataaatgccacaaagaaatagcttcagaacagttgtaaattttaatttgtatttttagtaaaatgaattcgcgtaaagaacgttaatttcttcagtggcttgctgaaattgaaaattaagaaaacttgcttttgatctatattatttttacttttgttttgttaaattaataaaaaaattggtttgcgagactttctataatatgtgagtacaacccattttatatttatacatgttgacattcattcttctcgaaataagtcgaatttatgtaggtgagggcgacgctcatacgcgtgcaaccacgtcacaatagaagacgcgtgtaacggcgggttaataagtcacagtggtgaaaaaagagaaaatttagtgtggtttttaatttcaaatatatcattcaaaagaaactttttgtttattctaagggactgtcagccctcggtaataatccactatttgattctgcgtttaaatttttcaaaaatac

SEQ ID NO: 1278 - DNA, 968 bp, Diabrotica virgifera
agtaaattaattcgcgtaaagaacgtttaacttcttcagttggcttgctagaaattgaaaaagttaacgttctttacgcgaatttaatttgtatttttagtaaaattaattcgcgtaaagaacgttaacttcttcagtggcttgctgaaattgaaaattaagaaaacttgcttttgatctatattatttttacttttgttttgttaaattaataaaaaaattggtttacgagactttctataatatgtgagtacaacccattttatatttatacatgttgacattcattctttctcgaaataagtcgaatttatgtaggtgagggcgacgctcatacgcgtgcaaccacgtcacaatagaagacgcgtgtaacggcgggttaaaagctaaggttataaaaatttgttttttatttgtctattcattcgaacagcacagtatacatatattatataaaatattataattaatgtctatgattcttgaacattagaacggcgtcgtgcaagaactctattaaatgttccacattaacttctggcttcaacgtggggttatagggatatttggtaagagtggtactgcatgcttttgattccggacaatacactgatgacagtactacagtaggtttttctatagggtatttctgacctattgtaactgtcaccaaacagttatagtcatccaaattataaagaaaaacagccttattgtaagtgagtacatcatattcaataatacttctaaaacatgctgctgctaaattagtaataaaaattttcttcaatttaaaatgatcggcaacttgctgcaatcgtgtatctagagtcttagaaaccagtgagacaacgtccgacagtgaactatctttcttaaaatctgcattattgaatcggaaccctcctaatacttgttctaatctaggagatagctgaatggagtgggtagagcgagaaccatctagc

SEQ ID NO: 1279 - DNA, 782 bp, Diabrotica virgifera
aaaaacaaagtaagttatcaatcgaagtagcacagaaaacgacaataaatatcgtctccataccaccagattgacaacaggtggaatactttctttggttacacctcctgagattttcaaaatttataaatcatacaggatgccgaggaaattaagatgagagaattttaaataattcacaactcatctgctcagcgtggtaaaagctccaacaagaaagattccttaatactctaacaaaagagtaaatgaattaaaatgtataaacattctcaatttctttgcgacatgaaaatgcagcagctgcataatcctatggtcaaatctgagagtgcaggaagagtatatattctgttttatttttgtcaacgtggaaactaacttttattacagttacaattgaaattacgtttatcaatttaacgaaccagcatcagaataaaaacatttttgacacatttcatatttcgtggagaaatatatttttgatgttatccttctttaggcgccattggaaaaaatgttgagagtgattttttataaaagcgctcttaccaacagtattaagatagttgctaaatctgtcaaattacgtatgtatcagtgcaaatgaagtgtagaaaaaatatattgatgtttttagtaaatatatttattataagttttgtgtcttctttgggaatagaataattgaaatatgatgaaaagaaaattaaaaatatgtgtagaaaatctgacgtttttggattttctacgattcatcaacggaaaagtaattgtgg

SEQ ID NO: 1280 - DNA, 532 bp, Diabrotica virgifera
agtaaattaattcgcgtaaagaacgtttaacttcttcagttggcttgctagaaattgaaaaagttaacgttctttacgcgaatttaatttgtatttttagtaaaattaattcgcgtaaagaacgttaacttcttcagtggcttgctgaaattgaaaattaagaaaacttgcttttgatctatattatttttacttttgttttgttaaattaataaaaaaattggtttacgagactttctataatatgtgagtacaacccattttatatttatacatgttgacattcattcttctcgaaataagtcgaatttatgtaggtgagggcgacgctcatacgcgtgcaaccacgtcacaatagaagacgcgtgtaacggcgggttaataagtcacagtggtgaaaaaagagaaaatttagtgtggtttttaatttcaaatatatcattcaaaagaaactttttgtttattctaagggactgtcagccctcggtaataatccactatttgattctgcgtttaaatttttcaaaaatac

SEQ ID NO: 1281 - DNA, 3626 bp, Diabrotica virgifera
  SmartBlast Evalue=3E-25; Info=Endonuclease-reverse transcriptase n=1 Tax=Bombyx mori RepID=D7F157_BOMMO
gatgcccctcatccttctgaggtttctaatcaatcatcctgaaataggattctatatttaacctatacaaaaggattatactcttattattgcttcatcaccatgtttgtcatttctaacttttctaatgcctcatccacaaccaaaatcaaaattgagtgtatgtagttgattattaaaccaataaacaaacaaccatacctcgtttttaaactaggaggagtaattcaaatttaccgccccgtaatgttcgtttgtaattggtccaatcgcaggtaagtttattccactaatttattaaattttgacactattgatatttatgaaaattttgacactattggcatttaaaattaataggttaattaagctatatcagcgattttttgtgtgtttctgctttattcctttaatttttagatttttagtctgcatttatgaaaaaacagttgtttttagaactctttagcgaagtattagtataatacaatatttatggattaccgtcgaagccgacatgatcaaccaaaaaagaagatgaatttggtgatttttctagtgacattggatgtgaatctgtctcctgagtttactcctcctggtttaaaaacagggtatagtaatacgaaacctaaggaatcaacttcacaaatatggaaaggctgttgttacagtttcatgtagacatgtacatacgcaagtagaaccacaaacctacgcaggtagctgacagacatctcgttatggataaacctgttatactgcagatataggtactgatgaattcaatatatgagtatatctttattaaaacaaatattttgccagaacggtttacacgttgaaattccttaaggcgaatttatacgtgttaagtagctaaagcaagttactaaatcaagtggctaaaatttagtccgttcgtttaagtgtgcgttcacatgatttgttgtttagtgataatgtaaacatggctggaaaagttacgtgtacaacagtgcggaattgtatattaaaaatatgtggcgaattattagaaatacttgcagaagaaatgaacaaagacaaaaagaagcaaagtaagttatcaatcgaagtagcacagaaaacgacaataaatatcgtctccataccaccagattgacaacaggtggaatactttctttggttacacctcctgagattttcaaaatttataaatcatacaggatgccgaggaaattaagatgagagaattttaaataattcacaactcatctgttcagcgtggtaaaagttccaagaagaaagattccttaatactcttacaaaagagtaaatgaagagtttgctgtgtacttcgattgataacttactttgtaaatcaaaactgtttggctacagggttgcgataaaaaatcgatttaaaactattttaacccgccattacacgcgctatgagggaatccctcaccatatttgtttataagcaatgaaattgtgtaaactaatacgataaccttaagcacccaggaatgcctttagcatggttcatgagagggtatgaaaaagttatagaatatttcaggcggtcagtgtgctgtgtgatagttgaaagaagagacatccctcttcaagtgagggaattcctcactgcgcgtgcaatcacgtgaaatcacgtttctgttatctcaaagaaacttttaggtttttatttaatatttaggtaggtttaattaaaatattattgtttggattaggttaggaacagtggcacaccgagggggggtttgggggttaaaatcccacccagagcatatagaaatatatataaaagaaggtaggaaaatgtaacttgtctttcacaaataatacaaaaaactttcggtgcccaagcaaacccccctcccccccagaggaaaattctaggtgcgccactggttaagaacccatttttaaatttacctattctaattgggaaataagccacaatttaacttgaaaaattgattttattgacgtttcgaattccacctcggacgtcgttatcaaaatacaaaatattaatagttaattacataaatgccacaaagaaatagcttcagaacagttgtaaattttaatttgtatttttagtaaaatgaattcgcgtaaagaacgttaatttcttcagtggcttgctgaaattgaaaattaagaaaacttgcttttgatctatattatttttacttttgttttgttaaattaataaaaaaattggtttgcgagtctttctataatatgtgagtacaacccattatatatttatacatgttgacattcattctttctcgaaataagtcgaatttatgtaggtgagggcgacgctcatacgcgtgcaaccacgtcacaatagaagacggcgggttaagcataaaattggttgtgtccttaagcacattgtacactcgtttgtcatcattatcatcatcattcgtcaacctcttgcatccactgttggatataggtcttttccatattcttccattgttctctctcttgtgccttccgtatccaatttcgcactgtttttctcaagtctaccaaactctttggttgtctacctcggtgtcttttatcttctctaggtctccactctatgagtcttctggtccacctattattatttaaacgtgccacatgtccagcccatctccatttggcttgtgcaattttttctatgacatctgtcactttggtcctctctctcactatcctatttggtaccatatctcttcttgttatttctaaaattgctctttccatttttttaggttattctcaatttatttgcagaatgtttagtcaaagttatgaaaccatatgttattaccggcagcatgcacacaacacccgtttatatcctgtacattacattttgttctaatttcgtcactttttattcggtctctcagtagttttttttgtaattcttctcagtattcttgtttctgctgtttccagccttctctctattttagctgtatcgggtcttgtttctgatgcatacctcattattggtcttatattcataagattcttcatttcatctcacaattaatatgtgggttacgccatatagtgtcaattctgctaatctatttgctctttgtacttggacatatcttgaccatcatatatagacaaataccattcttgacgaaaacagtaaaattgtacattttttcggttatgtaatttatctaagagatttacccttaaacttgtaacataacaccttgagacgtgaatctgcgatcatatcacacacatctgaaattgtcttgatttttcaattttatttgaataattacaaaaaacaccgtttttttgtaataaaaaacgcaaatattttgttcagcgtgtcgactgtacttatgcatcaccttatgctagttcagttaatatttatttataaatgaaataattaaatcgttttaaatgtatatattttttgttgcagttttttttatatttgtatgtttatttttattatgatgaccagtaataacattcccagtaaaatttattgtgtgctattttgttatgtttatattgtatattatttatttcaagatgtgtaaatgttaataaacgaagtaattgtt

SEQ ID NO: 1282 - DNA, 2983 bp, Diabrotica virgifera
gatgcccctcatccttctgaggtttctaatcaatcatcctgaaataggattctatatttaacctatacaaaaggattatactcttattattgcttcatcaccatgtttgtcatttctaacttttctaatgcctcatccacaaccaaaatcaaaattgagtgtatgtagttgattattaaaccaataaacaaacaaccatacctcgtttttaaactaggaggagtaattcaaatttaccgccccgtaatgttcgtttgtaattggtccaatcgcaggtaagtttattccactaatttattaaattttgacactattgatatttatgaaaattttgacactattggcatttaaaattaataggttaattaagctatatcagcgattttttgtgtgtttctgctttattcctttaatttttagatttttagtctgcatttatgaaaaaacagttgtttttagaactctttagcgaagtattagtataatacaatatttatggattaccgtcgaagccgacatgatcaaccaaaaaagaagatgaatttggtgatttttctagtgacattggatgtgaatctgtctcctgagtttactcctcctggtttaaaaacagggtatagtaatacgaaacctaaggaatcaacttcacaaatatggaaaggctgttgttacagtttcatgtagacatgtacatacgcaagtagaaccacaaacctacgcaggtagctgacagacatctcgttatggataaacctgttatactgcagatataggtactgatgaattcaatatatgagtatatctttattaaaacaaatattttgccagaacggtttacacgttgaaattccttaaggcgaatttatacgtgttaagtagctaaagcaagttactaaatcaagtggctaaaatttagtccgttcgtttaagtgtgcgttcacatgatttgttgtttagtgataatgtaaacatggctggaaaagttacgtgtacaacagtgcggaattgtatattaaaaatatgtggcgaattattagaaatacttgcagaagaaatgaacaaagacaaaaagaagcaaagtaagttatcaatcgaagtagcacagaaaacgacaataaatatcgtctccataccaccagattgacaacaggtggaatactttctttggttacacctcctgagattttcaaaatttataaatcatacaggatgccgaggaaattaagatgagagaattttaaataattcacaactcatctgttcagcgtggtaaaagttccaagaagaaagattccttaatactcttacaaaagagtaaatgaagagtttgctgtgtacttcgattgataacttactttgtaaatcaaaactgtttggctacagggttgcgataaaaaatcgatttaaaactattttaacccgccattacacgcgctatgagggaatccctcaccatatttgtttataagcaatgaaattgtgtaaactaatacgataaccttaagcacccaggaatgcctttagcatggttcatgagagggtatgaaaaagttatagaatatttcaggcggtcagtgtgctgtgtgatagttgaaagaagagacatccctcttcaagtgagggaattcctcactgcgcgtgcaatcacgtgaaatcacgtttctgttatctcaaagaaacttttaggtttttatttaatatttaggtaggtttaattaaaatattattgtttggattaggttaggaacagtggcacaccgagggggggtttgggggttaaaatcccacccagagcatatagaaatatatataaaagaaggtaggaaaatgtaacttgtctttcacaaataatacaaaaaactttcggtgcccaagcaaacccccctcccccccagaggaaaattctaggtgcgccactggttaagaacccatttttaaatttacctattctaattgggaaataagccacaatttaacttgaaaaattgattttattgacgtttcgaattccacctcggacgtcgttatcaaaatacaaaatattaatagttaattacataaatgccacaaagaaatagcttcagaacagttgtaaattttaatttgtatttttagtaaaatgaattcgcgtaaagaacgttaatttcttcagtggcttgctgaaattgaaaattaagaaaacttgcttttgatctatattatttttacttttgttttgttaaattaataaaaaaattggtttgcgagactttctataatatgtgagtacaacccattttatatttatacatgttgacattcattctttctcgaaataagtcgaatttatgtaggtgagggcgacgctcatacgcgtgcaaccacgtcacaatagaagacgcgtgtaacggcgggttaaaagctaaggttataaaaatttgttttttatttgtctattcattcgaacagcacagtatacatatattatataaaatattataattaatgtctatgattcttgaacattagaacggcgtcgtgcaagaactctattaaatgttccacattaacttctggcttcaacgtggggttatagggatatttggtaagagtggtactgcatgcttttgattccggacaatacactgatgacagtactacagtaggtttttctatagggtatttctgacctattgtaactgtcaccaaacagttatagtcatccaaattataaagaaaaacagccttattgtaagtgagtacatcatattcaataatacttctaaaacatgctgctgctaaattagtaataaaaattttcttcaatttaaaatgatcggcaacttgctgcaatcgtgtatctagagtcttagaaaccagtgagacaacgtccgacagtgaactatctttcttaaaatctgcattattgaatcggaaccctcctaatacttgttctaatctaggagatagctgaatggagtgggtagagcgagaaccatctagc

SEQ ID NO: 1283 - DNA, 2839 bp, Diabrotica virgifera
  SmartBlast Evalue=2E-25; Info=Endonuclease-reverse transcriptase n=1 Tax=Bombyx mori RepID=D7F157_BOMMO
tatggtgttgacgtgagtacctcaattgtacggaaatgactcagcgtggaccaaaaaataccgatatggactgttgacgactgaaaaaaagtgattttcagtgatgaattacatttatttgtgagggatatacggatttaaatcaaagtgaaggtggacctctgcgaagagatcatatccaacagactacaaaataatcttctaaacagtttttttgggtttttttttaacaaatgacactgaaagtttagttccttaaaggcatgatgaattctgctaaatatattgaaatattacgcagaacaattgtttcattcatggaaattttcgacagaacatttaaacgtaacttggcttcttgttgcaattcgaaattggtccagactttgatgcgggaaataaaagtaaaagtgcttggttggcctcgtaattcaccagacctaaatcccattgagaacttctggcatattctcaagaaacctagttaagatgaattgcactagataagaaaaattgataacaatgactggagagggaatgcctagatgtgtaaggtcacttctgctaaacgaggacaaatttcgtactaatatatagattgttcagtctacttatggtacgtaatgcttaacccgccattacacgcgctatgagggaatccctcaccatatttgtttataagcaatgaaattgtgtaaactaatacgataaccttaagcacccaggaatgcctttagcatggttcatgagagggtatgaaaaagttatagaatatttcaggcggtcagtgtgctgtgtgatagttgaaagaagagacatccctcttcaagtgagggaattcctcactgcgcgtgcaatcacgtgaaatcacgtttctgttatctcaaagaaacttttaggtttttatttaatatttaggtaggtttaattaaaatattattgtttggattaggttaggaacagtggcacaccgagggggggtttgggggttaaaatcccacccagagcatatagaaatatatataaaagaaggtaggaaaatgtaacttgtctttcacaaataatacaaaaaactttcggtgcccaagcaaacccccctcccccccagaggaaaattctaggtgcgccactggttaagaacccatttttaaatttacctattctaattgggaaataagccacaatttaacttgaaaaattgattttattgacgtttcgaattccacctcggacgtcgttatcaaaatacaaaatattaatagttaattacataaatgccacaaagaaatagcttcagaacagttgtaaattttaatttgtatttttagtaaaatgaattcgcgtaaagaacgttaatttcttcagtggcttgctgaaattgaaaattaagaaaacttgcttttgatctatattatttttacttttgttttgttaaattaataaaaaaattggtttgcgagtctttctataatatgtgagtacaacccattatatatttatacatgttgacattcattctttctcgaaataagtcgaatttatgtaggtgagggcgacgctcatacgcgtgcaaccacgtcacaatagaagacggcgggttaagcataaaattggttgtgtccttaagcacattgtacactcgtttgtcatcattatcatcatcattcgtcaacctcttgcatccactgttggatataggtcttttccatattcttccattgttctctctcttgtgccttccgtatccaatttcgcactgtttttctcaagtctaccaaactctttggttgtctacctcggtgtcttttatcttctctaggtctccactctatgagtcttctggtccacctattattatttaaacgtgccacatgtccagcccatctccatttggcttgtgcaattttttctatgacatctgtcactttggtcctctctctcactatcctatttggtaccatatctcttcttgttatttctaaaattgctctttccatttttttaggttattctcaatttatttgcagaatgtttagtcaaagttatgaaaccatatgttattaccggcagcatgcacacaacacccgtttatatcctgtacattacattttgttctaatttcgtcactttttattcggtctctcagtagttttttttgtaattcttctcagtattcttgtttctgctgtttccagccttctctctattttagctgtatcgggtcttgtttctgatgcatacctcattattggtcttatattcataagattcttcatttcatctcacaattaatatgtgggttacgccatatagtgtcaattctgctaatctatttgctctttgtacttggacatatcttgaccatcatatatagacaaataccattcttgacgaaaacagtaaaattgtacattttttcggttatgtaatttatctaagagatttacccttaaacttgtaacataacaccttgagacgtgaatctgcgatcatatcacacacatctgaaattgtcttgatttttcaattttatttgaataattacaaaaaacaccgtttttttgtaataaaaaacgcaaatattttgttcagcgtgtcgactgtacttatgcatcaccttatgctagttcagttaatatttatttataaatgaaataattaaatcgttttaaatgtatatattttttgttgcagttttttttatatttgtatgtttatttttattatgatgaccagtaataacattcccagtaaaatttattgtgtgctattttgttatgtttatattgtatattatttatttcaagatgtgtaaatgttaataaacgaagtaattgtt

SEQ ID NO: 1284 - DNA, 2556 bp, Diabrotica virgifera
  SmartBlast Evalue=2E-25; Info=Endonuclease-reverse transcriptase n=1 Tax=Bombyx mori RepID=D7F157_BOMMO
aaaaacaaagtaagttatcaatcgaagtagcacagaaaacgacaataaatatcgtctccataccaccagattgacaacaggtggaatactttctttggttacacctcctgagattttcaaaatttataaatcatacaggatgccgaggaaattaagatgagagaattttaaataattcacaactcatctgttcagcgtggtaaaagttccaagaagaaagattccttaatactcttacaaaagagtaaatgaagagtttgctgtgtacttcgattgataacttactttgtaaatcaaaactgtttggctacagggttgcgataaaaaatcgatttaaaactattttaacccgccattacacgcgctatgagggaatccctcaccatatttgtttataagcaatgaaattgtgtaaactaatacgataaccttaagcacccaggaatgcctttagcatggttcatgagagggtatgaaaaagttatagaatatttcaggcggtcagtgtgctgtgtgatagttgaaagaagagacatccctcttcaagtgagggaattcctcactgcgcgtgcaatcacgtgaaatcacgtttctgttatctcaaagaaacttttaggtttttatttaatatttaggtaggtttaattaaaatattattgtttggattaggttaggaacagtggcacaccgagggggggtttgggggttaaaatcccacccagagcatatagaaatatatataaaagaaggtaggaaaatgtaacttgtctttcacaaataatacaaaaaactttcggtgcccaagcaaacccccctcccccccagaggaaaattctaggtgcgccactggttaagaacccatttttaaatttacctattctaattgggaaataagccacaatttaacttgaaaaattgattttattgacgtttcgaattccacctcggacgtcgttatcaaaatacaaaatattaatagttaattacataaatgccacaaagaaatagcttcagaacagttgtaaattttaatttgtatttttagtaaaatgaattcgcgtaaagaacgttaatttcttcagtggcttgctgaaattgaaaattaagaaaacttgcttttgatctatattatttttacttttgttttgttaaattaataaaaaaattggtttgcgagtctttctataatatgtgagtacaacccattatatatttatacatgttgacattcattctttctcgaaataagtcgaatttatgtaggtgagggcgacgctcatacgcgtgcaaccacgtcacaatagaagacggcgggttaagcataaaattggttgtgtccttaagcacattgtacactcgtttgtcatcattatcatcatcattcgtcaacctcttgcatccactgttggatataggtcttttccatattcttccattgttctctctcttgtgccttccgtatccaatttcgcactgtttttctcaagtctaccaaactctttggttgtctacctcggtgtcttttatcttctctaggtctccactctatgagtcttctggtccacctattattatttaaacgtgccacatgtccagcccatctccatttggcttgtgcaattttttctatgacatctgtcactttggtcctctctctcactatcctatttggtaccatatctcttcttgttatttctaaaattgctctttccatttttttaggttattctcaatttatttgcagaatgtttagtcaaagttatgaaaccatatgttattaccggcagcatgcacacaacacccgtttatatcctgtacattacattttgttctaatttcgtcactttttattcggtctctcagtagttttttttgtaattcttctcagtattcttgtttctgctgtttccagccttctctctattttagctgtatcgggtcttgtttctgatgcatacctcattattggtcttatattcataagattcttcatttcatctcacaattaatatgtgggttacgccatatagtgtcaattctgctaatctatttgctctttgtacttggacatatcttgaccatcatatatagacaaataccattcttgacgaaaacagtaaaattgtacattttttcggttatgtaatttatctaagagatttacccttaaacttgtaacataacaccttgagacgtgaatctgcgatcatatcacacacatctgaaattgtcttgatttttcaattttatttgaataattacaaaaaacaccgtttttttgtaataaaaaacgcaaatattttgttcagcgtgtcgactgtacttatgcatcaccttatgctagttcagttaatatttatttataaatgaaataattaaatcgttttaaatgtatatattttttgttgcagttttttttatatttgtatgtttatttttattatgatgaccagtaataacattcccagtaaaatttattgtgtgctattttgttatgtttatattgtatattatttatttcaagatgtgtaaatgttaataaacgaagtaattgtt

SEQ ID NO: 1285 - DNA, 2666 bp, Diabrotica virgifera
  SmartBlast Evalue=2E-19; Info=Endonuclease-reverse transcriptase n=1 Tax=Bombyx mori RepID=D7F157_BOMMO
ctactataccctcctctcctctctacctcttttcttctcccctcctcctctctctctctctctctctcctttccttcctctcactcctatggcgctacagcctaagtcaggctccggcctccctcagcatccgcctcctaccatccctctccttggctgttctcttccagctatccacactcaatatctctttagcatcggatatcatttcatcataataaccataaccacagtttcactaagcgttctactgggtgttctgttatttttcatacttataagatgatcttcccagttcaatctttgtatttttgcataatttgctatagttctttgtaatactgatataacttgtgattgaaccttattctccctttaccattgtcgcatttttcaatatatttctgtcaaaagtaataatacggtttttatcttttctgtcatgatccatgtttctgtgccatatgttgctattggtcgtatgatgcttttacatattttaaactttacttccccgtgggtgtttttggatcacacacacctgcgacaaagctgtaatctaattacaaatcagtataatactgctggtgatctaacttcgttaatataccttcagtccccaccagtactggggccggatccaagaagtacgatatgaataggtgtaattaattagccagcattgtgagtcacctcacgaagtctcctcctgaaccctccactttctgccaatataattcataattttcttgaatatagttatagtccttcagttctagtatacgtcatttttatgtttgcgagattaaaattttttcgagacatatcgactcctttgtaaagtgtattaatagattgacatggcctgtcgtgtatcacccattttcttatgttagttcgtgtagaagatatcgacttcagagtacatacaattttttaataatttgctatcttcgtttctcttttttccaaaaaattatggttgcattaattatctttactaccagcaacatttattgatttaaagtaaatgataagtacctacatgattaatttaaataattaattcacttttaaagtatataagctcatctaatattgtatttaaagcactgaatagtattacactgatagtaatattggcttgacacatactgctgagccgccatttcccgatttgagggtatcggtataaatgaatcaactcttgtacagtagatctgctggatctttgcacattatcatcatttccattacgggaattaaatcaaaactgtttggctacagggttgcgataaaaaatcgatttaaaactattttaagcataaaagtagttgtgtcctcatccacattgtacactcgtttatcatcatcattcgtcaacctcttgcatccactgttggatataggtctccttcatattcttccattgttctctatcttgtgccttccgtatccaatttcccactgtttttctcaagtctacctcggtgtctcaagtctaccaagctctttggtggtctacctcggtgtattttatcctcgttaggtctccactctatgagtcttctggtccacctattattatttaaacgtgctacctgtccagcccatctccatttggcttgtgcaatttttctatgacatctgtcactttggtcctctctctcactatcctatttggtaccatatatcttgttatttctaacattgctctttccagttttctttaggttattctcaatttatttgcagaatgtttagtcaaagttatggaaccatatgctattaccggtaatatgcactggttgcaaacttttttcaagcaaatcggtagcgttccttttagaatatgtcgcatgttgccaaatgctgcccactccaatcctatacgacgctggatctcacaacacccgtttataccctgtacattacattttgttctaatttcgtcacttcttattcagtctctcagtgtttttttgtaatttttctcagtattcttacttctgctatttctagccttctctctattttagctgtatcgggtcttgtttctgatgcatacctcattattggtcttatattcataagattcttcatttcatctcacaattaatatgtgggttacgccatatagtgtcaattctgctaatctatttgctctttgtacttggacatatcttgaccatcatatatagacaaataccattcttgacgaaaacagtaaaattgtacattttttcggttatgtaatttatctaagagatttacccttaaacttgtaacataacaccttgagacgtgaatctgcgatcatatcacacacatctgaaattgtcttgatttttcaattttatttgaataattacaaaaaacaccgtttttttgtaataaaaaacgcaaatattttgttcagcgtgtcgactgtacttatgcatcaccttatgctagttcagttaatatttatttataaatgaaataattaaatcgttttaaatgtatatattttttgttgcagttttttttatatttgtatgtttatttttattatgatgaccagtaataacattcccagtaaaatttattgtgtgctattttgttatgtttatattgtatattatttatttcaagatgtgtaaatgttaataaacgaagtaattgtt

SEQ ID NO: 1286 - DNA, 2547 bp, Diabrotica virgifera
gatgcccctcatccttctgaggtttctaatcaatcatcctgaaataggattctatatttaacctatacaaaaggattatactcttattattgcttcatcaccatgtttgtcatttctaacttttctaatgcctcatccacaaccaaaatcaaaattgagtgtatgtagttgattattaaaccaataaacaaacaaccatacctcgtttttaaactaggaggagtaattcaaatttaccgccccgtaatgttcgtttgtaattggtccaatcgcaggtaagtttattccactaatttattaaattttgacactattgatatttatgaaaattttgacactattggcatttaaaattaataggttaattaagctatatcagcgattttttgtgtgtttctgctttattcctttaatttttagatttttagtctgcatttatgaaaaaacagttgtttttagaactctttagcgaagtattagtataatacaatatttatggattaccgtcgaagccgacatgatcaaccaaaaaagaagatgaatttggtgatttttctagtgacattggatgtgaatctgtctcctgagtttactcctcctggtttaaaaacagggtatagtaatacgaaacctaaggaatcaacttcacaaatatggaaaggctgttgttacagtttcatgtagacatgtacatacgcaagtagaaccacaaacctacgcaggtagctgacagacatctcgttatggataaacctgttatactgcagatataggtactgatgaattcaatatatgagtatatctttattaaaacaaatattttgccagaacggtttacacgttgaaattccttaaggcgaatttatacgtgttaagtagctaaagcaagttactaaatcaagtggctaaaatttagtccgttcgtttaagtgtgcgttcacatgatttgttgtttagtgataatgtaaacatggctggaaaagttacgtgtacaacagtgcggaattgtatattaaaaatatgtggcgaattattagaaatacttgcagaagaaatgaacaaagacaaaaagaagcaaagtaagttatcaatcgaagtagcacagaaaacgacaataaatatcgtctccataccaccagattgacaacaggtggaatactttctttggttacacctcctgagattttcaaaatttataaatcatacaggatgccgaggaaattaagatgagagaattttaaataattcacaactcatctgttcagcgtggtaaaagttccaagaagaaagattccttaatactcttacaaaagagtaaatgaagagtttgctgtgtacttcgattgataacttactttgtaaatcaaaactgtttggctacagggttgcgataaaaaatcgatttaaaactattttaacccgccattacacgcgctatgagggaatccctcaccatatttgtttataagcaatgaaattgtgtaaactaatacgataaccttaagcacccaggaatgcctttagcatggttcatgagagggtatgaaaaagttatagaatatttcaggcggtcagtgtgctgtgtgatagttgaaagaagagacatccctcttcaagtgagggaattcctcactgcgcgtgcaatcacgtgaaatcacgtttctgttatctcaaagaaacttttaggtttttatttaatatttaggtaggtttaattaaaatattattgtttggattaggttaggaacagtggcacaccgagggggggtttgggggttaaaatcccacccagagcatatagaaatatatataaaagaaggtaggaaaatgtaacttgtctttcacaaataatacaaaaaactttcggtgcccaagcaaacccccctcccccccagaggaaaattctaggtgcgccactggttaagaacccatttttaaatttacctattctaattgggaaataagccacaatttaacttgaaaaattgattttattgacgtttcgaattccacctcggacgtcgttatcaaaatacaaaatattaatagttaattacataaatgccacaaagaaatagcttcagaacagttgtaaattttaatttgtatttttagtaaaatgaattcgcgtaaagaacgttaatttcttcagtggcttgctgaaattgaaaattaagaaaacttgcttttgatctatattatttttacttttgttttgttaaattaataaaaaaattggtttgcgagactttctataatatgtgagtacaacccattttatatttatacatgttgacattcattcttctcgaaataagtcgaatttatgtaggtgagggcgacgctcatacgcgtgcaaccacgtcacaatagaagacgcgtgtaacggcgggttaataagtcacagtggtgaaaaaagagaaaatttagtgtggtttttaatttcaaatatatcattcaaaagaaactttttgtttattctaagggactgtcagccctcggtaataatccactatttgattctgcgtttaaatttttcaaaaatac

SEQ ID NO: 1287 - DNA, 2630 bp, Diabrotica virgifera
  SmartBlast Evalue=2E-19; Info=Endonuclease-reverse transcriptase n=1 Tax=Bombyx mori RepID=D7F157_BOMMO
ctactataccctcctctcctctctacctcttttcttctcccctcctcctctctctctctctctctctcctttccttcctctcactcctatggcgctacagcctaagtcaggctccggcctccctcagcatccgcctcctaccatccctctccttggctgttctcttccagctatccacactcaatatctctttagcatcggatatcatttcatcataataaccataaccacagtttcactgagcgttctactgggtgttctgttatttttcattcttattagatggcctagatcagactagattagttcaatatttgtatttttgaccttattctctctctaccattgtcgcatttttcaatatctttctgtcaaaagtaataatacggtttttatcttttctgtcatgatccatgtttctgtgccatatgttgctattggtcgtatgatgcttttacatattttaaactttacttccccgtgggtgtttttggatcacacacacctgcgacaaagctgtaatctaattacaaatcagtataatactgctggtgatctaacttcgttaatataccttcagtccccaccagtactggggccggatccaagaagtacgatatgaataggtgtaattaattagccagcattgtgagtcacctcacgaagtctcctcctgaaccctccactttctgccaatataattcataattttcttgaatatagttatagtccttcagttctagtatacgtcatttttatgtttgcgagattaaaattttttcgagacatatcgactcctttgtaaagtgtattaatagattgacatggcctgtcgtgtatcacccattttcttatgttagttcgtgtagaagatatcgacttcagagtacatacaattttttaataatttgctatcttcgtttctcttttttccaaaaaattatggttgcattaattatctttactaccagcaacatttattgatttaaagtaaatgataagtacctacatgattaatttaaataattaattcacttttaaagtatataagctcatctaatattgtatttaaagcactgaatagtattacactgatagtaatattggcttgacacatactgctgagccgccatttcccgatttgagggtatcggtataaatgaatcaactcttgtacagtagatctgctggatctttgcacattatcatcatttccattacgggaattaaatcaaaactgtttggctacagggttgcgataaaaaatcgatttaaaactattttaagcataaaagtagttgtgtcctcatccacattgtacactcgtttatcatcatcattcgtcaacctcttgcatccactgttggatataggtctccttcatattcttccattgttctctatcttgtgccttccgtatccaatttcccactgtttttctcaagtctacctcggtgtctcaagtctaccaagctctttggtggtctacctcggtgtattttatcctcgttaggtctccactctatgagtcttctggtccacctattattatttaaacgtgctacctgtccagcccatctccatttggcttgtgcaatttttctatgacatctgtcactttggtcctctctctcactatcctatttggtaccatatatcttgttatttctaacattgctctttccagttttctttaggttattctcaatttatttgcagaatgtttagtcaaagttatggaaccatatgctattaccggtaatatgcactggttgcaaacttttttcaagcaaatcggtagcgttccttttagaatatgtcgcatgttgccaaatgctgcccactccaatcctatacgacgctggatctcacaacacccgtttataccctgtacattacattttgttctaatttcgtcacttcttattcagtctctcagtgtttttttgtaatttttctcagtattcttacttctgctatttctagccttctctctattttagctgtatcgggtcttgtttctgatgcatacctcattattggtcttatattcataagattcttcatttcatctcacaattaatatgtgggttacgccatatagtgtcaattctgctaatctatttgctctttgtacttggacatatcttgaccatcatatatagacaaataccattcttgacgaaaacagtaaaattgtacattttttcggttatgtaatttatctaagagatttacccttaaacttgtaacataacaccttgagacgtgaatctgcgatcatatcacacacatctgaaattgtcttgatttttcaattttatttgaataattacaaaaaacaccgtttttttgtaataaaaaacgcaaatattttgttcagcgtgtcgactgtacttatgcatcaccttatgctagttcagttaatatttatttataaatgaaataattaaatcgttttaaatgtatatattttttgttgcagttttttttatatttgtatgtttatttttattatgatgaccagtaataacattcccagtaaaatttattgtgtgctattttgttatgtttatattgtatattatttatttcaagatgtgtaaatgttaataaacgaagtaattgtt

SEQ ID NO: 1288 - DNA, 2196 bp, Diabrotica virgifera
tatggtgttgacgtgagtacctcaattgtacggaaatgactcagcgtggaccaaaaaataccgatatggactgttgacgactgaaaaaaagtgattttcagtgatgaattacatttatttgtgagggatatacggatttaaatcaaagtgaaggtggacctctgcgaagagatcatatccaacagactacaaaataatcttctaaacagtttttttgggtttttttttaacaaatgacactgaaagtttagttccttaaaggcatgatgaattctgctaaatatattgaaatattacgcagaacaattgtttcattcatggaaattttcgacagaacatttaaacgtaacttggcttcttgttgcaattcgaaattggtccagactttgatgcgggaaataaaagtaaaagtgcttggttggcctcgtaattcaccagacctaaatcccattgagaacttctggcatattctcaagaaacctagttaagatgaattgcactagataagaaaaattgataacaatgactggagagggaatgcctagatgtgtaaggtcacttctgctaaacgaggacaaatttcgtactaatatatagattgttcagtctacttatggtacgtaatgcttaacccgccattacacgcgctatgagggaatccctcaccatatttgtttataagcaatgaaattgtgtaaactaatacgataaccttaagcacccaggaatgcctttagcatggttcatgagagggtatgaaaaagttatagaatatttcaggcggtcagtgtgctgtgtgatagttgaaagaagagacatccctcttcaagtgagggaattcctcactgcgcgtgcaatcacgtgaaatcacgtttctgttatctcaaagaaacttttaggtttttatttaatatttaggtaggtttaattaaaatattattgtttggattaggttaggaacagtggcacaccgagggggggtttgggggttaaaatcccacccagagcatatagaaatatatataaaagaaggtaggaaaatgtaacttgtctttcacaaataatacaaaaaactttcggtgcccaagcaaacccccctcccccccagaggaaaattctaggtgcgccactggttaagaacccatttttaaatttacctattctaattgggaaataagccacaatttaacttgaaaaattgattttattgacgtttcgaattccacctcggacgtcgttatcaaaatacaaaatattaatagttaattacataaatgccacaaagaaatagcttcagaacagttgtaaattttaatttgtatttttagtaaaatgaattcgcgtaaagaacgttaatttcttcagtggcttgctgaaattgaaaattaagaaaacttgcttttgatctatattatttttacttttgttttgttaaattaataaaaaaattggtttgcgagactttctataatatgtgagtacaacccattttatatttatacatgttgacattcattctttctcgaaataagtcgaatttatgtaggtgagggcgacgctcatacgcgtgcaaccacgtcacaatagaagacgcgtgtaacggcgggttaaaagctaaggttataaaaatttgttttttatttgtctattcattcgaacagcacagtatacatatattatataaaatattataattaatgtctatgattcttgaacattagaacggcgtcgtgcaagaactctattaaatgttccacattaacttctggcttcaacgtggggttatagggatatttggtaagagtggtactgcatgcttttgattccggacaatacactgatgacagtactacagtaggtttttctatagggtatttctgacctattgtaactgtcaccaaacagttatagtcatccaaattataaagaaaaacagccttattgtaagtgagtacatcatattcaataatacttctaaaacatgctgctgctaaattagtaataaaaattttcttcaatttaaaatgatcggcaacttgctgcaatcgtgtatctagagtcttagaaaccagtgagacaacgtccgacagtgaactatctttcttaaaatctgcattattgaatcggaaccctcctaatacttgttctaatctaggagatagctgaatggagtgggtagagcgagaaccatctagc

SEQ ID NO: 1289 - DNA, 1913 bp, Diabrotica virgifera
aaaaacaaagtaagttatcaatcgaagtagcacagaaaacgacaataaatatcgtctccataccaccagattgacaacaggtggaatactttctttggttacacctcctgagattttcaaaatttataaatcatacaggatgccgaggaaattaagatgagagaattttaaataattcacaactcatctgttcagcgtggtaaaagttccaagaagaaagattccttaatactcttacaaaagagtaaatgaagagtttgctgtgtacttcgattgataacttactttgtaaatcaaaactgtttggctacagggttgcgataaaaaatcgatttaaaactattttaacccgccattacacgcgctatgagggaatccctcaccatatttgtttataagcaatgaaattgtgtaaactaatacgataaccttaagcacccaggaatgcctttagcatggttcatgagagggtatgaaaaagttatagaatatttcaggcggtcagtgtgctgtgtgatagttgaaagaagagacatccctcttcaagtgagggaattcctcactgcgcgtgcaatcacgtgaaatcacgtttctgttatctcaaagaaacttttaggtttttatttaatatttaggtaggtttaattaaaatattattgtttggattaggttaggaacagtggcacaccgagggggggtttgggggttaaaatcccacccagagcatatagaaatatatataaaagaaggtaggaaaatgtaacttgtctttcacaaataatacaaaaaactttcggtgcccaagcaaacccccctcccccccagaggaaaattctaggtgcgccactggttaagaacccatttttaaatttacctattctaattgggaaataagccacaatttaacttgaaaaattgattttattgacgtttcgaattccacctcggacgtcgttatcaaaatacaaaatattaatagttaattacataaatgccacaaagaaatagcttcagaacagttgtaaattttaatttgtatttttagtaaaatgaattcgcgtaaagaacgttaatttcttcagtggcttgctgaaattgaaaattaagaaaacttgcttttgatctatattatttttacttttgttttgttaaattaataaaaaaattggtttgcgagactttctataatatgtgagtacaacccattttatatttatacatgttgacattcattctttctcgaaataagtcgaatttatgtaggtgagggcgacgctcatacgcgtgcaaccacgtcacaatagaagacgcgtgtaacggcgggttaaaagctaaggttataaaaatttgttttttatttgtctattcattcgaacagcacagtatacatatattatataaaatattataattaatgtctatgattcttgaacattagaacggcgtcgtgcaagaactctattaaatgttccacattaacttctggcttcaacgtggggttatagggatatttggtaagagtggtactgcatgcttttgattccggacaatacactgatgacagtactacagtaggtttttctatagggtatttctgacctattgtaactgtcaccaaacagttatagtcatccaaattataaagaaaaacagccttattgtaagtgagtacatcatattcaataatacttctaaaacatgctgctgctaaattagtaataaaaattttcttcaatttaaaatgatcggcaacttgctgcaatcgtgtatctagagtcttagaaaccagtgagacaacgtccgacagtgaactatctttcttaaaatctgcattattgaatcggaaccctcctaatacttgttctaatctaggagatagctgaatggagtgggtagagcgagaaccatctagc

SEQ ID NO: 1290 - DNA, 1296 bp, Diabrotica virgifera
  SmartBlast Evalue=0.000000008; Info=Putative uncharacterized transposon-derived protein F52C9.6 (Fragment) n=1 Tax= Harpegnathos saltator RepID=E2BUQ3_9HYME
gcctctagtaagttgtcgttatatcgttctcgtggttttcccactgatcatcttcctattgaggaaccgtctctcactgtcttcactactctatttgttgtcattcggcttatgtggtcattccattttattcttctgtttcttacccggttattaatgttgtccaccttgcatctccgtcgtatatctgtacttctagctctgtcccatagagtcttaccatcgatttttcgaagggttttcatctccgctgtttcgagcaatctttttatcctctctgtgccagatcgtgtttctgccgcgtatgtcattattggtctgatgactgttttgtaaattctgcctttcatttcttttccgatatttttatttctccatattgtgttattcaggcaacctgtggctctgtttgctctattcacttgaacttccacttctgtgttgagccttccatagctagatagtgtgatgtttagatatataggcatcacactatggtcggtatagtataaataccgttgcacgtcattaactacgtcagagatcaagttgacattgttgccaaattacaagacaattgctgaactcttaaattaaatatatcacttaattattgcagaagtagatacaataaaacagattaatattaaatgtaaataaacaaaaacattataaatagaaaacaagaattaggtaataatcttccgttatagtaaataataaaaacaaatctgaagtgtcaataccgcaactgtcaaataaggctaccaatttataccaaaatgtcaccttcgttcgatcgcagttaaaatgtgatccggacaagaagtgtgcttcataaaaccgctttataatccatttatacaagttaaatgaaacaaagttatggtttatttctttatatttatatttctttatataccaactttctttgttccaaaggacttccaaagctaaacgattctaaaaaggaatagacctataacttaaatattttgtgttggtatcatgtgacgtcacttactatgacgcggatgacgtgcatcgggatttacactgtacgaaccataaattaccaaggcaatatctttgtgggccactgaaaacttcatcatatatttgtcattttttaaaattttttgaattttattccaatgggtatacattctcctccaccccattccagttacagaaatccttatttttttttaagtcactttccatttcctaaaaatatggaaacaaccgcaatattggtattaaaaattacttattgaaataaatcattgaattact

SEQ ID NO: 1291 - DNA, 675 bp, Diabrotica virgifera
tattgctaaggtgtacaatgctaccagaggatagcgctatttttccttattgtcttattttgagtcacactgagattattcagctctaccttttgtatttatcgcagtgctagatgccgggttttattgtaaaatatcagcaatccgtaatatcaacaataataatataagtaaaatgcgagagttgacttaataatcacttactagtatttgacaaaaaatttaccataaatcataaatcaaacaaatgtgtcaaactgacatatgacaagtgacactcaaaagaatatttcacgtgtcatatgtcacttaaaggatacagggaaaaaagggggcatgtcagaaattttcattttttgttttaataattcattagataggttataatatattctgtactgtaatatacgtaaataacactggttaaaaatggattgtgtcatgagataacactaataataaattacctatacagaagaagaagggctcgaaacagaagtggaagatcaagtgaatagagcaaacagagccacaggttgcctgaatgacacgataaggaaaaataaaaatatcggaaaagaaatgaaaggcagaatttacaaaacagtcatcagaccaataatgacatacgcggcagaaacacgacccgacacagagaggacaaaaagattgctc

SEQ ID NO: 1292 - DNA, 3700 bp, Diabrotica virgifera
  SmartBlast Evalue=1E-168; Info=Cationic amino acid transporter n=1 Tax=Culex quinquefasciatus RepID=B0WAU0_CULQU
cgcgggtgtatgatcagtgatacctaatatttttctgcaaagatggcttccagatttttttctgctctgacccgtaagaaatccaacgatgacgaagagagcgagagtcccttagctcgagttctgacactactagatctgacaactttgggagtaggagccacattgggtttaggagtgtacgttttagccggctctgtagcaaaggaggtagctggacctgctgtgtgtgtgtcgtttgcagtggcagctgtagcctcagccgttgcaggtctgtgttatgctgaatttgcagccagagttcctaaggcaggttctgcctatatatacagttacgtcagtgtaggagaatttgtggcctttgttattggatggaatcttattttagaatacattattggtactgccagtgttgctagtggtatgagcaactatatcgatgctctgataggtggccaaatcaaggagacactacgagaatggatgcccatggatatttctttcatgtccccatatccagactttctttccttcatttttgtgatgatattgacatttcttcttgcctttggagtaaaggaatcctcaaaactcaacaatgttttcaccgcagtaaacatggttaccatttttattgcaatcgttgcaggatctataaaggctgatgttggaaactggaaaattgatccagcaaaattaaacgagacagaaagggcgcatgcaggagagggtggattcatgccatttggcgtagctggaattatggcaggagcggcaaaatgtttctatggtttcgtaggttttgacgctgtcgctaccaccggggaagaagccaaaaatcctcaaaaggacattcctcttgccatcgtcatatcgttgttcattatttttgccgcctacttttctatttctaccgttttgacgatggctttgccttattatcaacaggataaagacgctccatttccttatctcttccattactacggatgggaatcgataaaatggatagttacgatcggtgccgtctttgccctctgtaccagtctcttgggagcgatgtttcccttacctagggttatttatgccatggctaatgacggtattgtctataaatcactatctaaagttagcgagaagacgaaaacacctatttttgccacgttgctttcgggattgttatcaggtattatgtcaatattgtttgacttagatcaattgattgatatgatgtccattggaacactaatggcatataccattgtagcagtatctgtactaatattgaggtatgaacccaagacatcggaatacccaggactatcaattaaaattgaaaaacagacatccgtagaaaatcacatgttgaacagtgtcaaaaatttatttaatcttcataatattaaagaaccctccaaggaatcatctgttattgttaactggtgtattgttttattcagtatattctgtgctcttttctgtgcaactgtagccaatggaagacagctcgtatttactcaaccattctacatactggcatttatcgttacaataattggcatggcagtattgatggtaattatggtacgacaaccagttgttgaagaaaaactatcatttaaggtaccattggttccctatataccgtgtattagtgtggttttcaatttatatttgatgtttgagctagatctacacacatggattagattcctagtatggcttgctgttggcttcattatctacttctcctacggaatccgacacagcgcagaaggagccaaagacaaaaaactgcgagaaatcgcagagcctccatcccctccagcaaaagaagtcacttcgttctgagaacgtccaccgccagaaattagaagaagactcaacgaaatagaagttgttgtttgattcgtgctactctagaagctgtgataaagagtgcctagcattttagtattccaagtgttagtattttttgacttttaggttgtaagaagtgagttacccgtggtagaagaataagggtttctaggtttgacaaaaattttgaacgattgaaatcatgttatacgaattagtcaaaaacttataaaaaaaaacgtttttgcaagtgaagggtacagggaaaaaaggagaaatgtcacttttgttgaatttttcagcagagcattttcaaagttataagactaatattattgatatattttcatggtactttttttttaaatcatatgtttgaaaaatttactctgtgggaatacacaaaaacaatgtgttttcacttatttctgcgagattcacaactgacaatctcctaattaaccggtaacaccgtgacattcccccttcttctccttcttcttcttctttttgtatagatatgactctgtctgttttttcaatgtgcctctagtaagttttcgttccatcgttttcgtggtcttcccactgattatcttcctattggggaaccgtctctcgctgtcctactatcatatttgttgtcattcagcttatgcggtcattccattctattcttctgtttcttacccagttattaatgttatacaccttgcatctccgtcgtatatctgtacttctagctctgtcccatagagtcttaccatcgatttttcgaagggttttcatctccgctgtttcgagcaatctttttatcctctctgtgccagatcgtgtttctgccgcgtatgtcattattggtctgatgactgttttgtaaattctgcctttcatttcttttccgatatttttatttctccatattgtgttattcaggcaacctgtggctctgtttgctctattcacttgaacttccacttctgtgttgagccttccatagctagatagtgtgatgtttagatatataggcatcacactatggtcggtatagtataaataccgttgcacgtcattaactacgtcagagatcaagttgacattgttgccaaattacaagacaattgctgaactcttaaattaaatatatcacttaattattgcagaagtagatacaataaaacagattaatattaaatgtaaataaacaaaaacattataaatagaaaacaagaattaggtaataatcttccgttatagtaaataataaaaacaaatctgaagtgtcaataccgcaactgtcaaataaggctaccaatttataccaaaatgtcaccttcgttcgatcgcagttaaaatgtgatccggacaagaagtgtgcttcataaaaccgctttataatccatttatacaagttaaatgaaacaaagttatggtttatttctttatatttatatttctttatataccaactttctttgttccaaaggacttccaaagctaaacgattctaaaaaggaatagacctataacttaaatattttgtgttggtatcatgtgacgtcacttactatgacgcggatgacgtgcatcgggatttacactgtacgaaccataaattaccaaggcaatatctttgtgggccactgaaaacttcatcatatatttgtcattttttaaaattttttgaattttattccaatgggtatacattctcctccaccccattccagttacagaaatccttatttttttttaagtcactttccatttcctaaaaatatggaaacaaccgcaatattggtattaaaaattacttattgaaataaatcattgaattact

SEQ ID NO: 1293 - DNA, 3692 bp, Diabrotica virgifera
  SmartBlast Evalue=1E-168; Info=Cationic amino acid transporter n=1 Tax=Culex quinquefasciatus RepID=B0WAU0_CULQU
gtgggtggatcagtgatagtatttttctgcacagatggcttccagatttttttctgctctgacccgtaagaaatccaacgatgacgaagagagcgagagtccattagcgcgagttttgacactactagatctgacaactttgggagtaggagcaacattaggtttaggagtatacgttttagctggttcggtagcaaaggaggtagctggacctgctgtgtgtgtgtcgtttgcagtggcagctgtagcctcagccgttgcaggtctgtgttatgctgaatttgcagccagagttcctaaggcaggttctgcctatatatacagttacgtcagtgtaggagaatttgtggcctttgttattggatggaatcttattttagaatacattattggtactgccagtgttgctagtggtatgagcaactatatcgatgctctgataggtggccaaatcaaggagacactacgagaatggatgcccatggatatttctttcatgtccccatatccagactttctttccttcatttttgtgatgatattgacatttcttcttgcctttggagtaaaggaatcctcaaaactcaacaatgttttcaccgcagtaaacatggttaccatttttattgcaatcgttgcaggatctataaaggctgatgttggaaactggaaaattgatccagcaaaattaaacgagacagaaagggcgcatgcaggagagggtggattcatgccatttggcgtagctggaattatggcaggagcggcaaaatgtttctatggtttcgtaggttttgacgctgtcgctaccaccggggaagaagccaaaaatcctcaaaaggacattcctcttgccatcgtcatatcgttgttcattatttttgccgcctacttttctatttctaccgttttgacgatggctttgccttattatcaacaggataaagacgctccatttccttatctcttccattactacggatgggaatcgataaaatggatagttacgatcggtgccgtctttgccctctgtaccagtctcttgggagcgatgtttcccttacctagggttatttatgccatggctaatgacggtattgtctataaatcactatctaaagttagcgagaagacgaaaacacctatttttgccacgttgctttcgggattgttatcaggtattatgtcaatattgtttgacttagatcaattgattgatatgatgtccattggaacactaatggcatataccattgtagcagtatctgtactaatattgaggtatgaacccaagacatcggaatacccaggactatcaattaaaattgaaaaacagacatccgtagaaaatcacatgttgaacagtgtcaaaaatttatttaatcttcataatattaaagaaccctccaaggaatcatctgttattgttaactggtgtattgttttattcagtatattctgtgctcttttctgtgcaactgtagccaatggaagacagctcgtatttactcaaccattctacatactggcatttatcgttacaataattggcatggcagtattgatggtaattatggtacgacaaccagttgttgaagaaaaactatcatttaaggtaccattggttccctatataccgtgtattagtgtggttttcaatttatatttgatgtttgagctagatctacacacatggattagattcctagtatggcttgctgttggcttcattatctacttctcctacggaatccgacacagcgcagaaggagccaaagacaaaaaactgcgagaaatcgcagagcctccatcccctccagcaaaagaagtcacttcgttctgagaacgtccaccgccagaaattagaagaagactcaacgaaatagaagttgttgtttgattcgtgctactctagaagctgtgataaagagtgcctagcattttagtattccaagtgttagtattttttgacttttaggttgtaagaagtgagttacccgtggtagaagaataagggtttctaggtttgacaaaaattttgaacgattgaaatcatgttatacgaattagtcaaaaacttataaaaaaaaacgtttttgcaagtgaagggtacagggaaaaaaggagaaatgtcacttttgttgaatttttcagcagagcattttcaaagttataagactaatattattgatatattttcatggtactttttttttaaatcatatgtttgaaaaatttactctgtgggaatacacaaaaacaatgtgttttcacttatttctgcgagattcacaactgacaatctcctaattaaccggtaacaccgtgacattcccccttcttctccttcttcttcttctttttgtatagatatgactctgtctgttttttcaatgtgcctctagtaagttttcgttccatcgttttcgtggtcttcccactgattatcttcctattggggaaccgtctctcgctgtcctactatcatatttgttgtcattcagcttatgcggtcattccattctattcttctgtttcttacccagttattaatgttatacaccttgcatctccgtcgtatatctgtacttctagctctgtcccatagagtcttaccatcgatttttcgaagggttttcatctccgctgtttcgagcaatctttttatcctctctgtgccagatcgtgtttctgccgcgtatgtcattattggtctgatgactgttttgtaaattctgcctttcatttcttttccgatatttttatttctccatattgtgttattcaggcaacctgtggctctgtttgctctattcacttgaacttccacttctgtgttgagccttccatagctagatagtgtgatgtttagatatataggcatcacactatggtcggtatagtataaataccgttgcacgtcattaactacgtcagagatcaagttgacattgttgccaaattacaagacaattgctgaactcttaaattaaatatatcacttaattattgcagaagtagatacaataaaacagattaatattaaatgtaaataaacaaaaacattataaatagaaaacaagaattaggtaataatcttccgttatagtaaataataaaaacaaatctgaagtgtcaataccgcaactgtcaaataaggctaccaatttataccaaaatgtcaccttcgttcgatcgcagttaaaatgtgatccggacaagaagtgtgcttcataaaaccgctttataatccatttatacaagttaaatgaaacaaagttatggtttatttctttatatttatatttctttatataccaactttctttgttccaaaggacttccaaagctaaacgattctaaaaaggaatagacctataacttaaatattttgtgttggtatcatgtgacgtcacttactatgacgcggatgacgtgcatcgggatttacactgtacgaaccataaattaccaaggcaatatctttgtgggccactgaaaacttcatcatatatttgtcattttttaaaattttttgaattttattccaatgggtatacattctcctccaccccattccagttacagaaatccttatttttttttaagtcactttccatttcctaaaaatatggaaacaaccgcaatattggtattaaaaattacttattgaaataaatcattgaattact

SEQ ID NO: 1294 - DNA, 3693 bp, Diabrotica virgifera
  SmartBlast Evalue=1E-168; Info=Cationic amino acid transporter n=1 Tax=Culex quinquefasciatus RepID=B0WAU0_CULQU
cgtgggtggatcagtgataatatttttctgcacagatggcttccagatttttttctgctctgacccgtaagaaatccaacgacgacgaagagagcgagagtccattagctcgagttctgacactactagatctcacaactttgggagtaggagccacattaggtttaggagtatatgttttagccggatctgtagcaaaggaggtagctggacctgctgtgtgtgtgtcgtttgcagtggcagctgtagcctcagccgttgcaggtctgtgttatgctgaatttgcagccagagttcctaaggcaggttctgcctatatatacagttacgtcagtgtaggagaatttgtggcctttgttattggatggaatcttattttagaatacattattggtactgccagtgttgctagtggtatgagcaactatatcgatgctctgataggtggccaaatcaaggagacactacgagaatggatgcccatggatatttctttcatgtccccatatccagactttctttccttcatttttgtgatgatattgacatttcttcttgcctttggagtaaaggaatcctcaaaactcaacaatgttttcaccgcagtaaacatggttaccatttttattgcaatcgttgcaggatctataaaggctgatgttggaaactggaaaattgatccagcaaaattaaacgagacagaaagggcgcatgcaggagagggtggattcatgccatttggcgtagctggaattatggcaggagcggcaaaatgtttctatggtttcgtaggttttgacgctgtcgctaccaccggggaagaagccaaaaatcctcaaaaggacattcctcttgccatcgtcatatcgttgttcattatttttgccgcctacttttctatttctaccgttttgacgatggctttgccttattatcaacaggataaagacgctccatttccttatctcttccattactacggatgggaatcgataaaatggatagttacgatcggtgccgtctttgccctctgtaccagtctcttgggagcgatgtttcccttacctagggttatttatgccatggctaatgacggtattgtctataaatcactatctaaagttagcgagaagacgaaaacacctatttttgccacgttgctttcgggattgttatcaggtattatgtcaatattgtttgacttagatcaattgattgatatgatgtccattggaacactaatggcatataccattgtagcagtatctgtactaatattgaggtatgaacccaagacatcggaatacccaggactatcaattaaaattgaaaaacagacatccgtagaaaatcacatgttgaacagtgtcaaaaatttatttaatcttcataatattaaagaaccctccaaggaatcatctgttattgttaactggtgtattgttttattcagtatattctgtgctcttttctgtgcaactgtagccaatggaagacagctcgtatttactcaaccattctacatactggcatttatcgttacaataattggcatggcagtattgatggtaattatggtacgacaaccagttgttgaagaaaaactatcatttaaggtaccattggttccctatataccgtgtattagtgtggttttcaatttatatttgatgtttgagctagatctacacacatggattagattcctagtatggcttgctgttggcttcattatctacttctcctacggaatccgacacagcgcagaaggagccaaagacaaaaaactgcgagaaatcgcagagcctccatcccctccagcaaaagaagtcacttcgttctgagaacgtccaccgccagaaattagaagaagactcaacgaaatagaagttgttgtttgattcgtgctactctagaagctgtgataaagagtgcctagcattttagtattccaagtgttagtattttttgacttttaggttgtaagaagtgagttacccgtggtagaagaataagggtttctaggtttgacaaaaattttgaacgattgaaatcatgttatacgaattagtcaaaaacttataaaaaaaaacgtttttgcaagtgaagggtacagggaaaaaaggagaaatgtcacttttgttgaatttttcagcagagcattttcaaagttataagactaatattattgatatattttcatggtactttttttttaaatcatatgtttgaaaaatttactctgtgggaatacacaaaaacaatgtgttttcacttatttctgcgagattcacaactgacaatctcctaattaaccggtaacaccgtgacattcccccttcttctccttcttcttcttctttttgtatagatatgactctgtctgttttttcaatgtgcctctagtaagttttcgttccatcgttttcgtggtcttcccactgattatcttcctattggggaaccgtctctcgctgtcctactatcatatttgttgtcattcagcttatgcggtcattccattctattcttctgtttcttacccagttattaatgttatacaccttgcatctccgtcgtatatctgtacttctagctctgtcccatagagtcttaccatcgatttttcgaagggttttcatctccgctgtttcgagcaatctttttatcctctctgtgccagatcgtgtttctgccgcgtatgtcattattggtctgatgactgttttgtaaattctgcctttcatttcttttccgatatttttatttctccatattgtgttattcaggcaacctgtggctctgtttgctctattcacttgaacttccacttctgtgttgagccttccatagctagatagtgtgatgtttagatatataggcatcacactatggtcggtatagtataaataccgttgcacgtcattaactacgtcagagatcaagttgacattgttgccaaattacaagacaattgctgaactcttaaattaaatatatcacttaattattgcagaagtagatacaataaaacagattaatattaaatgtaaataaacaaaaacattataaatagaaaacaagaattaggtaataatcttccgttatagtaaataataaaaacaaatctgaagtgtcaataccgcaactgtcaaataaggctaccaatttataccaaaatgtcaccttcgttcgatcgcagttaaaatgtgatccggacaagaagtgtgcttcataaaaccgctttataatccatttatacaagttaaatgaaacaaagttatggtttatttctttatatttatatttctttatataccaactttctttgttccaaaggacttccaaagctaaacgattctaaaaaggaatagacctataacttaaatattttgtgttggtatcatgtgacgtcacttactatgacgcggatgacgtgcatcgggatttacactgtacgaaccataaattaccaaggcaatatctttgtgggccactgaaaacttcatcatatatttgtcattttttaaaattttttgaattttattccaatgggtatacattctcctccaccccattccagttacagaaatccttatttttttttaagtcactttccatttcctaaaaatatggaaacaaccgcaatattggtattaaaaattacttattgaaataaatcattgaattact

SEQ ID NO: 1295 - DNA, 3696 bp, Diabrotica virgifera
  SmartBlast Evalue=1E-168; Info=Cationic amino acid transporter n=1 Tax=Culex quinquefasciatus RepID=B0WAU0_CULQU
cgcgggtgtatgatcagtgatacctaatatttttctgcaaagatggcttccagatttttttctgctctgacccgtaagaaatccaacgatgacgaagagagcgagagtcccttagctcgagttctgacactactagatctgacaactttgggagtaggagccacattgggtttaggagtgtacgttttagccggctctgtagcaaaggaggtagctggacctgctgtgtgtgtgtcgtttgcagtggcagctgtagcctcagccgttgcaggtctgtgttatgctgaatttgcagccagagttcctaaggcaggttctgcctatatatacagttacgtcagtgtaggagaatttgtggcctttgttattggatggaatcttattttagaatacattattggtactgccagtgttgctagtggtatgagcaactatatcgatgctctgataggtggccaaatcaaggagacactacgagaatggatgcccatggatatttctttcatgtccccatatccagactttctttccttcatttttgtgatgatattgacatttcttcttgcctttggagtaaaggaatcctcaaaactcaacaatgttttcaccgcagtaaacatggttaccatttttattgcaatcgttgcaggatctataaaggctgatgttggaaactggaaaattgatccagcaaaattaaacgagacagaaagggcgcatgcaggagagggtggattcatgccatttggcgtagctggaattatggcaggagcggcaaaatgtttctatggtttcgtaggttttgacgctgtcgctaccaccggggaagaagccaaaaatcctcaaaaggacattcctcttgccatcgtcatatcgttgttcattatttttgccgcctacttttctatttctaccgttttgacgatggctttgccttattatcaacaggataaagacgctccatttccttatctcttccattactacggatgggaatcgataaaatggatagttacgatcggtgccgtctttgccctctgtaccagtctcttgggagcgatgtttcccttacctagggttatttatgccatggctaatgacggtattgtctataaatcactatctaaagttagcgagaagacgaaaacacctatttttgccacgttgctttcgggattgttatcaggtattatgtcaatattgtttgacttagatcaattgattgatatgatgtccattggaacactaatggcatataccattgtagcagtatctgtactaatattgaggtatgaacccaagacatcggaatacccaggactatcaattaaaattgaaaaacagacatccgtagaaaatcacatgttgaacagtgtcaaaaatttatttaatcttcataatattaaagaaccctccaaggaatcatctgttattgttaactggtgtattgttttattcagtatattctgtgctcttttctgtgcaactgtagccaatggaagacagctcgtatttactcaaccattctacatactggcatttatcgttacaataattggcatggcagtattgatggtaattatggtacgacaaccagttgttgaagaaaaactatcatttaaggtaccattggttccctatataccgtgtattagtgtggttttcaatttatatttgatgtttgagctagatctacacacatggattagattcctagtatggcttgctgttggcttcattatctacttctcctacggaatccgacacagcgcagaaggagccaaagacaaaaaactgcgagaaatcgcagagcctccatcccctccagcaaaagaagtcacttcgttctgagaacgtccaccgccagaaattagaagaagactcaacgaaatagaagttgttgtttgattcgtgctactctagaagctgtgataaagagtgcctagcattttagtattccaagtgttagtattttttgacttttaggttgtaagaagtgagttacccgtggtagaagaataagggtttctaggtttgacaaaaattttgaacgattgaaatctttttatacgaattagttaaaaacttataaaaaaaacgtttttacaagtgaagggtacagggaaaaaaggaggaatgtcacttttgttgaatttttcagcagagcattttcaaagttataagactaatattattgatatattctgatggtacttttttatatcatatgtttggaaaatttactctgtgggaatacacaaaaacaatgtcttttcacttatttatgcgagattcacaactgacattctcctaattaaccggtaacaccatgacattcccccttcttctccttcttcttcttctttttgtatagatatgactctgtctgttttttcaatgtgcctctagtaagttttcgttccatcgttttcgtggtcttcccactgattatcttcctattggggaaccgtctctcgctgtcctactatcatatttgttgtcattcagcttatgcggtcattccattctattcttctgtttcttacccagttattaatgttatacaccttgcatctccgtcgtatatctgtacttctagctctgtcccatagagtcttaccatcgatttttcgaagggttttcatctccgctgtttcgagcaatctttttatcctctctgtgccagatcgtgtttctgccgcgtatgtcattattggtctgatgactgttttgtaaattctgcctttcatttcttttccgatatttttatttctccatattgtgttattcaggcaacctgtggctctgtttgctctattcacttgaacttccacttctgtgttgagccttccatagctagatagtgtgatgtttagatatataggcatcacactatggtcggtatagtataaataccgttgcacgtcattaactacgtcagagatcaagttgacattgttgccaaattacaagacaattgctgaactcttaaattaaatatatcacttaattattgcagaagtagatacaataaaacagattaatattaaatgtaaataaacaaaaacattataaatagaaaacaagaattaggtaataatcttccgttatagtaaataataaaaacaaatctgaagtgtcaataccgcaactgtcaaataaggctaccaatttataccaaaatgtcaccttcgttcgatcgcagttaaaatgtgatccggacaagaagtgtgcttcataaaaccgctttataatccatttatacaagttaaatgaaacaaagttatggtttatttctttatatttatatttctttatataccaactttctttgttccaaaggacttccaaagctaaacgattctaaaaaggaatagacctataacttaaatattttgtgttggtatcatgtgacgtcacttactatgacgcggatgacgtgcatcgggatttacactgtacgaaccataaattaccaaggcaatatctttgtgggccactgaaaacttcatcatatatttgtcattttttaaaattttttgaattttattccaatgggtatacattctcctccaccccattccagttacagaaatccttatttttttttaagtcactttccatttcctaaaaatatggaaacaaccgcaatattggtattaaaaattacttattgaaataaatcattgaattact

SEQ ID NO: 1296 - DNA, 3688 bp, Diabrotica virgifera
  SmartBlast Evalue=1E-168; Info=Cationic amino acid transporter n=1 Tax=Culex quinquefasciatus RepID=B0WAU0_CULQU
gtgggtggatcagtgatagtatttttctgcacagatggcttccagatttttttctgctctgacccgtaagaaatccaacgatgacgaagagagcgagagtccattagcgcgagttttgacactactagatctgacaactttgggagtaggagcaacattaggtttaggagtatacgttttagctggttcggtagcaaaggaggtagctggacctgctgtgtgtgtgtcgtttgcagtggcagctgtagcctcagccgttgcaggtctgtgttatgctgaatttgcagccagagttcctaaggcaggttctgcctatatatacagttacgtcagtgtaggagaatttgtggcctttgttattggatggaatcttattttagaatacattattggtactgccagtgttgctagtggtatgagcaactatatcgatgctctgataggtggccaaatcaaggagacactacgagaatggatgcccatggatatttctttcatgtccccatatccagactttctttccttcatttttgtgatgatattgacatttcttcttgcctttggagtaaaggaatcctcaaaactcaacaatgttttcaccgcagtaaacatggttaccatttttattgcaatcgttgcaggatctataaaggctgatgttggaaactggaaaattgatccagcaaaattaaacgagacagaaagggcgcatgcaggagagggtggattcatgccatttggcgtagctggaattatggcaggagcggcaaaatgtttctatggtttcgtaggttttgacgctgtcgctaccaccggggaagaagccaaaaatcctcaaaaggacattcctcttgccatcgtcatatcgttgttcattatttttgccgcctacttttctatttctaccgttttgacgatggctttgccttattatcaacaggataaagacgctccatttccttatctcttccattactacggatgggaatcgataaaatggatagttacgatcggtgccgtctttgccctctgtaccagtctcttgggagcgatgtttcccttacctagggttatttatgccatggctaatgacggtattgtctataaatcactatctaaagttagcgagaagacgaaaacacctatttttgccacgttgctttcgggattgttatcaggtattatgtcaatattgtttgacttagatcaattgattgatatgatgtccattggaacactaatggcatataccattgtagcagtatctgtactaatattgaggtatgaacccaagacatcggaatacccaggactatcaattaaaattgaaaaacagacatccgtagaaaatcacatgttgaacagtgtcaaaaatttatttaatcttcataatattaaagaaccctccaaggaatcatctgttattgttaactggtgtattgttttattcagtatattctgtgctcttttctgtgcaactgtagccaatggaagacagctcgtatttactcaaccattctacatactggcatttatcgttacaataattggcatggcagtattgatggtaattatggtacgacaaccagttgttgaagaaaaactatcatttaaggtaccattggttccctatataccgtgtattagtgtggttttcaatttatatttgatgtttgagctagatctacacacatggattagattcctagtatggcttgctgttggcttcattatctacttctcctacggaatccgacacagcgcagaaggagccaaagacaaaaaactgcgagaaatcgcagagcctccatcccctccagcaaaagaagtcacttcgttctgagaacgtccaccgccagaaattagaagaagactcaacgaaatagaagttgttgtttgattcgtgctactctagaagctgtgataaagagtgcctagcattttagtattccaagtgttagtattttttgacttttaggttgtaagaagtgagttacccgtggtagaagaataagggtttctaggtttgacaaaaattttgaacgattgaaatctttttatacgaattagttaaaaacttataaaaaaaacgtttttacaagtgaagggtacagggaaaaaaggaggaatgtcacttttgttgaatttttcagcagagcattttcaaagttataagactaatattattgatatattctgatggtacttttttatatcatatgtttggaaaatttactctgtgggaatacacaaaaacaatgtcttttcacttatttatgcgagattcacaactgacattctcctaattaaccggtaacaccatgacattcccccttcttctccttcttcttcttctttttgtatagatatgactctgtctgttttttcaatgtgcctctagtaagttttcgttccatcgttttcgtggtcttcccactgattatcttcctattggggaaccgtctctcgctgtcctactatcatatttgttgtcattcagcttatgcggtcattccattctattcttctgtttcttacccagttattaatgttatacaccttgcatctccgtcgtatatctgtacttctagctctgtcccatagagtcttaccatcgatttttcgaagggttttcatctccgctgtttcgagcaatctttttatcctctctgtgccagatcgtgtttctgccgcgtatgtcattattggtctgatgactgttttgtaaattctgcctttcatttcttttccgatatttttatttctccatattgtgttattcaggcaacctgtggctctgtttgctctattcacttgaacttccacttctgtgttgagccttccatagctagatagtgtgatgtttagatatataggcatcacactatggtcggtatagtataaataccgttgcacgtcattaactacgtcagagatcaagttgacattgttgccaaattacaagacaattgctgaactcttaaattaaatatatcacttaattattgcagaagtagatacaataaaacagattaatattaaatgtaaataaacaaaaacattataaatagaaaacaagaattaggtaataatcttccgttatagtaaataataaaaacaaatctgaagtgtcaataccgcaactgtcaaataaggctaccaatttataccaaaatgtcaccttcgttcgatcgcagttaaaatgtgatccggacaagaagtgtgcttcataaaaccgctttataatccatttatacaagttaaatgaaacaaagttatggtttatttctttatatttatatttctttatataccaactttctttgttccaaaggacttccaaagctaaacgattctaaaaaggaatagacctataacttaaatattttgtgttggtatcatgtgacgtcacttactatgacgcggatgacgtgcatcgggatttacactgtacgaaccataaattaccaaggcaatatctttgtgggccactgaaaacttcatcatatatttgtcattttttaaaattttttgaattttattccaatgggtatacattctcctccaccccattccagttacagaaatccttatttttttttaagtcactttccatttcctaaaaatatggaaacaaccgcaatattggtattaaaaattacttattgaaataaatcattgaattact

SEQ ID NO: 1297 - DNA, 3689 bp, Diabrotica virgifera
  SmartBlast Evalue=1E-168; Info=Cationic amino acid transporter n=1 Tax=Culex quinquefasciatus RepID=B0WAU0_CULQU
cgtgggtggatcagtgataatatttttctgcacagatggcttccagatttttttctgctctgacccgtaagaaatccaacgacgacgaagagagcgagagtccattagctcgagttctgacactactagatctcacaactttgggagtaggagccacattaggtttaggagtatatgttttagccggatctgtagcaaaggaggtagctggacctgctgtgtgtgtgtcgtttgcagtggcagctgtagcctcagccgttgcaggtctgtgttatgctgaatttgcagccagagttcctaaggcaggttctgcctatatatacagttacgtcagtgtaggagaatttgtggcctttgttattggatggaatcttattttagaatacattattggtactgccagtgttgctagtggtatgagcaactatatcgatgctctgataggtggccaaatcaaggagacactacgagaatggatgcccatggatatttctttcatgtccccatatccagactttctttccttcatttttgtgatgatattgacatttcttcttgcctttggagtaaaggaatcctcaaaactcaacaatgttttcaccgcagtaaacatggttaccatttttattgcaatcgttgcaggatctataaaggctgatgttggaaactggaaaattgatccagcaaaattaaacgagacagaaagggcgcatgcaggagagggtggattcatgccatttggcgtagctggaattatggcaggagcggcaaaatgtttctatggtttcgtaggttttgacgctgtcgctaccaccggggaagaagccaaaaatcctcaaaaggacattcctcttgccatcgtcatatcgttgttcattatttttgccgcctacttttctatttctaccgttttgacgatggctttgccttattatcaacaggataaagacgctccatttccttatctcttccattactacggatgggaatcgataaaatggatagttacgatcggtgccgtctttgccctctgtaccagtctcttgggagcgatgtttcccttacctagggttatttatgccatggctaatgacggtattgtctataaatcactatctaaagttagcgagaagacgaaaacacctatttttgccacgttgctttcgggattgttatcaggtattatgtcaatattgtttgacttagatcaattgattgatatgatgtccattggaacactaatggcatataccattgtagcagtatctgtactaatattgaggtatgaacccaagacatcggaatacccaggactatcaattaaaattgaaaaacagacatccgtagaaaatcacatgttgaacagtgtcaaaaatttatttaatcttcataatattaaagaaccctccaaggaatcatctgttattgttaactggtgtattgttttattcagtatattctgtgctcttttctgtgcaactgtagccaatggaagacagctcgtatttactcaaccattctacatactggcatttatcgttacaataattggcatggcagtattgatggtaattatggtacgacaaccagttgttgaagaaaaactatcatttaaggtaccattggttccctatataccgtgtattagtgtggttttcaatttatatttgatgtttgagctagatctacacacatggattagattcctagtatggcttgctgttggcttcattatctacttctcctacggaatccgacacagcgcagaaggagccaaagacaaaaaactgcgagaaatcgcagagcctccatcccctccagcaaaagaagtcacttcgttctgagaacgtccaccgccagaaattagaagaagactcaacgaaatagaagttgttgtttgattcgtgctactctagaagctgtgataaagagtgcctagcattttagtattccaagtgttagtattttttgacttttaggttgtaagaagtgagttacccgtggtagaagaataagggtttctaggtttgacaaaaattttgaacgattgaaatctttttatacgaattagttaaaaacttataaaaaaaacgtttttacaagtgaagggtacagggaaaaaaggaggaatgtcacttttgttgaatttttcagcagagcattttcaaagttataagactaatattattgatatattctgatggtacttttttatatcatatgtttggaaaatttactctgtgggaatacacaaaaacaatgtcttttcacttatttatgcgagattcacaactgacattctcctaattaaccggtaacaccatgacattcccccttcttctccttcttcttcttctttttgtatagatatgactctgtctgttttttcaatgtgcctctagtaagttttcgttccatcgttttcgtggtcttcccactgattatcttcctattggggaaccgtctctcgctgtcctactatcatatttgttgtcattcagcttatgcggtcattccattctattcttctgtttcttacccagttattaatgttatacaccttgcatctccgtcgtatatctgtacttctagctctgtcccatagagtcttaccatcgatttttcgaagggttttcatctccgctgtttcgagcaatctttttatcctctctgtgccagatcgtgtttctgccgcgtatgtcattattggtctgatgactgttttgtaaattctgcctttcatttcttttccgatatttttatttctccatattgtgttattcaggcaacctgtggctctgtttgctctattcacttgaacttccacttctgtgttgagccttccatagctagatagtgtgatgtttagatatataggcatcacactatggtcggtatagtataaataccgttgcacgtcattaactacgtcagagatcaagttgacattgttgccaaattacaagacaattgctgaactcttaaattaaatatatcacttaattattgcagaagtagatacaataaaacagattaatattaaatgtaaataaacaaaaacattataaatagaaaacaagaattaggtaataatcttccgttatagtaaataataaaaacaaatctgaagtgtcaataccgcaactgtcaaataaggctaccaatttataccaaaatgtcaccttcgttcgatcgcagttaaaatgtgatccggacaagaagtgtgcttcataaaaccgctttataatccatttatacaagttaaatgaaacaaagttatggtttatttctttatatttatatttctttatataccaactttctttgttccaaaggacttccaaagctaaacgattctaaaaaggaatagacctataacttaaatattttgtgttggtatcatgtgacgtcacttactatgacgcggatgacgtgcatcgggatttacactgtacgaaccataaattaccaaggcaatatctttgtgggccactgaaaacttcatcatatatttgtcattttttaaaattttttgaattttattccaatgggtatacattctcctccaccccattccagttacagaaatccttatttttttttaagtcactttccatttcctaaaaatatggaaacaaccgcaatattggtattaaaaattacttattgaaataaatcattgaattact

SEQ ID NO: 1298 - DNA, 3702 bp, Diabrotica virgifera
  SmartBlast Evalue=1E-168; Info=Cationic amino acid transporter n=1 Tax=Culex quinquefasciatus RepID=B0WAU0_CULQU
cgcgggtgtatgatcagtgatacctaatatttttctgcaaagatggcttccagatttttttctgctctgacccgtaagaaatccaacgatgacgaagagagcgagagtcccttagctcgagttctgacactactagatctgacaactttgggagtaggagccacattgggtttaggagtgtacgttttagccggctctgtagcaaaggaggtagctggacctgctgtgtgtgtgtcgtttgcagtggcagctgtagcctcagccgttgcaggtctgtgttatgctgaatttgcagccagagttcctaaggcaggttctgcctatatatacagttacgtcagtgtaggagaatttgtggcctttgttattggatggaatcttattttagaatacattattggtactgccagtgttgctagtggtatgagcaactatatcgatgctctgataggtggccaaatcaaggagacactacgagaatggatgcccatggatatttctttcatgtccccatatccagactttctttccttcatttttgtgatgatattgacatttcttcttgcctttggagtaaaggaatcctcaaaactcaacaatgttttcaccgcagtaaacatggttaccatttttattgcaatcgttgcaggatctataaaggctgatgttggaaactggaaaattgatccagcaaaattaaacgagacagaaagggcgcatgcaggagagggtggattcatgccatttggcgtagctggaattatggcaggagcggcaaaatgtttctatggtttcgtaggttttgacgctgtcgctaccaccggggaagaagccaaaaatcctcaaaaggacattcctcttgccatcgtcatatcgttgttcattatttttgccgcctacttttctatttctaccgttttgacgatggctttgccttattatcaacaggataaagacgctccatttccttatctcttccattactacggatgggaatcgataaaatggatagttacgatcggtgccgtctttgccctctgtaccagtctcttgggagcgatgtttcccttacctagggttatttatgccatggctaatgacggtattgtctataaatcactatctaaagttagcgagaagacgaaaacacctatttttgccacgttgctttcgggattgttatcaggtattatgtcaatattgtttgacttagatcaattgattgatatgatgtccattggaacactaatggcatataccattgtagcagtatctgtactaatattgaggtatgaacccaagacatcggaatacccaggactatcaattaaaattgaaaaacagacatccgtagaaaatcacatgttgaacagtgtcaaaaatttatttaatcttcataatattaaagaaccctccaaggaatcatctgttattgttaactggtgtattgttttattcagtatattctgtgctcttttctgtgcaactgtagccaatggaagacagctcgtatttactcaaccattctacatactggcatttatcgttacaataattggcatggcagtattgatggtaattatggtacgacaaccagttgttgaagaaaaactatcatttaaggtaccattggttccctatataccgtgtattagtgtggttttcaatttatatttgatgtttgagctagatctacacacatggattagattcctagtatggcttgctgttggcttcattatctacttctcctacggaatccgacacagcgcagaaggagccaaagacaaaaaactgcgagaaatcgcagagcctccatcccctccagcaaaagaagtcacttcgttctgagaacgtccaccgccagaaattagaagaagactcaacgaaatagaagttgttgtttgattcgtgctactctagaagctgtgataaagagtgcctagcattttagtattccaagtgttagtattttttgacttttaggttgtaagaagtgagttacccgtggtagaagaataagggtttctaggtttgacaaaaattttgaacgattgaaatcatgttatacgaattagtcaaaaacttataaaaaaaaaacgtttttgcaagtgaagggtacagggaaaaaaggaggaatgtcacttttgttgaatttttcagcagagcattttcaaagttataagactaatattattgatatattttaatggtactttttttttaaatcatatgtttggaaaatttactctgtgggaatacacaaaaacaatgtgttttcacttatttctgcgagattcacaactgacaatctcctaattagccggtaacaccgtgacattcccccttcttctccttcttcttcttatttttgtatagatatgactctgtctgttttttcaatgtgcctctagtaagttgtcgttccatcgttttcgtggtcttcccactgattgtcttcctattggggaaccgtctctcgctgtcctgactatcatatttgttgtcattcagcttatgcggtcattccattctattcttctgtttcttacccagttattattgttatacaccttgcatctccgtcgtatatctgtacttctagctctgtcccatagagtcttaccatcgatttttcgaagggttttcatctccgctgtttcgagcaatctttttatcctctctgtgccagatcgtgtttctgccgcgtatgtcattattggtctgatgactgttttgtaaattctgcctttcatttcttttccgatatttttatttctccatattgtgttattcaggcaacctgtggctctgtttgctctattcacttgaacttccacttctgtgttgagccttccatagctagatagtgtgatgtttagatatataggcatcacactatggtcggtatagtataaataccgttgcacgtcattaactacgtcagagatcaagttgacattgttgccaaattacaagacaattgctgaactcttaaattaaatatatcacttaattattgcagaagtagatacaataaaacagattaatattaaatgtaaataaacaaaaacattataaatagaaaacaagaattaggtaataatcttccgttatagtaaataataaaaacaaatctgaagtgtcaataccgcaactgtcaaataaggctaccaatttataccaaaatgtcaccttcgttcgatcgcagttaaaatgtgatccggacaagaagtgtgcttcataaaaccgctttataatccatttatacaagttaaatgaaacaaagttatggtttatttctttatatttatatttctttatataccaactttctttgttccaaaggacttccaaagctaaacgattctaaaaaggaatagacctataacttaaatattttgtgttggtatcatgtgacgtcacttactatgacgcggatgacgtgcatcgggatttacactgtacgaaccataaattaccaaggcaatatctttgtgggccactgaaaacttcatcatatatttgtcattttttaaaattttttgaattttattccaatgggtatacattctcctccaccccattccagttacagaaatccttatttttttttaagtcactttccatttcctaaaaatatggaaacaaccgcaatattggtattaaaaattacttattgaaataaatcattgaattact

SEQ ID NO: 1299 - DNA, 3694 bp, Diabrotica virgifera
  SmartBlast Evalue=1E-168; Info=Cationic amino acid transporter n=1 Tax=Culex quinquefasciatus RepID=B0WAU0_CULQU
gtgggtggatcagtgatagtatttttctgcacagatggcttccagatttttttctgctctgacccgtaagaaatccaacgatgacgaagagagcgagagtccattagcgcgagttttgacactactagatctgacaactttgggagtaggagcaacattaggtttaggagtatacgttttagctggttcggtagcaaaggaggtagctggacctgctgtgtgtgtgtcgtttgcagtggcagctgtagcctcagccgttgcaggtctgtgttatgctgaatttgcagccagagttcctaaggcaggttctgcctatatatacagttacgtcagtgtaggagaatttgtggcctttgttattggatggaatcttattttagaatacattattggtactgccagtgttgctagtggtatgagcaactatatcgatgctctgataggtggccaaatcaaggagacactacgagaatggatgcccatggatatttctttcatgtccccatatccagactttctttccttcatttttgtgatgatattgacatttcttcttgcctttggagtaaaggaatcctcaaaactcaacaatgttttcaccgcagtaaacatggttaccatttttattgcaatcgttgcaggatctataaaggctgatgttggaaactggaaaattgatccagcaaaattaaacgagacagaaagggcgcatgcaggagagggtggattcatgccatttggcgtagctggaattatggcaggagcggcaaaatgtttctatggtttcgtaggttttgacgctgtcgctaccaccggggaagaagccaaaaatcctcaaaaggacattcctcttgccatcgtcatatcgttgttcattatttttgccgcctacttttctatttctaccgttttgacgatggctttgccttattatcaacaggataaagacgctccatttccttatctcttccattactacggatgggaatcgataaaatggatagttacgatcggtgccgtctttgccctctgtaccagtctcttgggagcgatgtttcccttacctagggttatttatgccatggctaatgacggtattgtctataaatcactatctaaagttagcgagaagacgaaaacacctatttttgccacgttgctttcgggattgttatcaggtattatgtcaatattgtttgacttagatcaattgattgatatgatgtccattggaacactaatggcatataccattgtagcagtatctgtactaatattgaggtatgaacccaagacatcggaatacccaggactatcaattaaaattgaaaaacagacatccgtagaaaatcacatgttgaacagtgtcaaaaatttatttaatcttcataatattaaagaaccctccaaggaatcatctgttattgttaactggtgtattgttttattcagtatattctgtgctcttttctgtgcaactgtagccaatggaagacagctcgtatttactcaaccattctacatactggcatttatcgttacaataattggcatggcagtattgatggtaattatggtacgacaaccagttgttgaagaaaaactatcatttaaggtaccattggttccctatataccgtgtattagtgtggttttcaatttatatttgatgtttgagctagatctacacacatggattagattcctagtatggcttgctgttggcttcattatctacttctcctacggaatccgacacagcgcagaaggagccaaagacaaaaaactgcgagaaatcgcagagcctccatcccctccagcaaaagaagtcacttcgttctgagaacgtccaccgccagaaattagaagaagactcaacgaaatagaagttgttgtttgattcgtgctactctagaagctgtgataaagagtgcctagcattttagtattccaagtgttagtattttttgacttttaggttgtaagaagtgagttacccgtggtagaagaataagggtttctaggtttgacaaaaattttgaacgattgaaatcatgttatacgaattagtcaaaaacttataaaaaaaaaacgtttttgcaagtgaagggtacagggaaaaaaggaggaatgtcacttttgttgaatttttcagcagagcattttcaaagttataagactaatattattgatatattttaatggtactttttttttaaatcatatgtttggaaaatttactctgtgggaatacacaaaaacaatgtgttttcacttatttctgcgagattcacaactgacaatctcctaattagccggtaacaccgtgacattcccccttcttctccttcttcttcttatttttgtatagatatgactctgtctgttttttcaatgtgcctctagtaagttgtcgttccatcgttttcgtggtcttcccactgattgtcttcctattggggaaccgtctctcgctgtcctgactatcatatttgttgtcattcagcttatgcggtcattccattctattcttctgtttcttacccagttattattgttatacaccttgcatctccgtcgtatatctgtacttctagctctgtcccatagagtcttaccatcgatttttcgaagggttttcatctccgctgtttcgagcaatctttttatcctctctgtgccagatcgtgtttctgccgcgtatgtcattattggtctgatgactgttttgtaaattctgcctttcatttcttttccgatatttttatttctccatattgtgttattcaggcaacctgtggctctgtttgctctattcacttgaacttccacttctgtgttgagccttccatagctagatagtgtgatgtttagatatataggcatcacactatggtcggtatagtataaataccgttgcacgtcattaactacgtcagagatcaagttgacattgttgccaaattacaagacaattgctgaactcttaaattaaatatatcacttaattattgcagaagtagatacaataaaacagattaatattaaatgtaaataaacaaaaacattataaatagaaaacaagaattaggtaataatcttccgttatagtaaataataaaaacaaatctgaagtgtcaataccgcaactgtcaaataaggctaccaatttataccaaaatgtcaccttcgttcgatcgcagttaaaatgtgatccggacaagaagtgtgcttcataaaaccgctttataatccatttatacaagttaaatgaaacaaagttatggtttatttctttatatttatatttctttatataccaactttctttgttccaaaggacttccaaagctaaacgattctaaaaaggaatagacctataacttaaatattttgtgttggtatcatgtgacgtcacttactatgacgcggatgacgtgcatcgggatttacactgtacgaaccataaattaccaaggcaatatctttgtgggccactgaaaacttcatcatatatttgtcattttttaaaattttttgaattttattccaatgggtatacattctcctccaccccattccagttacagaaatccttatttttttttaagtcactttccatttcctaaaaatatggaaacaaccgcaatattggtattaaaaattacttattgaaataaatcattgaattact

SEQ ID NO: 1300 - DNA, 3695 bp, Diabrotica virgifera
  SmartBlast Evalue=1E-168; Info=Cationic amino acid transporter n=1 Tax=Culex quinquefasciatus RepID=B0WAU0_CULQU
cgtgggtggatcagtgataatatttttctgcacagatggcttccagatttttttctgctctgacccgtaagaaatccaacgacgacgaagagagcgagagtccattagctcgagttctgacactactagatctcacaactttgggagtaggagccacattaggtttaggagtatatgttttagccggatctgtagcaaaggaggtagctggacctgctgtgtgtgtgtcgtttgcagtggcagctgtagcctcagccgttgcaggtctgtgttatgctgaatttgcagccagagttcctaaggcaggttctgcctatatatacagttacgtcagtgtaggagaatttgtggcctttgttattggatggaatcttattttagaatacattattggtactgccagtgttgctagtggtatgagcaactatatcgatgctctgataggtggccaaatcaaggagacactacgagaatggatgcccatggatatttctttcatgtccccatatccagactttctttccttcatttttgtgatgatattgacatttcttcttgcctttggagtaaaggaatcctcaaaactcaacaatgttttcaccgcagtaaacatggttaccatttttattgcaatcgttgcaggatctataaaggctgatgttggaaactggaaaattgatccagcaaaattaaacgagacagaaagggcgcatgcaggagagggtggattcatgccatttggcgtagctggaattatggcaggagcggcaaaatgtttctatggtttcgtaggttttgacgctgtcgctaccaccggggaagaagccaaaaatcctcaaaaggacattcctcttgccatcgtcatatcgttgttcattatttttgccgcctacttttctatttctaccgttttgacgatggctttgccttattatcaacaggataaagacgctccatttccttatctcttccattactacggatgggaatcgataaaatggatagttacgatcggtgccgtctttgccctctgtaccagtctcttgggagcgatgtttcccttacctagggttatttatgccatggctaatgacggtattgtctataaatcactatctaaagttagcgagaagacgaaaacacctatttttgccacgttgctttcgggattgttatcaggtattatgtcaatattgtttgacttagatcaattgattgatatgatgtccattggaacactaatggcatataccattgtagcagtatctgtactaatattgaggtatgaacccaagacatcggaatacccaggactatcaattaaaattgaaaaacagacatccgtagaaaatcacatgttgaacagtgtcaaaaatttatttaatcttcataatattaaagaaccctccaaggaatcatctgttattgttaactggtgtattgttttattcagtatattctgtgctcttttctgtgcaactgtagccaatggaagacagctcgtatttactcaaccattctacatactggcatttatcgttacaataattggcatggcagtattgatggtaattatggtacgacaaccagttgttgaagaaaaactatcatttaaggtaccattggttccctatataccgtgtattagtgtggttttcaatttatatttgatgtttgagctagatctacacacatggattagattcctagtatggcttgctgttggcttcattatctacttctcctacggaatccgacacagcgcagaaggagccaaagacaaaaaactgcgagaaatcgcagagcctccatcccctccagcaaaagaagtcacttcgttctgagaacgtccaccgccagaaattagaagaagactcaacgaaatagaagttgttgtttgattcgtgctactctagaagctgtgataaagagtgcctagcattttagtattccaagtgttagtattttttgacttttaggttgtaagaagtgagttacccgtggtagaagaataagggtttctaggtttgacaaaaattttgaacgattgaaatcatgttatacgaattagtcaaaaacttataaaaaaaaaacgtttttgcaagtgaagggtacagggaaaaaaggaggaatgtcacttttgttgaatttttcagcagagcattttcaaagttataagactaatattattgatatattttaatggtactttttttttaaatcatatgtttggaaaatttactctgtgggaatacacaaaaacaatgtgttttcacttatttctgcgagattcacaactgacaatctcctaattagccggtaacaccgtgacattcccccttcttctccttcttcttcttatttttgtatagatatgactctgtctgttttttcaatgtgcctctagtaagttgtcgttccatcgttttcgtggtcttcccactgattgtcttcctattggggaaccgtctctcgctgtcctgactatcatatttgttgtcattcagcttatgcggtcattccattctattcttctgtttcttacccagttattattgttatacaccttgcatctccgtcgtatatctgtacttctagctctgtcccatagagtcttaccatcgatttttcgaagggttttcatctccgctgtttcgagcaatctttttatcctctctgtgccagatcgtgtttctgccgcgtatgtcattattggtctgatgactgttttgtaaattctgcctttcatttcttttccgatatttttatttctccatattgtgttattcaggcaacctgtggctctgtttgctctattcacttgaacttccacttctgtgttgagccttccatagctagatagtgtgatgtttagatatataggcatcacactatggtcggtatagtataaataccgttgcacgtcattaactacgtcagagatcaagttgacattgttgccaaattacaagacaattgctgaactcttaaattaaatatatcacttaattattgcagaagtagatacaataaaacagattaatattaaatgtaaataaacaaaaacattataaatagaaaacaagaattaggtaataatcttccgttatagtaaataataaaaacaaatctgaagtgtcaataccgcaactgtcaaataaggctaccaatttataccaaaatgtcaccttcgttcgatcgcagttaaaatgtgatccggacaagaagtgtgcttcataaaaccgctttataatccatttatacaagttaaatgaaacaaagttatggtttatttctttatatttatatttctttatataccaactttctttgttccaaaggacttccaaagctaaacgattctaaaaaggaatagacctataacttaaatattttgtgttggtatcatgtgacgtcacttactatgacgcggatgacgtgcatcgggatttacactgtacgaaccataaattaccaaggcaatatctttgtgggccactgaaaacttcatcatatatttgtcattttttaaaattttttgaattttattccaatgggtatacattctcctccaccccattccagttacagaaatccttatttttttttaagtcactttccatttcctaaaaatatggaaacaaccgcaatattggtattaaaaattacttattgaaataaatcattgaattact

SEQ ID NO: 1301 - DNA, 912 bp, Diabrotica virgifera
gtcgcctataataaataatgcaatctacacgaaaacagtcagcgtgaaggcacagaagacccacacaccaactaactatcaacctaaagagtgaagagagcaatatgaaaaggtagtcacacaataggaaacgaaacgaaacgagttgatatgcactgacagtaatttttttcacaggtacttatcccagatggagtaaccgcgatttctgcgcactgagtccgtgcaccgtgaggcacagcttggtggatagatccttagggtaagaacagaacaagtgggtcgaggtggaggtgtaggtcgcggtggatgccactagttaggtcgcggtcgatgtcgacagcacatagcaaggaggtcacctgcgctgtcagtcgagctagaaccactatcaagtgaagtagtttaatgaaatttgaagaaattcaaaaataaactgaatacaaaaaagggattatataaaaagtatcaactcagatagcgcaggtaatgacaacttggcttcgaacggacaatacagggaagcatccttgtaggccgcgcagtagacatccatgtaaaacaaactcattttattttcaaaagcatcgatgtaaacctcctggatggcatcgcgctaaacctccaccgcgacttacctgctctgttcttttccattcactacaatgtgtttgttttacatggatatcgaccgcgacctccacggcgacccacttggtctgttcttacccttagaacgaaagattctccggtcgatctttggggcttgtagagacgagataacaggagagtggagacgaaaacacaaccagggactggggtgctctatggaaacgaaaacagtataatacatcaaggcaaatcgcataagatggtcaggaagacatgtactgagagcaaatgatgaaatac

SEQ ID NO: 1302 - DNA, 870 bp, Diabrotica virgifera
gtcgcctataataaataatgcaatctacacgaaaacagtcagcgtgaaggcacagaagacccacacaccaactaactatcaacctaaagagtgaagagagcaatatgaaaaggtagtcacacaataggaaacgaaacgaaacgagttgatatgcactgacagtaatttttttcacaggtacttatcccagatggagtaaccgcgatttctgcgcactgagtccgtgcaccgtgaggcacagcttggtggatagatccttagggtaagaacagaacaagtgggtcgaggtggaggtgtaggtcgcggtggatgccactagttaggtcgcggtcgatgtcgacagcacatagcaaggaggtcacctgcgctgtcagtcgagctagaaccactatcaagtgaagtagtttaatgaaatttgaagaaattcaaaaataaactgaatacaaaaaagggattatataaaaagtatcaactcagatagcgcaggtaatgacaacttggcttcgaacggacaatacagggaagcatccttgtaggccgcgcagtagacatccatgtaaaacaaactcattttattttcaaaagcatcgatgtaaacctcctggatggcatcgcgctaaacctccaccgcgacttacttgttctgttcttacccttagttagagtatggagcagcaggcctacgtctctccgatgagacaccaataagagtcgaaaatcgtcgattcagagtgctggactgcgctccgtattctaagtgaaaaataagattgttttgccgtcgcattgcaactgaataaaaatggtatacatttttatttttaaaaactgtattactttatcggcattcccacagcagtctcgaactcg

SEQ ID NO: 1303 - DNA, 603 bp, Diabrotica virgifera
gtcgcctataataaataatgcaatctacacgaaaacagtcagcgtgaaggcacagaagacccacacaccaactaactatcaacctaaagagtgaagagagcaatatgaaaaggtagtcacacaataggaaacgaaacgaaacgagttgatatgcactgacagtaatttttttcacaggtacttatcccagatggagtaaccgcgatttctgcgcactgagtccgtgcaccgtgaggcacagcttggtggatagatccttagggtaagaacagaacaagtgggtcgaggtggaggtgtaggtcgcggtggatgccactagttaggtcgcggtcgatgtcgacagcacatagcaaggaggtcacctgcgctgtcagtcgagctagaaccactatcaagtgaagtagtttaatgaaatttgaagaaattcaaaaataaactgaatacaaaaaagggattatataaaaagtatcaacttagatagcgcaggtaatgacaacttggcttcaaacggaccaattacagggaaacatccttgtaggccgcgcagtagacatccatgtaaaacaacctcatcgatgtaaacctcctgaatggcatcgcgct

SEQ ID NO: 1304 - DNA, 492 bp, Diabrotica virgifera
ccgttagtagcaaatagattcgctgcccagagggcaaaggtacctacttagcttttgctatgaagttttaccctttttggaatctggccagggaaattggccgtaaagtcaacgaagataagaccaagtccgtggtagttaccaaaaatccaggacaaaacatttcaataaatgaattcaatttcgaagttgtcaaagaattcaaatacttggaagcagtgatgatagccgaaaacagttatgaaaaagcatgaattagcagctgaacactgatccagcatgaaacaactattattagcctaaggggaagaacagaacgaaagattctccggtcgatctttggggcttgtagagacgagataacaggagagtggagacgaaaacacaaccagggactggggtgctctatggaaacgaaaacagtataatacatcaaggcaaatcgcataagatggtcaggaagacatgtactgagagcaaatgatgaaatac

SEQ ID NO: 1305 - DNA, 5137 bp, Diabrotica virgifera
  SmartBlast Evalue=3E-11; Info="Polyprotein, putative n=1 Tax= Solanum demissum RepID=Q6L4B3_SOLDE"
catactaaattttattattacaatatcaactaaaacagtacttactagaagaatagtccatattctcttaaatttagtaaaaaatgatactttacacaagccgtttgggagtaattatttaattattcaatacgcatcatgacaaaagtaaaataaatatacctatcacatcaaaaaaaaaagaagaaaacgaaagatataggttatagtgattcaaaaaacaaagcttttatcgtatcattgaaatacatatttctggatgtgtaagaaattgtttattcatttactttaggtttattgtaacaaaattcgaaacttcaaaacctccaaaatcatttgcttgtgccccaaactcttctttagagtaatgtttgattctataaacttcttaatgagtccaattaggtcactaattgaaatattaacaaaacatccatgttctataaaactcagcttcaatttcaaagtatatacaagtaaaagtagtgttttaagaatcatatgtaggatagcacaaaagccttctacacagtacgaattgcacgaatagaaactattttgataattcacaagtatataatatgacaacagtagaaaaactgtaggaataaaatgggccgaaactaccaaaaattttccggaagttttttaatcacaagcacaatctcaaattcaaaaattttaaaggtagggcccatttcatagaccaagtagtgtttatacttaatgatgagttaaaaggcgtgtcatttcatttttgcaatttttcagattagatgatttgtatatctgacaaagttaaaactgtcgattaaattagcgtcttttgtgtcattagctgccaattaacgatcaaaattgcacaaatgatgtaaacgaacacttatatgattcatttacaatcaaatatggatcttgtgtaaaaaaataagtattcacaactaatcaaattattaaaaatatctaattaggcacaacattaataaattgctgtttaaattctaaagagaattttcttacactttagagctctctgacgatatgaataaaacaaatccgttgttctttggtttatttcccagtataataatatcgtatggcatttttgccggggagatcctttgggattgttccgacgccaattgcatctttagtagctagtgtcgagggaacaacggctttacgtgccctccgaagcacggtatcagttttagaaatgaaaatgtcgtcttggtgtcgagattcgaactcgtacggaagaactagtagaaggccaatattttgccgctgagctacgtccatccacaatattttctactgagctgagatctctaatccatgatagtatcttatattacagcatgtttcctttgaagacttcacaatatatcagtaggattatcttcatgagagaaagtttaaacagcacttaaaaataatcagcctcgatgttgaaagacatgctttatacatgtacttattgcttatgaacccatttctttggaagtcttggtttatgtactgattgcagctcgatgctgatttctctatttcgttcatctcaccaattgagttcaaaaacaacactgctgattactggatgaaaacgcataagttctattgttacttcctgcactatctcgaagattgggaacactacatgctttattgatatcctcttaaaagttcacgggtaaatctctgaaatgtataattttgataaagttatccgatttttattctgtttatattgtcaactaccttaaaatatacccaagatctatatttgattgtatttgaaatacccaatgatattttgtctttttttattgtctgaaaaaaataagtagaatacaaaaatttggcaaccataaaacgttaagagccgtgtccagaaaaatgaaatatatttctattttaatattaatacagagtgttcataggcttcttataattttcatattttttagaacctcgttcacaatataaaaaaatttaaatgttcatgtatactctttgatcacattgttttctcactatactaattttcctaatacgtttgatatttctacaacaccctgtattaccgaatatcgttcagtaaaacatttcattaactagtaacagaaagtttcagatcttacaatttacacgaaataataaaatattgacagataaatcagtactgtttcttcttacacgctataaaattcgacatttctttttcttcttcacgtcttctaccttaatggtcaggagcttttgacaaaaatttatctgggtttctttgttgttgaatattattcctaagtatgtagtcagttacacatatcatgtacgaattagtggatgtgttgcaattatcaaatattttacacagaaagggaataagatttctttttattattcgaatacttattttggatacccattgtacgatagacattgcgtgtaataaaaaatgccaaagttgaatacatttttcattcttctaattcctccgttagtcctaaatgatcaagcaatcactaaaatgagattttttaaacaactaatatttcaagtacattgtgctatagaattcgcttccgtcataaacgacagaaatatagacaagtgtataattgtatttttacacgaaaccattccctttgtattagaagattcctacattctttctgagactcaaattccaaaaactttttgatacacccttcgtttttatgttgtcttacattgtggtttacagctttattaacaactgtagttaccactcattgtgattcaaactctacatcatcaaggacattatataattcaaactgctactggcaaacagcgagcacgcctcagtagacttgaacatgtctgtgcctgcttatgcttttccgaacctgagttcgatgggtatagataaatgtcgctcaatcttgctcataaatccttgagtagtctcgttggaaaataccattgcggggccccttgaaacgatcgaagacgattacttggccactctcaacatcaagaacatacaacatttaaaaaattgtaaactgatccacaaaaatcgagatcttcaggaattaggaataaccaagatgcgaagtccccgcttcagagcaaaaggattcgagcatgattggattacacatcgtattcgcccgatttggatccctgtgatttttggattatcagcaaaaatcgagctcttcaggaattaggaagtgcccgtaaaaaatttggaagaaccactaataatacgaagttctcactccagagcaagaggaatcaagaatgattgaatcactcaccatattcgcccgacctggacccctgccaaaatgagagagcataggttgagatggtttggtcatgttcaacgtcgagacgttaatcacccaatacgaagaattgctgaagtgcagattcctaagagtaggagaggaagaccaaagaagacatggggggagacgattaggcaggacatgttggtaaaggggattaatattgatatgacccaagatagaattatgtgaaaaatgtaattagggaagccgaccccgcatagggataaggcaaggagaatgatgatgatatttgatagtgtggaggctgacagagcggacttccagcactgctttcggagaaaataatggaaaattcggagcgtcgtagagaccggcaaggacagtacattataatgtaattgatgtatcagttcgattatttaattgccacacctcgtatatatcacgcatttcttctttgtatagatatcagaccgaggtagtactaacaactttatgataaaagaagataatagaatatatttaaataatttttctgtctggtatagttttatcattttacatgcggttcagcctgaaagaatatccccaggaaataccgaaagttcgtttaaatatcatatcactgttttaaccctatcacctttattgttgatattatttcattaatgaaatgaaacggcaaaaataccctccgctactatgactcttataactactttgttttcattgtataggaaaatggaaactccatattaatacacacaaataaccaaggccaaagtgtttctgctagtgtatgtttgctaaaggcagaaacgcattagggcgaggcctcattagcacgttgcgttgtgacattgcgaggcctcattagcacgttgcgttgcgacgttgcaacggaacatcgcagaacacccttgtccgtcgatccgttgagacatcgcaactgatcaacgcgactcagagcaacgcattgatggggcctcgtcccgatccgttgttccgttgcgacgtcgcaacgcaacgcagcgcactaatggggtctcgctattagggtaagaacagaacaagtgggtcgaggtggaggtgtaggtcgcggtggatgctactagttaagtcgcggtcgatgtcgacagcacatagcaaggaggtcacctgcgctgtcattcgagctagaatcactatcaagtgaagtagtttaatgaaatttgaatgacaaaactgtgcttttgcgatgttgtgtcaggcaagtgatgatagtgatgaaatttcagctgtaaataatcagatcctccttcatatttcaaaaatttactgaatttaattactttagaaattcaaaaataaactgaatacaaaaaagggattatataaaaagtatcaactcagatagcgcaggtaatgacaacttggcttcgaacggaccaatcacagggaagcatccttgtaggccgcgcagtagacatccatgtaaaacaaactcattttattttcaaaagcatcgatgtaaacctcctggatggcatcgcgctaaacctccaccgcgacttacctgctctgttcttttccattcactacaatgtgtttgttttacatggatatcgaccgcgacctccacggcgacccacttggtctgttcttacccttagaacgaaagattctccggtcgatctttggggcttgtagagacgagataacaggagagtggagacgaaaacacaaccagggactggggtgctctatggaaacgaaaacagtataatacatcaaggcaaatcgcataagatggtcaggaagacatgtactgagagcaaatgatgaaatac

SEQ ID NO: 1306 - DNA, 5095 bp, Diabrotica virgifera
  SmartBlast Evalue=3E-11; Info="Polyprotein, putative n=1 Tax= Solanum demissum RepID=Q6L4B3_SOLDE"
catactaaattttattattacaatatcaactaaaacagtacttactagaagaatagtccatattctcttaaatttagtaaaaaatgatactttacacaagccgtttgggagtaattatttaattattcaatacgcatcatgacaaaagtaaaataaatatacctatcacatcaaaaaaaaaagaagaaaacgaaagatataggttatagtgattcaaaaaacaaagcttttatcgtatcattgaaatacatatttctggatgtgtaagaaattgtttattcatttactttaggtttattgtaacaaaattcgaaacttcaaaacctccaaaatcatttgcttgtgccccaaactcttctttagagtaatgtttgattctataaacttcttaatgagtccaattaggtcactaattgaaatattaacaaaacatccatgttctataaaactcagcttcaatttcaaagtatatacaagtaaaagtagtgttttaagaatcatatgtaggatagcacaaaagccttctacacagtacgaattgcacgaatagaaactattttgataattcacaagtatataatatgacaacagtagaaaaactgtaggaataaaatgggccgaaactaccaaaaattttccggaagttttttaatcacaagcacaatctcaaattcaaaaattttaaaggtagggcccatttcatagaccaagtagtgtttatacttaatgatgagttaaaaggcgtgtcatttcatttttgcaatttttcagattagatgatttgtatatctgacaaagttaaaactgtcgattaaattagcgtcttttgtgtcattagctgccaattaacgatcaaaattgcacaaatgatgtaaacgaacacttatatgattcatttacaatcaaatatggatcttgtgtaaaaaaataagtattcacaactaatcaaattattaaaaatatctaattaggcacaacattaataaattgctgtttaaattctaaagagaattttcttacactttagagctctctgacgatatgaataaaacaaatccgttgttctttggtttatttcccagtataataatatcgtatggcatttttgccggggagatcctttgggattgttccgacgccaattgcatctttagtagctagtgtcgagggaacaacggctttacgtgccctccgaagcacggtatcagttttagaaatgaaaatgtcgtcttggtgtcgagattcgaactcgtacggaagaactagtagaaggccaatattttgccgctgagctacgtccatccacaatattttctactgagctgagatctctaatccatgatagtatcttatattacagcatgtttcctttgaagacttcacaatatatcagtaggattatcttcatgagagaaagtttaaacagcacttaaaaataatcagcctcgatgttgaaagacatgctttatacatgtacttattgcttatgaacccatttctttggaagtcttggtttatgtactgattgcagctcgatgctgatttctctatttcgttcatctcaccaattgagttcaaaaacaacactgctgattactggatgaaaacgcataagttctattgttacttcctgcactatctcgaagattgggaacactacatgctttattgatatcctcttaaaagttcacgggtaaatctctgaaatgtataattttgataaagttatccgatttttattctgtttatattgtcaactaccttaaaatatacccaagatctatatttgattgtatttgaaatacccaatgatattttgtctttttttattgtctgaaaaaaataagtagaatacaaaaatttggcaaccataaaacgttaagagccgtgtccagaaaaatgaaatatatttctattttaatattaatacagagtgttcataggcttcttataattttcatattttttagaacctcgttcacaatataaaaaaatttaaatgttcatgtatactctttgatcacattgttttctcactatactaattttcctaatacgtttgatatttctacaacaccctgtattaccgaatatcgttcagtaaaacatttcattaactagtaacagaaagtttcagatcttacaatttacacgaaataataaaatattgacagataaatcagtactgtttcttcttacacgctataaaattcgacatttctttttcttcttcacgtcttctaccttaatggtcaggagcttttgacaaaaatttatctgggtttctttgttgttgaatattattcctaagtatgtagtcagttacacatatcatgtacgaattagtggatgtgttgcaattatcaaatattttacacagaaagggaataagatttctttttattattcgaatacttattttggatacccattgtacgatagacattgcgtgtaataaaaaatgccaaagttgaatacatttttcattcttctaattcctccgttagtcctaaatgatcaagcaatcactaaaatgagattttttaaacaactaatatttcaagtacattgtgctatagaattcgcttccgtcataaacgacagaaatatagacaagtgtataattgtatttttacacgaaaccattccctttgtattagaagattcctacattctttctgagactcaaattccaaaaactttttgatacacccttcgtttttatgttgtcttacattgtggtttacagctttattaacaactgtagttaccactcattgtgattcaaactctacatcatcaaggacattatataattcaaactgctactggcaaacagcgagcacgcctcagtagacttgaacatgtctgtgcctgcttatgcttttccgaacctgagttcgatgggtatagataaatgtcgctcaatcttgctcataaatccttgagtagtctcgttggaaaataccattgcggggccccttgaaacgatcgaagacgattacttggccactctcaacatcaagaacatacaacatttaaaaaattgtaaactgatccacaaaaatcgagatcttcaggaattaggaataaccaagatgcgaagtccccgcttcagagcaaaaggattcgagcatgattggattacacatcgtattcgcccgatttggatccctgtgatttttggattatcagcaaaaatcgagctcttcaggaattaggaagtgcccgtaaaaaatttggaagaaccactaataatacgaagttctcactccagagcaagaggaatcaagaatgattgaatcactcaccatattcgcccgacctggacccctgccaaaatgagagagcataggttgagatggtttggtcatgttcaacgtcgagacgttaatcacccaatacgaagaattgctgaagtgcagattcctaagagtaggagaggaagaccaaagaagacatggggggagacgattaggcaggacatgttggtaaaggggattaatattgatatgacccaagatagaattatgtgaaaaatgtaattagggaagccgaccccgcatagggataaggcaaggagaatgatgatgatatttgatagtgtggaggctgacagagcggacttccagcactgctttcggagaaaataatggaaaattcggagcgtcgtagagaccggcaaggacagtacattataatgtaattgatgtatcagttcgattatttaattgccacacctcgtatatatcacgcatttcttctttgtatagatatcagaccgaggtagtactaacaactttatgataaaagaagataatagaatatatttaaataatttttctgtctggtatagttttatcattttacatgcggttcagcctgaaagaatatccccaggaaataccgaaagttcgtttaaatatcatatcactgttttaaccctatcacctttattgttgatattatttcattaatgaaatgaaacggcaaaaataccctccgctactatgactcttataactactttgttttcattgtataggaaaatggaaactccatattaatacacacaaataaccaaggccaaagtgtttctgctagtgtatgtttgctaaaggcagaaacgcattagggcgaggcctcattagcacgttgcgttgtgacattgcgaggcctcattagcacgttgcgttgcgacgttgcaacggaacatcgcagaacacccttgtccgtcgatccgttgagacatcgcaactgatcaacgcgactcagagcaacgcattgatggggcctcgtcccgatccgttgttccgttgcgacgtcgcaacgcaacgcagcgcactaatggggtctcgctattagggtaagaacagaacaagtgggtcgaggtggaggtgtaggtcgcggtggatgctactagttaagtcgcggtcgatgtcgacagcacatagcaaggaggtcacctgcgctgtcattcgagctagaatcactatcaagtgaagtagtttaatgaaatttgaatgacaaaactgtgcttttgcgatgttgtgtcaggcaagtgatgatagtgatgaaatttcagctgtaaataatcagatcctccttcatatttcaaaaatttactgaatttaattactttagaaattcaaaaataaactgaatacaaaaaagggattatataaaaagtatcaactcagatagcgcaggtaatgacaacttggcttcgaacggaccaatcacagggaagcatccttgtaggccgcgcagtagacatccatgtaaaacaaactcattttattttcaaaagcatcgatgtaaacctcctggatggcatcgcgctaaacctccaccgcgacttacttgttctgttcttacccttagttagagtatggagcagcaggcctacgtctctccgatgagacaccaataagagtcgaaaatcgtcgattcagagtgctggactgcgctccgtattctaagtgaaaaataagattgttttgccgtcgcattgcaactgaataaaaatggtatacatttttatttttaaaaactgtattactttatcggcattcccacagcagtctcgaactcg

SEQ ID NO: 1307 - DNA, 1486 bp, Diabrotica virgifera
aggcagtgaaaattgtggatgatcttatagcatcgaggatagatccaataaaaatcacacatttacatttaacgaatcaatgatgaagtttttatgtagcgtttatgtattgaagccctttgacattagtagttctttaatcattcagtacataaatctgaccagaacatttagtaatgttatttaagctaggaattaggaatgcccagacaaattgaaattgttctagaaaaaattaaacataaactttatgaaagactgctcagtttctactttagccacctacatgttgtcctcgtcataacgattgttttacagaagaatatacttgagcggaggtacacgtctgtcaataatgatttagagaacatgcttgtctaggtctagaaacaactccaaaatcagtaccagaaaaaatttttctataagattagaacacctccaaaagactatgcaatgaactgttgttgcgcagaagcatcacgtgggtgcaggatgtcttttgttgaattggttttaggcatcattaatttggattccatagaccaaatgcatctaaatgtctttttaaattaagctattatggtgataaaggcttatatagatgatattgattaaaaacacgatttgctttgctgtattagtttggaaaatagtatcataatgacagtgagaacaaaacggcacctctaagttattttcgaatttcacaatattttaattaagtttagtttttaggaaatattaaataactggaggcacaagttttttatttcttttatattcgttttcgtgatccgtattctagcaattctgcacatatccagtgttttcatatatctaataagcaagtgggtcgaggtggaggtgtaggtcgcggtggatgccactagttaggtcgcggtcgatgtcgacagcacatagcaaggaggtcacctgcgctgtcagtcgagctagaaccactatcaagtgaagtagtttaatgaaatttgaagaaattcaaaaataaactgaatacaaaaaagggattatataaaaagtatcaactcagatagcgcaggtaatgacaacttggcttcgaacggacaatacagggaagcatccttgtaggccgcgcagtagacatccatgtaaaacaaactcattttattttcaaaagcatcgatgtaaacctcctggatggcatcgcgctaaacctccaccgcgacttacctgctctgttcttttccattcactacaatgtgtttgttttacatggatatcgaccgcgacctccacggcgacccacttggtctgttcttacccttagaacgaaagattctccggtcgatctttggggcttgtagagacgagataacaggagagtggagacgaaaacacaaccagggactggggtgctctatggaaacgaaaacagtataatacatcaaggcaaatcgcataagatggtcaggaagacatgtactgagagcaaatgatgaaatac

SEQ ID NO: 1308 - DNA, 1444 bp, Diabrotica virgifera
aggcagtgaaaattgtggatgatcttatagcatcgaggatagatccaataaaaatcacacatttacatttaacgaatcaatgatgaagtttttatgtagcgtttatgtattgaagccctttgacattagtagttctttaatcattcagtacataaatctgaccagaacatttagtaatgttatttaagctaggaattaggaatgcccagacaaattgaaattgttctagaaaaaattaaacataaactttatgaaagactgctcagtttctactttagccacctacatgttgtcctcgtcataacgattgttttacagaagaatatacttgagcggaggtacacgtctgtcaataatgatttagagaacatgcttgtctaggtctagaaacaactccaaaatcagtaccagaaaaaatttttctataagattagaacacctccaaaagactatgcaatgaactgttgttgcgcagaagcatcacgtgggtgcaggatgtcttttgttgaattggttttaggcatcattaatttggattccatagaccaaatgcatctaaatgtctttttaaattaagctattatggtgataaaggcttatatagatgatattgattaaaaacacgatttgctttgctgtattagtttggaaaatagtatcataatgacagtgagaacaaaacggcacctctaagttattttcgaatttcacaatattttaattaagtttagtttttaggaaatattaaataactggaggcacaagttttttatttcttttatattcgttttcgtgatccgtattctagcaattctgcacatatccagtgttttcatatatctaataagcaagtgggtcgaggtggaggtgtaggtcgcggtggatgccactagttaggtcgcggtcgatgtcgacagcacatagcaaggaggtcacctgcgctgtcagtcgagctagaaccactatcaagtgaagtagtttaatgaaatttgaagaaattcaaaaataaactgaatacaaaaaagggattatataaaaagtatcaactcagatagcgcaggtaatgacaacttggcttcgaacggacaatacagggaagcatccttgtaggccgcgcagtagacatccatgtaaaacaaactcattttattttcaaaagcatcgatgtaaacctcctggatggcatcgcgctaaacctccaccgcgacttacttgttctgttcttacccttagttagagtatggagcagcaggcctacgtctctccgatgagacaccaataagagtcgaaaatcgtcgattcagagtgctggactgcgctccgtattctaagtgaaaaataagattgttttgccgtcgcattgcaactgaataaaaatggtatacatttttatttttaaaaactgtattactttatcggcattcccacagcagtctcgaactcg

SEQ ID NO: 1309 - DNA, 1195 bp, Diabrotica virgifera
atttgatacatcttagaataaactttggtttataattcctagcatccgttcttctgacgaagagcataacaaatatatcagcgacgattataacaaataagtaacatcggtatgaaatatgttgtattataattcgtaacgatgttagtcgatattctacttagtgataaatgtatcaggcaaagccaacacctaataactcattcatcaaatttcatcatccctggcatatttgatccttcctcagtcgtactaacagaagaatgcaacaattttgttttcttttaacccattcgctgcctatcgaagagaatggaactcaggagccgttttgttgaacggcacctgactgaagtaaacatatcacgcgctggtgcgtgatcggcagcgcatgtgttaagtaacatctaattcaacagtaagagtaagaacagaacaaggtcgaggtggaggtgtaggtcgcggtggatgctactagttaagtcgcggtcgatgtcgacagcacatagcaaggaggtcacctgcgctgtcagtcgagctagaaccactatcaagtgaagtagtttaatgaaatttgaatgacaaaaagactgtgcttttgcgatgttgtgtcagtcaagtgatgatagtgatgaaatgtcagctgtaaataatcagatcctccttcatatttcaaaaatttactgaatttaattactttagaaattcaaaaataaactgaatacaaaaaagggattatataaaaagtatcaactcagatagcgcaggtaatgacaacttggcttcgaacggaccaatcacagggaagcatccttgtaggccgcgcagtagacatccatgtaaaacaaactcattttattttcaaaagcatcgatgtaaacctcctggatggcatcgcgctaaacctccaccgcgacttacctgctctgttcttttccattcactacaatgtgtttgttttacatggatatcgaccgcgacctccacggcgacccacttggtctgttcttacccttagaacgaaagattctccggtcgatctttggggcttgtagagacgagataacaggagagtggagacgaaaacacaaccagggactggggtgctctatggaaacgaaaacagtataatacatcaaggcaaatcgcataagatggtcaggaagacatgtactgagagcaaatgatgaaatac

SEQ ID NO: 1310 - DNA, 1153 bp, Diabrotica virgifera
atttgatacatcttagaataaactttggtttataattcctagcatccgttcttctgacgaagagcataacaaatatatcagcgacgattataacaaataagtaacatcggtatgaaatatgttgtattataattcgtaacgatgttagtcgatattctacttagtgataaatgtatcaggcaaagccaacacctaataactcattcatcaaatttcatcatccctggcatatttgatccttcctcagtcgtactaacagaagaatgcaacaattttgttttcttttaacccattcgctgcctatcgaagagaatggaactcaggagccgttttgttgaacggcacctgactgaagtaaacatatcacgcgctggtgcgtgatcggcagcgcatgtgttaagtaacatctaattcaacagtaagagtaagaacagaacaaggtcgaggtggaggtgtaggtcgcggtggatgctactagttaagtcgcggtcgatgtcgacagcacatagcaaggaggtcacctgcgctgtcagtcgagctagaaccactatcaagtgaagtagtttaatgaaatttgaatgacaaaaagactgtgcttttgcgatgttgtgtcagtcaagtgatgatagtgatgaaatgtcagctgtaaataatcagatcctccttcatatttcaaaaatttactgaatttaattactttagaaattcaaaaataaactgaatacaaaaaagggattatataaaaagtatcaactcagatagcgcaggtaatgacaacttggcttcgaacggaccaatcacagggaagcatccttgtaggccgcgcagtagacatccatgtaaaacaaactcattttattttcaaaagcatcgatgtaaacctcctggatggcatcgcgctaaacctccaccgcgacttacttgttctgttcttacccttagttagagtatggagcagcaggcctacgtctctccgatgagacaccaataagagtcgaaaatcgtcgattcagagtgctggactgcgctccgtattctaagtgaaaaataagattgttttgccgtcgcattgcaactgaataaaaatggtatacatttttatttttaaaaactgtattactttatcggcattcccacagcagtctcgaactcg

SEQ ID NO: 1311 - DNA, 1129 bp, Diabrotica virgifera
tgtgatacgatacatacagtcgagtaagaactgataaatattattcacacaataatattataattagtattttacactttaattatcaatttacaactattttataatttttacaagcaaaacaatgatcattacttattcacgtacacctaaatttcactacccatatttgtctcattaaattaagctgtttttgatatagctatctgcttttttcgctccgctatttacatccaaacatcatctagatcagtggttctcgatctttttgagtcatgtaccacaaaattctttttattatttttggtaccgcctacataactgaaattcctatctatactaaaatcacactaagggtaagaacagaacaagtaggcgaggtggaggtgtaggtcgcggtggatgctactagttaagtcgcggtcgatgtcgacagcacatagcaaggaggtcacctgcgctgtcagtcgagctagaaccactatcaagtgaagtagtttaatgaaatttgaatgacaaaaagactgtgcttttgcgatgttgtgtcagtcaagtgatgatagtgatgaaatgtcagctgtaaataatcagatcctccttcatatttcaaaaatttactgaatttaattactttagaaattcaaaaataaactgaatacaaaaaagggattatataaaaagtatcaactcagatagcgcaggtaatgacaacttggcttcgaacggaccaatcacagggaagcatccttgtaggccgcgcagtagacatccatgtaaaacaaactcattttattttcaaaagcatcgatgtaaacctcctggatggcatcgcgctaaacctccaccgcgacttacctgctctgttcttttccattcactacaatgtgtttgttttacatggatatcgaccgcgacctccacggcgacccacttggtctgttcttacccttagaacgaaagattctccggtcgatctttggggcttgtagagacgagataacaggagagtggagacgaaaacacaaccagggactggggtgctctatggaaacgaaaacagtataatacatcaaggcaaatcgcataagatggtcaggaagacatgtactgagagcaaatgatgaaatac

SEQ ID NO: 1312 - DNA, 1087 bp, Diabrotica virgifera
tgtgatacgatacatacagtcgagtaagaactgataaatattattcacacaataatattataattagtattttacactttaattatcaatttacaactattttataatttttacaagcaaaacaatgatcattacttattcacgtacacctaaatttcactacccatatttgtctcattaaattaagctgtttttgatatagctatctgcttttttcgctccgctatttacatccaaacatcatctagatcagtggttctcgatctttttgagtcatgtaccacaaaattctttttattatttttggtaccgcctacataactgaaattcctatctatactaaaatcacactaagggtaagaacagaacaagtaggcgaggtggaggtgtaggtcgcggtggatgctactagttaagtcgcggtcgatgtcgacagcacatagcaaggaggtcacctgcgctgtcagtcgagctagaaccactatcaagtgaagtagtttaatgaaatttgaatgacaaaaagactgtgcttttgcgatgttgtgtcagtcaagtgatgatagtgatgaaatgtcagctgtaaataatcagatcctccttcatatttcaaaaatttactgaatttaattactttagaaattcaaaaataaactgaatacaaaaaagggattatataaaaagtatcaactcagatagcgcaggtaatgacaacttggcttcgaacggaccaatcacagggaagcatccttgtaggccgcgcagtagacatccatgtaaaacaaactcattttattttcaaaagcatcgatgtaaacctcctggatggcatcgcgctaaacctccaccgcgacttacttgttctgttcttacccttagttagagtatggagcagcaggcctacgtctctccgatgagacaccaataagagtcgaaaatcgtcgattcagagtgctggactgcgctccgtattctaagtgaaaaataagattgttttgccgtcgcattgcaactgaataaaaatggtatacatttttatttttaaaaactgtattactttatcggcattcccacagcagtctcgaactcg

SEQ ID NO: 1313 - DNA, 1177 bp, Diabrotica virgifera
aggcagtgaaaattgtggatgatcttatagcatcgaggatagatccaataaaaatcacacatttacatttaacgaatcaatgatgaagtttttatgtagcgtttatgtattgaagccctttgacattagtagttctttaatcattcagtacataaatctgaccagaacatttagtaatgttatttaagctaggaattaggaatgcccagacaaattgaaattgttctagaaaaaattaaacataaactttatgaaagactgctcagtttctactttagccacctacatgttgtcctcgtcataacgattgttttacagaagaatatacttgagcggaggtacacgtctgtcaataatgatttagagaacatgcttgtctaggtctagaaacaactccaaaatcagtaccagaaaaaatttttctataagattagaacacctccaaaagactatgcaatgaactgttgttgcgcagaagcatcacgtgggtgcaggatgtcttttgttgaattggttttaggcatcattaatttggattccatagaccaaatgcatctaaatgtctttttaaattaagctattatggtgataaaggcttatatagatgatattgattaaaaacacgatttgctttgctgtattagtttggaaaatagtatcataatgacagtgagaacaaaacggcacctctaagttattttcgaatttcacaatattttaattaagtttagtttttaggaaatattaaataactggaggcacaagttttttatttcttttatattcgttttcgtgatccgtattctagcaattctgcacatatccagtgttttcatatatctaataagcaagtgggtcgaggtggaggtgtaggtcgcggtggatgccactagttaggtcgcggtcgatgtcgacagcacatagcaaggaggtcacctgcgctgtcagtcgagctagaaccactatcaagtgaagtagtttaatgaaatttgaagaaattcaaaaataaactgaatacaaaaaagggattatataaaaagtatcaacttagatagcgcaggtaatgacaacttggcttcaaacggaccaattacagggaaacatccttgtaggccgcgcagtagacatccatgtaaaacaacctcatcgatgtaaacctcctgaatggcatcgcgct

SEQ ID NO: 1314 - DNA, 4447 bp, Diabrotica virgifera
  SmartBlast Evalue=0; Info=ATP-citrate synthase n=1 Tax=Aedes aegypti RepID=Q17D87_AEDAE
gtaccgtttttgcgcggtgacaggacagtcctcttgcggcatttaccaaggtaggtcctacacgatcgccccgttcctcgttcaaaccgttcgctgcaggctgtgaaagttttttgacgcacaccatacacctctagatttttacgcgttcgaaagtgccatcgcttcgcgctacataaactttctgtgatattgttaaaaagtagaaattttaaaaaatgtcagcaaaagctatacgggaggcgacagggaaacacctcatcaacaaatacctcggcggtaacacagcggccgtacaatgcagatttgcttcagtcgaggctgacactaaattctctgaattagtaagcaacaacccatggttgaaaactgaaaaactagtcgttaaacctgatcaactaatcaaaaggagaggaaaattaggactgatagccgtaaataaagatttaaacaccgtcgtggactgggtaaatgaacgcatgaaccaaaatcaaaaagtcggcaacgccacaggaaaactacgaaacttcatcatcgaacctttcgttccacacaagcaagaagaagaggcttatgtctgcatatactcacatcgtcacgcagacactatcctcttttaccacgaagggggtgtcgatatcggtgatgtcgacagcaaagctcttaaattagatgttcctgttggacagactgtggacgcaggaactatttctaaggtactactaggagaagttccagcagccaaaaaacagatggtagctgattttatcgccaacctttacaaactctacgtggacttgtacttcacatacttagaaattaatcccttagttgtgactgataaggagatctacattttggacttagctgccaaattagatgccactgccgattttatatgcaagccacaatggggtgaaatcgattatcctccacctttcggacgtgatgcttacccagaggaagcctatatagccgacctagattcaaaatctggagctagtcttaaactgacaattctcaacaaatctggtagaatatggacaatggtagctggaggtggagcttctgttatttacagtgacaccatctgtgatttgggtggagctagcgaactcgccaactatggggaatactcaggtgcaccaactgaacaacaaacttacgaatacgccaaaactatcctttccttgatgacccaagaaaagcatcctaaaggaaaagttttgattaccggaggaggtattgccaatttcactaatgtagctgccactttccgcggtatcatcacagctttggtagagttcagggaaaggttgattgaacacaaaatttccattttcgtcagaagagctggacccaattaccaggaaggtttaaggagaatgagagaagtcggacagactttgggtattcctctatacgtcttcggacctgaaactcacatgactgctatttgtggtatggctttgggaactcgcccaattccatcagaaaatcacgtagaaactgccacagcaaatttcgctcttcctagcggtgaaattgaacccaacaaacagcagcttgccagcaaagatggtgcggccaaaccagcagcccctcctgcaaggaatatggtgggagactcaaaagcccttccaatgttcaccaacaatactaaagcaataatttggggaatgcagaaccgtgctatccagagcatgcttgacttcgatttcgtgtgcaacagaaaaagtcccagcgttgtagcaataatttaccccttcactggcgaccacaagcaaaaatactactggggacacaaagaaatactcattccggtatacaaacaaatgagagacgcgatgatgaaacatcctgacgctgatgtccttgttaacttcgcttcattacgttcaggttattctagtaccgtggaaaccctggagtatccacaaatcagaacaattgccatcattgctgaaggtattccagaaaactacaccaggaagttgatcaagttggctgacgagaagaaggtttctattattggacctgccacagttggtggagttaaaccagggtgctttaagattggtaacactggaggaatgatggacaacatcttacactcaaaattgtacagaccaggcagtgtagcttacgtctcaagatctggtggtatgtctaacgaattaaacaacatcgtgtccaaagcaaccgacggagtctacgaaggtgtagctatcggtggagacagataccctggaactactttcatggatcacattatgagatatcaagctgatgataatgttaagatgatcatccttcttggtgaagtaggaggtactgaggaataccaagtatgtaaagcattgcaaaccaaacaaattacaaagcctttggtagcttggtgtataggaacttgcgctggaatgttcacttcagaagtccaattcggccatgcaggatcttgcgctaactcaaaccaagaaactgccacagctaagaacgaagctctcaaggcagccggtgcacacgtacctgattctttcgattatttaggtgatatcgttggcaaagtatacgagcagcttgtaaaacaaggcgtgatagtgccaagaccagaagttcctccaccaaccgtgccaatggactacagttgggctcgtgagttggggcttattagaaaacccgccagcttcatgacttccatctgtgatgaaagaggacaagagctcatatatgcaggtatgcccatttctgatgtgcttcaaaagaacgtaggcatcggcggagtcatatcgcttttgtggttccaaagatgcttacctccgtacgcttgcaaattcttcgagatgtgcttgatggtgacagccgatcatggacctgcagtatcaggagctcacaacaccatagtctgtgcccgtgctggtaaagatctagtttccagtttggtatccggtcttcttacaatcggtgacaggttcggtggagctttggacggtgcagctaagatgttcagtgaagcctatgacaaaggtatgcatcctgccgaattcgttaaccacatgaggaacattggtcagctcatcatgggtattggccacagagtcaaatctatcaacaaccccgatcagagagtaaaaatagtcaaagagttcgtcatggctaacttccccgccactcccttacttcagtacgcactagaagtagaaaaaatcaccaccagcaagaaacccaacctcatccttaacgtcgacggtgtcatcgcatgctccttcgtagatatgttgaggaactgtggtgtcttcacaccggaagaagcccaagaatacatcgacatcggtgctatcaactcattattcgtccttggtagatccatcggatttatcggccattacatggaccaaaagagactcaaacaaggattgtacaggcacccatgggatgacatttcatacgttctacctgaacaatacaacaatgataattagagtatagcatttaactaggtaaaaatcttgtaattattgaccgatagaggtctaggcacgtaccgtggcaccttacgcaatcggctcagtgtgtaagatttaggtttttaggatccaaatgttcgtgaagatgaaactagttatcagttatatttatgtagttaacactatattgaaacatcgacatgttaatctgatgtttttattactttgtttatgttattaaaaagctgtttgtgtacctgcggcatcgcagctgtatgatcgtctatgaaaagaataataaataggaaaaaactactcatgtttccgtcttttacatcgaaatttatagtgtattgttcccatagagtcttctaaagctgtgattgtaggcttaactaatacctcaaaaatattttggtgcctaaaaattattttttatacacttggtctttttgtaaaaacagtttttattgataattgataaatggttaccgtttgtcttgatgttaacaacacagttgctgttaacattattacaaaatatatgcgtgtttcataatgcaaataatgattagtatgcacctaaatgtaattgaagttgaatggtaaatatatctattagtagatccaaccgtcatttgtatcatggttacttttttgttcttgcattatgaactaactgcttagatgttcctctttatatttatatagccgaggcggaatatcgttgttgaccataacattatcgttttccatgttattttaataataattatttttagattttttatattgtagacgttatttattttttgaaaaattatgttgtaacattatgatttaaaattttgtaaatggtagaattttctgataaatataagtgttttatttttgtgaaagtcattcacatggatcaatgtttgactattttgttaacatggcggatttgatcataaatataattttatttcatataaaaa

SEQ ID NO: 1315 - DNA, 4390 bp, Diabrotica virgifera
  SmartBlast Evalue=0; Info=ATP-citrate synthase n=1 Tax=Aedes aegypti RepID=Q17D87_AEDAE
cgacaacatgtcatgtcaaaaatttgtcagcagaatcgtatgatttgaaagtgaattccgaaagcaatttatagtttttgttgtaataaaatagtgaatttttagtaactacctttaattcctgtccagtgtcttcttatttgtcagcccagttttaaaaaatgtcagcaaaagctatacgggaggcgacagggaaacacctcatcaacaaatacctcggcggtaacacagcggccgtacaatgcagatttgcttcagtcgaggctgacactaaattctctgaattagtaagcaacaacccatggttgaaaactgaaaaactagtcgttaaacctgatcaactaatcaaaaggagaggaaaattaggactgatagccgtaaataaagatttaaacaccgtcgtggactgggtaaatgaacgcatgaaccaaaatcaaaaagtcggcaacgccacaggaaaactacgaaacttcatcatcgaacctttcgttccacacaagcaagaagaagaggcttatgtctgcatatactcacatcgtcacgcagacactatcctcttttaccacgaagggggtgtcgatatcggtgatgtcgacagcaaagctcttaaattagatgttcctgttggacagactgtggacgcaggaactatttctaaggtactactaggagaagttccagcagccaaaaaacagatggtagctgattttatcgccaacctttacaaactctacgtggacttgtacttcacatacttagaaattaatcccttagttgtgactgataaggagatctacattttggacttagctgccaaattagatgccactgccgattttatatgcaagccacaatggggtgaaatcgattatcctccacctttcggacgtgatgcttacccagaggaagcctatatagccgacctagattcaaaatctggagctagtcttaaactgacaattctcaacaaatctggtagaatatggacaatggtagctggaggtggagcttctgttatttacagtgacaccatctgtgatttgggtggagctagcgaactcgccaactatggggaatactcaggtgcaccaactgaacaacaaacttacgaatacgccaaaaccatcctttccttgatgacacaagaaaagcatcctaaaggaaaagttctgattaccggagggggtattgccaatttcactaatgtagctgccactttccgcggtatcatcacggctttggtagagttcagggaaaggttgattgaacacaaaatttccatcttcgtcagaagagctggacccaattaccaggaaggtttaaggagaatgagagaagtcggacagactttgggtattcctctatacgtcttcggacctgaaactcacatgactgctatttgtggtatggctttgggaactcgcccaattccatcagaaaatcacgtagaaactgccacagcaaatttcgctcttcctagcggtgaaattgaacccaacaaacagcagcttgccagcaaagatggtgcggccaaaccagcagcccctccggcaaggaatatggtgggagactcaaaagcccttccaatgttcaccaacaatactaaagccataatttggggaatgcagaaccgtgctatccagagcatgctcgacttcgatttcgtgtgcaacagaaaaagccccagcgttgtagcaataatctaccccttcactggcgaccacaagcaaaaatactactggggacacaaagaaatacttattccggtatataaacaaatgagagacgcgatgatgaaacatcctgacgctgatgtccttgttaacttcgcttcattacgttcaggttattctagtaccgtggaaaccctggagtatccacaaatcagaacaattgccatcattgctgaaggtattccagaaaactacaccaggaagttgatcaagttggctgacgagaagaaggtttctattattggacctgccacagttggtggagttaaaccagggtgctttaagattggtaacactggaggaatgatggacaacatcttacactcaaaattgtacagaccaggcagtgtagcttacgtctcaagatctggtggtatgtctaacgaattaaacaacatcgtgtccaaagcaaccgacggagtctacgaaggtgtagctatcggtggagacagataccctggaactactttcatggatcacattatgagatatcaagctgatgataatgttaagatgatcatccttcttggtgaagtaggaggtactgaggaataccaagtatgtaaagcattgcaaaccaaacaaattacaaagcctttggtagcttggtgtataggaacttgcgctggaatgttcacttcagaagtccaattcggccatgcaggatcttgcgctaactcaaaccaagaaactgccacagctaagaacgaagctctcaaggcagccggtgcacacgtacctgattctttcgattatttaggtgatatcgttggcaaagtatacgagcagcttgtaaaacaaggcgtgatagtgccaagaccagaagttcctccaccaaccgtgccaatggactacagttgggctcgtgagttggggcttattagaaaacccgccagcttcatgacttccatctgtgatgaaagaggacaagagctcatatatgcaggtatgcccatttctgatgtgcttcaaaagaacgtaggcatcggcggagtcatatcgcttttgtggttccaaagatgcttacctccgtacgcttgcaaattcttcgagatgtgcttgatggtgacagccgatcatggacctgcagtatcaggagctcacaacaccatagtctgtgcccgtgctggtaaagatctagtttccagtttggtatccggtcttcttacaatcggtgacaggttcggtggagctttggacggtgcagctaagatgttcagtgaagcctatgacaaaggtatgcatcctgccgaattcgttaaccacatgaggaacattggtcagctcatcatgggtattggccacagagtcaaatctatcaacaaccccgatcagagagtaaaaatagtcaaagagttcgtcatggctaacttccccgccactcccttacttcagtacgcactagaagtagaaaaaatcaccaccagcaagaaacccaacctcatccttaacgtcgacggtgtcatcgcatgctccttcgtagatatgttgaggaactgtggtgtcttcacaccggaagaagcccaagaatacatcgacatcggtgctatcaactcattattcgtccttggtagatccatcggatttatcggccattacatggaccaaaagagactcaaacaaggattgtacaggcacccatgggatgacatttcatacgttctacctgaacaatacaacaatgataattagagtatagcatttaactaggtaaaaatcttgtaattattgaccgatagaggtctaggcacgtaccgtggcaccttacgcaatcggctcagtgtgtaagatttaggtttttaggatccaaatgttcgtgaagatgaaactagttatcagttatatttatgtagttaacactatattgaaacatcgacatgttaatctgatgtttttattactttgtttatgttattaaaaagctgtttgtgtacctgcggcatcgcagctgtatgatcgtctatgaaaagaataataaataggaaaaaactactcatgtttccgtcttttacatcgaaatttatagtgtattgttcccatagagtcttctaaagctgtgattgtaggcttaactaatacctcaaaaatattttggtgcctaaaaattattttttatacacttggtctttttgtaaaaacagtttttattgataattgataaatggttaccgtttgtcttgatgttaacaacacagttgctgttaacattattacaaaatatatgcgtgtttcataatgcaaataatgattagtatgcacctaaatgtaattgaagttgaatggtaaatatatctattagtagatccaaccgtcatttgtatcatggttacttttttgttcttgcattatgaactaactgcttagatgttcctctttatatttatatagccgaggcggaatatcgttgttgaccataacattatcgttttccatgttattttaataataattatttttagattttttatattgtagacgttatttattttttgaaaaattatgttgtaacattatgatttaaaattttgtaaatggtagaattttctgataaatataagtgttttatttttgtgaaagtcattcacatggatcaatgtttgactattttgttaacatggcggatttgatcataaatataattttatttcatataaaaa

SEQ ID NO: 1316 - DNA, 4447 bp, Diabrotica virgifera
  SmartBlast Evalue=0; Info=ATP-citrate synthase n=1 Tax=Aedes aegypti RepID=Q17D87_AEDAE
gtaccgtttttgcgcggtgacaggacagtcctcttgcggcatttaccaaggtaggtcctacacgatcgccccgttcctcgttcaaaccgttcgctgcaggctgtgaaagttttttgacgcacaccatacacctctagatttttacgcgttcgaaagtgccatcgcttcgcgctacataaactttctgtgatattgttaaaaagtagaaattttaaaaaatgtcagcaaaagctatacgggaggcgacagggaaacacctcatcaacaaatacctcggcggtaacacagcggccgtacaatgcagatttgcttcagtcgaggctgacactaaattctctgaattagtaagcaacaacccatggttgaaaactgaaaaactagtcgttaaacctgatcaactaatcaaaaggagaggaaaattaggactgatagccgtaaataaagatttaaacaccgtcgtggactgggtaaatgaacgcatgaaccaaaatcaaaaagtcggcaacgccacaggaaaactacgaaacttcatcatcgaacctttcgttccacacaagcaagaagaagaggcttatgtctgcatatactcacatcgtcacgcagacactatcctcttttaccacgaagggggtgtcgatatcggtgatgtcgacagcaaagctcttaaattagatgttcctgttggacagactgtggacgcaggaactatttctaaggtactactaggagaagttccagcagccaaaaaacagatggtagctgattttatcgccaacctttacaaactctacgtggacttgtacttcacatacttagaaattaatcccttagttgtgactgataaggagatctacattttggacttagctgccaaattagatgccactgccgattttatatgcaagccacaatggggtgaaatcgattatcctccacctttcggacgtgatgcttacccagaggaagcctatatagccgacctagattcaaaatctggagctagtcttaaactgacaattctcaacaaatctggtagaatatggacaatggtagctggaggtggagcttctgttatttacagtgacaccatctgtgatttgggtggagctagcgaactcgccaactatggggaatactcaggtgcaccaactgaacaacaaacttacgaatacgccaaaactatcctttccttgatgacccaagaaaagcatcctaaaggaaaagttttgattaccggaggaggtattgccaatttcactaatgtagctgccactttccgcggtatcatcacagctttggtagagttcagggaaaggttgattgaacacaaaatttccattttcgtcagaagagctggacccaattaccaggaaggtttaaggagaatgagagaagtcggacagactttgggtattcctctatacgtcttcggacctgaaactcacatgactgctatttgtggtatggctttgggaactcgcccaattccatcagaaaatcacgtagaaactgccacagcaaatttcgctcttcctagcggtgaaattgaacccaacaaacagcagcttgccagcaaagatggtgcggccaaaccagcagcccctcctgcaaggaatatggtgggagactcaaaagcccttccaatgttcaccaacaatactaaagccataatttggggaatgcagaaccgtgctatccagagcatgctcgacttcgatttcgtgtgcaacagaaaaagccccagcgttgtagcaataatctaccccttcactggcgaccacaagcaaaaatactactggggacacaaagaaatacttattccggtatataaacaaatgagagacgcgatgatgaaacatcctgacgctgatgtccttgttaacttcgcttcattacgttcaggttattctagtaccgtggaaaccctggagtatccacaaatcagaacaattgccatcattgctgaaggtattccagaaaactacaccaggaagttgatcaagttggctgacgagaagaaggtttctattattggacctgccacagttggtggagttaaaccagggtgctttaagattggtaacactggaggaatgatggacaacatcttacactcaaaattgtacagaccaggcagtgtagcttacgtctcaagatctggtggtatgtctaacgaattaaacaacatcgtgtccaaagcaaccgacggagtctacgaaggtgtagctatcggtggagacagataccctggaactactttcatggatcacattatgagatatcaagctgatgataatgttaagatgatcatccttcttggtgaagtaggaggtactgaggaataccaagtatgtaaagcattgcaaaccaaacaaattacaaagcctttggtagcttggtgtataggaacttgcgctggaatgttcacttcagaagtccaattcggccatgcaggatcttgcgctaactcaaaccaagaaactgccacagctaagaacgaagctctcaaggcagccggtgcacacgtacctgattctttcgattatttaggtgatatcgttggcaaagtatacgagcagcttgtaaaacaaggcgtgatagtgccaagaccagaagttcctccaccaaccgtgccaatggactacagttgggctcgtgagttggggcttattagaaaacccgccagcttcatgacttccatctgtgatgaaagaggacaagagctcatatatgcaggtatgcccatttctgatgtgcttcaaaagaacgtaggcatcggcggagtcatatcgcttttgtggttccaaagatgcttacctccgtacgcttgcaaattcttcgagatgtgcttgatggtgacagccgatcatggacctgcagtatcaggagctcacaacaccatagtctgtgcccgtgctggtaaagatctagtttccagtttggtatccggtcttcttacaatcggtgacaggttcggtggagctttggacggtgcagctaagatgttcagtgaagcctatgacaaaggtatgcatcctgccgaattcgttaaccacatgaggaacattggtcagctcatcatgggtattggccacagagtcaaatctatcaacaaccccgatcagagagtaaaaatagtcaaagagttcgtcatggctaacttccccgccactcccttacttcagtacgcactagaagtagaaaaaatcaccaccagcaagaaacccaacctcatccttaacgtcgacggtgtcatcgcatgctccttcgtagatatgttgaggaactgtggtgtcttcacaccggaagaagcccaagaatacatcgacatcggtgctatcaactcattattcgtccttggtagatccatcggatttatcggccattacatggaccaaaagagactcaaacaaggattgtacaggcacccatgggatgacatttcatacgttctacctgaacaatacaacaatgataattagagtatagcatttaactaggtaaaaatcttgtaattattgaccgatagaggtctaggcacgtaccgtggcaccttacgcaatcggctcagtgtgtaagatttaggtttttaggatccaaatgttcgtgaagatgaaactagttatcagttatatttatgtagttaacactatattgaaacatcgacatgttaatctgatgtttttattactttgtttatgttattaaaaagctgtttgtgtacctgcggcatcgcagctgtatgatcgtctatgaaaagaataataaataggaaaaaactactcatgtttccgtcttttacatcgaaatttatagtgtattgttcccatagagtcttctaaagctgtgattgtaggcttaactaatacctcaaaaatattttggtgcctaaaaattattttttatacacttggtctttttgtaaaaacagtttttattgataattgataaatggttaccgtttgtcttgatgttaacaacacagttgctgttaacattattacaaaatatatgcgtgtttcataatgcaaataatgattagtatgcacctaaatgtaattgaagttgaatggtaaatatatctattagtagatccaaccgtcatttgtatcatggttacttttttgttcttgcattatgaactaactgcttagatgttcctctttatatttatatagccgaggcggaatatcgttgttgaccataacattatcgttttccatgttattttaataataattatttttagattttttatattgtagacgttatttattttttgaaaaattatgttgtaacattatgatttaaaattttgtaaatggtagaattttctgataaatataagtgttttatttttgtgaaagtcattcacatggatcaatgtttgactattttgttaacatggcggatttgatcataaatataattttatttcatataaaaa

SEQ ID NO: 1317 - DNA, 4447 bp, Diabrotica virgifera
  SmartBlast Evalue=0; Info=ATP-citrate synthase n=1 Tax=Aedes aegypti RepID=Q17D87_AEDAE
gtaccgtttttgcgcggtgacaggacagtcctcttgcggcatttaccaaggtaggtcctacacgatcgccccgttcctcgttcaaaccgttcgctgcaggctgtgaaagttttttgacgcacaccatacacctctagatttttacgcgttcgaaagtgccatcgcttcgcgctacataaactttctgtgatattgttaaaaagtagaaattttaaaaaatgtcagcaaaagctatacgggaggcgacagggaaacacctcatcaacaaatacctcggcggtaacacagcggccgtacaatgcagatttgcttcagtcgaggctgacactaaattctctgaattagtaagcaacaacccatggttgaaaaccgaaaaactagtcgttaaacctgatcaactaatcaaaaggagaggaaaattaggactgatagccgtaaataaagatttaaacaccgtcgtggactgggtaaatgaacgcatgaaccaaaatcaaaaagtcggcaacgccacaggaaaactacgaaactttatcatcgaacctttcgttccacacaagcaagaagaagaggcttatgtctgcatatactcacatcgtcacgcagacactatcctcttttaccacgaagggggtgtcgatatcggtgatgtcgacagcaaagctcttaagttagatgttcctgttggagagactgtggacgcagcaactatttcaaaggtactactaggagaagttccagcagccaaaaaacagatggtagctgattttatcgccaacctttacaaactctacgtggacttgtacttcacatacttagaaattaatcccttagttgtgactgataaggagatctacattttggacttagctgccaaattagatgccactgccgattttatatgcaagccacaatggggtgaaatcgattatcctccacctttcggacgtgatgcttacccagaggaagcctatatagccgacctagattcaaaatctggagctagtcttaaactgacaattctcaacaaatctggtagaatatggacaatggtagctggaggtggagcttctgttatttacagtgacaccatctgtgatttgggtggagctagcgaactcgccaactatggggaatactcaggtgcaccaactgaacaacaaacttacgaatacgccaaaactatcctttccttgatgacccaagaaaagcatcctaaaggaaaagttttgattaccggaggaggtattgccaatttcactaatgtagctgccactttccgcggtatcatcacagctttggtagagttcagggaaaggttgattgaacacaaaatttccattttcgtcagaagagctggacccaattaccaggaaggtttaaggagaatgagagaagtcggacagactttgggtattcctctatacgtcttcggacctgaaactcacatgactgctatttgtggtatggctttgggaactcgcccaattccatcagaaaatcacgtagaaactgccacagcaaatttcgctcttcctagcggtgaaattgaacccaacaaacagcagcttgccagcaaagatggtgcggccaaaccagcagcccctcctgcaaggaatatggtgggagactcaaaagcccttccaatgttcaccaacaatactaaagcaataatttggggaatgcagaaccgtgctatccagagcatgctcgacttcgatttcgtgtgcaacagaaaaagtcccagcgttgtagcaataatctaccccttcactggcgaccacaagcaaaaatactactgggggcacaaagaaatactcattccggtatataaacaaatgagagacgcgatgatgaaacatcctgacgctgatgtcctggttaacttcgcttcattacgttcaggttattctagtaccgtggaaaccctggagtatccacaaatcagaacaattgccatcattgctgaaggtattccagaaaactacaccaggaagttgatcaagttggctgacgagaagaaggtttctattattggacctgccacagttggtggagttaaaccagggtgctttaagattggtaacactggaggaatgatggacaacatcttacactcaaaattgtacagaccaggcagtgtagcttacgtctcaagatctggtggtatgtctaacgaattaaacaacatcgtgtccaaagcaaccgacggagtctacgaaggtgtagctatcggtggagacagataccctggaactactttcatggatcacattatgagatatcaagctgatgataatgttaagatgatcatccttcttggtgaagtaggaggtactgaggaataccaagtatgtaaagcattgcaaaccaaacaaattacaaagcctttggtagcttggtgtataggaacttgcgctggaatgttcacttcagaagtccaattcggccatgcaggatcttgcgctaactcaaaccaagaaactgccacagctaagaacgaagctctcaaggcagccggtgcacacgtacctgattctttcgattatttaggtgatatcgttggcaaagtatacgagcagcttgtaaaacaaggcgtgatagtgccaagaccagaagttcctccaccaaccgtgccaatggactacagttgggctcgtgagttggggcttattagaaaacccgccagcttcatgacttccatctgtgatgaaagaggacaagagctcatatatgcaggtatgcccatttctgatgtgcttcaaaagaacgtaggcatcggcggagtcatatcgcttttgtggttccaaagatgcttacctccgtacgcttgcaaattcttcgagatgtgcttgatggtgacagccgatcatggacctgcagtatcaggagctcacaacaccatagtctgtgcccgtgctggtaaagatctagtttccagtttggtatccggtcttcttacaatcggtgacaggttcggtggagctttggacggtgcagctaagatgttcagtgaagcctatgacaaaggtatgcatcctgccgaattcgttaaccacatgaggaacattggtcagctcatcatgggtattggccacagagtcaaatctatcaacaaccccgatcagagagtaaaaatagtcaaagagttcgtcatggctaacttccccgccactcccttacttcagtacgcactagaagtagaaaaaatcaccaccagcaagaaacccaacctcatccttaacgtcgacggtgtcatcgcatgctccttcgtagatatgttgaggaactgtggtgtcttcacaccggaagaagcccaagaatacatcgacatcggtgctatcaactcattattcgtccttggtagatccatcggatttatcggccattacatggaccaaaagagactcaaacaaggattgtacaggcacccatgggatgacatttcatacgttctacctgaacaatacaacaatgataattagagtatagcatttaactaggtaaaaatcttgtaattattgaccgatagaggtctaggcacgtaccgtggcaccttacgcaatcggctcagtgtgtaagatttaggtttttaggatccaaatgttcgtgaagatgaaactagttatcagttatatttatgtagttaacactatattgaaacatcgacatgttaatctgatgtttttattactttgtttatgttattaaaaagctgtttgtgtacctgcggcatcgcagctgtatgatcgtctatgaaaagaataataaataggaaaaaactactcatgtttccgtcttttacatcgaaatttatagtgtattgttcccatagagtcttctaaagctgtgattgtaggcttaactaatacctcaaaaatattttggtgcctaaaaattattttttatacacttggtctttttgtaaaaacagtttttattgataattgataaatggttaccgtttgtcttgatgttaacaacacagttgctgttaacattattacaaaatatatgcgtgtttcataatgcaaataatgattagtatgcacctaaatgtaattgaagttgaatggtaaatatatctattagtagatccaaccgtcatttgtatcatggttacttttttgttcttgcattatgaactaactgcttagatgttcctctttatatttatatagccgaggcggaatatcgttgttgaccataacattatcgttttccatgttattttaataataattatttttagattttttatattgtagacgttatttattttttgaaaaattatgttgtaacattatgatttaaaattttgtaaatggtagaattttctgataaatataagtgttttatttttgtgaaagtcattcacatggatcaatgtttgactattttgttaacatggcggatttgatcataaatataattttatttcatataaaaa

SEQ ID NO: 1318 - DNA, 4390 bp, Diabrotica virgifera
  SmartBlast Evalue=0; Info=ATP-citrate synthase n=1 Tax=Aedes aegypti RepID=Q17D87_AEDAE
cgacaacatgtcatgtcaaaaatttgtcagcagaatcgtatgatttgaaagtgaattccgaaagcaatttatagtttttgttgtaataaaatagtgaatttttagtaactacctttaattcctgtccagtgtcttcttatttgtcagcccagttttaaaaaatgtcagcaaaagctatacgggaggcgacagggaaacacctcatcaacaaatacctcggcggtaacacagcggccgtacaatgcagatttgcttcagtcgaggctgacactaaattctctgaattagtaagcaacaacccatggttgaaaaccgaaaaactagtcgttaaacctgatcaactaatcaaaaggagaggaaaattaggactgatagccgtaaataaagatttaaacaccgtcgtggactgggtaaatgaacgcatgaaccaaaatcaaaaagtcggcaacgccacaggaaaactacgaaactttatcatcgaacctttcgttccacacaagcaagaagaagaggcttatgtctgcatatactcacatcgtcacgcagacactatcctcttttaccacgaagggggtgtcgatatcggtgatgtcgacagcaaagctcttaagttagatgttcctgttggagagactgtggacgcagcaactatttcaaaggtactactaggagaagttccagcagccaaaaaacagatggtagctgattttatcgccaacctttacaaactctacgtggacttgtacttcacatacttagaaattaatcccttagttgtgactgataaggagatctacattttggacttagctgccaaattagatgccactgccgattttatatgcaagccacaatggggtgaaatcgattatcctccacctttcggacgtgatgcttacccagaggaagcctatatagccgacctagattcaaaatctggagctagtcttaaactgacaattctcaacaaatctggtagaatatggacaatggtagctggaggtggagcttctgttatttacagtgacaccatctgtgatttgggtggagctagcgaactcgccaactatggggaatactcaggtgcaccaactgaacaacaaacttacgaatacgccaaaaccatcctttccttgatgacacaagaaaagcatcctaaaggaaaagttctgattaccggagggggtattgccaatttcactaatgtagctgccactttccgcggtatcatcacggctttggtagagttcagggaaaggttgattgaacacaaaatttccatcttcgtcagaagagctggacccaattaccaggaaggtttaaggagaatgagagaagtcggacagactttgggtattcctctatacgtcttcggacctgaaactcacatgactgctatttgtggtatggctttgggaactcgcccaattccatcagaaaatcacgtagaaactgccacagcaaatttcgctcttcctagcggtgaaattgaacccaacaaacagcagcttgccagcaaagatggtgcggccaaaccagcagcccctccggcaaggaatatggtgggagactcaaaagcccttccaatgttcaccaacaatactaaagcaataatttggggaatgcagaaccgtgctatccagagcatgctcgacttcgatttcgtgtgcaacagaaaaagtcccagcgttgtagcaataatctaccccttcactggcgaccacaagcaaaaatactactgggggcacaaagaaatactcattccggtatataaacaaatgagagacgcgatgatgaaacatcctgacgctgatgtcctggttaacttcgcttcattacgttcaggttattctagtaccgtggaaaccctggagtatccacaaatcagaacaattgccatcattgctgaaggtattccagaaaactacaccaggaagttgatcaagttggctgacgagaagaaggtttctattattggacctgccacagttggtggagttaaaccagggtgctttaagattggtaacactggaggaatgatggacaacatcttacactcaaaattgtacagaccaggcagtgtagcttacgtctcaagatctggtggtatgtctaacgaattaaacaacatcgtgtccaaagcaaccgacggagtctacgaaggtgtagctatcggtggagacagataccctggaactactttcatggatcacattatgagatatcaagctgatgataatgttaagatgatcatccttcttggtgaagtaggaggtactgaggaataccaagtatgtaaagcattgcaaaccaaacaaattacaaagcctttggtagcttggtgtataggaacttgcgctggaatgttcacttcagaagtccaattcggccatgcaggatcttgcgctaactcaaaccaagaaactgccacagctaagaacgaagctctcaaggcagccggtgcacacgtacctgattctttcgattatttaggtgatatcgttggcaaagtatacgagcagcttgtaaaacaaggcgtgatagtgccaagaccagaagttcctccaccaaccgtgccaatggactacagttgggctcgtgagttggggcttattagaaaacccgccagcttcatgacttccatctgtgatgaaagaggacaagagctcatatatgcaggtatgcccatttctgatgtgcttcaaaagaacgtaggcatcggcggagtcatatcgcttttgtggttccaaagatgcttacctccgtacgcttgcaaattcttcgagatgtgcttgatggtgacagccgatcatggacctgcagtatcaggagctcacaacaccatagtctgtgcccgtgctggtaaagatctagtttccagtttggtatccggtcttcttacaatcggtgacaggttcggtggagctttggacggtgcagctaagatgttcagtgaagcctatgacaaaggtatgcatcctgccgaattcgttaaccacatgaggaacattggtcagctcatcatgggtattggccacagagtcaaatctatcaacaaccccgatcagagagtaaaaatagtcaaagagttcgtcatggctaacttccccgccactcccttacttcagtacgcactagaagtagaaaaaatcaccaccagcaagaaacccaacctcatccttaacgtcgacggtgtcatcgcatgctccttcgtagatatgttgaggaactgtggtgtcttcacaccggaagaagcccaagaatacatcgacatcggtgctatcaactcattattcgtccttggtagatccatcggatttatcggccattacatggaccaaaagagactcaaacaaggattgtacaggcacccatgggatgacatttcatacgttctacctgaacaatacaacaatgataattagagtatagcatttaactaggtaaaaatcttgtaattattgaccgatagaggtctaggcacgtaccgtggcaccttacgcaatcggctcagtgtgtaagatttaggtttttaggatccaaatgttcgtgaagatgaaactagttatcagttatatttatgtagttaacactatattgaaacatcgacatgttaatctgatgtttttattactttgtttatgttattaaaaagctgtttgtgtacctgcggcatcgcagctgtatgatcgtctatgaaaagaataataaataggaaaaaactactcatgtttccgtcttttacatcgaaatttatagtgtattgttcccatagagtcttctaaagctgtgattgtaggcttaactaatacctcaaaaatattttggtgcctaaaaattattttttatacacttggtctttttgtaaaaacagtttttattgataattgataaatggttaccgtttgtcttgatgttaacaacacagttgctgttaacattattacaaaatatatgcgtgtttcataatgcaaataatgattagtatgcacctaaatgtaattgaagttgaatggtaaatatatctattagtagatccaaccgtcatttgtatcatggttacttttttgttcttgcattatgaactaactgcttagatgttcctctttatatttatatagccgaggcggaatatcgttgttgaccataacattatcgttttccatgttattttaataataattatttttagattttttatattgtagacgttatttattttttgaaaaattatgttgtaacattatgatttaaaattttgtaaatggtagaattttctgataaatataagtgttttatttttgtgaaagtcattcacatggatcaatgtttgactattttgttaacatggcggatttgatcataaatataattttatttcatataaaaa

SEQ ID NO: 1319 - DNA, 4447 bp, Diabrotica virgifera
  SmartBlast Evalue=0; Info=ATP-citrate synthase n=1 Tax=Aedes aegypti RepID=Q17D87_AEDAE
gtaccgtttttgcgcggtgacaggacagtcctcttgcggcatttaccaaggtaggtcctacacgatcgccccgttcctcgttcaaaccgttcgctgcaggctgtgaaagttttttgacgcacaccatacacctctagatttttacgcgttcgaaagtgccatcgcttcgcgctacataaactttctgtgatattgttaaaaagtagaaattttaaaaaatgtcagcaaaagctatacgggaggcgacagggaaacacctcatcaacaaatacctcggcggtaacacagcggccgtacaatgcagatttgcttcagtcgaggctgacactaaattctctgaattagtaagcaacaacccatggttgaaaaccgaaaaactagtcgttaaacctgatcaactaatcaaaaggagaggaaaattaggactgatagccgtaaataaagatttaaacaccgtcgtggactgggtaaatgaacgcatgaaccaaaatcaaaaagtcggcaacgccacaggaaaactacgaaactttatcatcgaacctttcgttccacacaagcaagaagaagaggcttatgtctgcatatactcacatcgtcacgcagacactatcctcttttaccacgaagggggtgtcgatatcggtgatgtcgacagcaaagctcttaagttagatgttcctgttggagagactgtggacgcagcaactatttcaaaggtactactaggagaagttccagcagccaaaaaacagatggtagctgattttatcgccaacctttacaaactctacgtggacttgtacttcacatacttagaaattaatcccttagttgtgactgataaggagatctacattttggacttagctgccaaattagatgccactgccgattttatatgcaagccacaatggggtgaaatcgattatcctccacctttcggacgtgatgcttacccagaggaagcctatatagccgacctagattcaaaatctggagctagtcttaaactgacaattctcaacaaatctggtagaatatggacaatggtagctggaggtggagcttctgttatttacagtgacaccatctgtgatttgggtggagctagcgaactcgccaactatggggaatactcaggtgcaccaactgaacaacaaacttacgaatacgccaaaactatcctttccttgatgacccaagaaaagcatcctaaaggaaaagttttgattaccggaggaggtattgccaatttcactaatgtagctgccactttccgcggtatcatcacagctttggtagagttcagggaaaggttgattgaacacaaaatttccattttcgtcagaagagctggacccaattaccaggaaggtttaaggagaatgagagaagtcggacagactttgggtattcctctatacgtcttcggacctgaaactcacatgactgctatttgtggtatggctttgggaactcgcccaattccatcagaaaatcacgtagaaactgccacagcaaatttcgctcttcctagcggtgaaattgaacccaacaaacagcagcttgccagcaaagatggtgcggccaaaccagcagcccctcctgcaaggaatatggtgggagactcaaaagcccttccaatgttcaccaacaatactaaagcaataatttggggaatgcagaaccgtgctatccagagcatgcttgacttcgatttcgtgtgcaacagaaaaagtcccagcgttgtagcaataatttaccccttcactggcgaccacaagcaaaaatactactggggacacaaagaaatactcattccggtatacaaacaaatgagagacgcgatgatgaaacatcctgacgctgatgtccttgttaacttcgcttcattacgttcaggttattctagtaccgtggaaaccctggagtatccacaaatcagaacaattgccatcattgctgaaggtattccagaaaactacaccaggaagttgatcaagttggctgacgagaagaaggtttctattattggacctgccacagttggtggagttaaaccagggtgctttaagattggtaacactggaggaatgatggacaacatcttacactcaaaattgtacagaccaggcagtgtagcttacgtctcaagatctggtggtatgtctaacgaattaaacaacatcgtgtccaaagcaaccgacggagtctacgaaggtgtagctatcggtggagacagataccctggaactactttcatggatcacattatgagatatcaagctgatgataatgttaagatgatcatccttcttggtgaagtaggaggtactgaggaataccaagtatgtaaagcattgcaaaccaaacaaattacaaagcctttggtagcttggtgtataggaacttgcgctggaatgttcacttcagaagtccaattcggccatgcaggatcttgcgctaactcaaaccaagaaactgccacagctaagaacgaagctctcaaggcagccggtgcacacgtacctgattctttcgattatttaggtgatatcgttggcaaagtatacgagcagcttgtaaaacaaggcgtgatagtgccaagaccagaagttcctccaccaaccgtgccaatggactacagttgggctcgtgagttggggcttattagaaaacccgccagcttcatgacttccatctgtgatgaaagaggacaagagctcatatatgcaggtatgcccatttctgatgtgcttcaaaagaacgtaggcatcggcggagtcatatcgcttttgtggttccaaagatgcttacctccgtacgcttgcaaattcttcgagatgtgcttgatggtgacagccgatcatggacctgcagtatcaggagctcacaacaccatagtctgtgcccgtgctggtaaagatctagtttccagtttggtatccggtcttcttacaatcggtgacaggttcggtggagctttggacggtgcagctaagatgttcagtgaagcctatgacaaaggtatgcatcctgccgaattcgttaaccacatgaggaacattggtcagctcatcatgggtattggccacagagtcaaatctatcaacaaccccgatcagagagtaaaaatagtcaaagagttcgtcatggctaacttccccgccactcccttacttcagtacgcactagaagtagaaaaaatcaccaccagcaagaaacccaacctcatccttaacgtcgacggtgtcatcgcatgctccttcgtagatatgttgaggaactgtggtgtcttcacaccggaagaagcccaagaatacatcgacatcggtgctatcaactcattattcgtccttggtagatccatcggatttatcggccattacatggaccaaaagagactcaaacaaggattgtacaggcacccatgggatgacatttcatacgttctacctgaacaatacaacaatgataattagagtatagcatttaactaggtaaaaatcttgtaattattgaccgatagaggtctaggcacgtaccgtggcaccttacgcaatcggctcagtgtgtaagatttaggtttttaggatccaaatgttcgtgaagatgaaactagttatcagttatatttatgtagttaacactatattgaaacatcgacatgttaatctgatgtttttattactttgtttatgttattaaaaagctgtttgtgtacctgcggcatcgcagctgtatgatcgtctatgaaaagaataataaataggaaaaaactactcatgtttccgtcttttacatcgaaatttatagtgtattgttcccatagagtcttctaaagctgtgattgtaggcttaactaatacctcaaaaatattttggtgcctaaaaattattttttatacacttggtctttttgtaaaaacagtttttattgataattgataaatggttaccgtttgtcttgatgttaacaacacagttgctgttaacattattacaaaatatatgcgtgtttcataatgcaaataatgattagtatgcacctaaatgtaattgaagttgaatggtaaatatatctattagtagatccaaccgtcatttgtatcatggttacttttttgttcttgcattatgaactaactgcttagatgttcctctttatatttatatagccgaggcggaatatcgttgttgaccataacattatcgttttccatgttattttaataataattatttttagattttttatattgtagacgttatttattttttgaaaaattatgttgtaacattatgatttaaaattttgtaaatggtagaattttctgataaatataagtgttttatttttgtgaaagtcattcacatggatcaatgtttgactattttgttaacatggcggatttgatcataaatataattttatttcatataaaaa

SEQ ID NO: 1320 - DNA, 4390 bp, Diabrotica virgifera
  SmartBlast Evalue=0; Info=ATP-citrate synthase n=1 Tax=Aedes aegypti RepID=Q17D87_AEDAE
cgacaacatgtcatgtcaaaaatttgtcagcagaatcgtatgatttgaaagtgaattccgaaagcaatttatagtttttgttgtaataaaatagtgaatttttagtaactacctttaattcctgtccagtgtcttcttatttgtcagcccagttttaaaaaatgtcagcaaaagctatacgggaggcgacagggaaacacctcatcaacaaatacctcggcggtaacacagcggccgtacaatgcagatttgcttcagtcgaggctgacactaaattctctgaattagtaagcaacaacccatggttgaaaaccgaaaaactagtcgttaaacctgatcaactaatcaaaaggagaggaaaattaggactgatagccgtaaataaagatttaaacaccgtcgtggactgggtaaatgaacgcatgaaccaaaatcaaaaagtcggcaacgccacaggaaaactacgaaactttatcatcgaacctttcgttccacacaagcaagaagaagaggcttatgtctgcatatactcacatcgtcacgcagacactatcctcttttaccacgaagggggtgtcgatatcggtgatgtcgacagcaaagctcttaagttagatgttcctgttggagagactgtggacgcagcaactatttcaaaggtactactaggagaagttccagcagccaaaaaacagatggtagctgattttatcgccaacctttacaaactctacgtggacttgtacttcacatacttagaaattaatcccttagttgtgactgataaggagatctacattttggacttagctgccaaattagatgccactgccgattttatatgcaagccacaatggggtgaaatcgattatcctccacctttcggacgtgatgcttacccagaggaagcctatatagccgacctagattcaaaatctggagctagtcttaaactgacaattctcaacaaatctggtagaatatggacaatggtagctggaggtggagcttctgttatttacagtgacaccatctgtgatttgggtggagctagcgaactcgccaactatggggaatactcaggtgcaccaactgaacaacaaacttacgaatacgccaaaaccatcctttccttgatgacacaagaaaagcatcctaaaggaaaagttctgattaccggagggggtattgccaatttcactaatgtagctgccactttccgcggtatcatcacggctttggtagagttcagggaaaggttgattgaacacaaaatttccatcttcgtcagaagagctggacccaattaccaggaaggtttaaggagaatgagagaagtcggacagactttgggtattcctctatacgtcttcggacctgaaactcacatgactgctatttgtggtatggctttgggaactcgcccaattccatcagaaaatcacgtagaaactgccacagcaaatttcgctcttcctagcggtgaaattgaacccaacaaacagcagcttgccagcaaagatggtgcggccaaaccagcagcccctccggcaaggaatatggtgggagactcaaaagcccttccaatgttcaccaacaatactaaagcaataatttggggaatgcagaaccgtgctatccagagcatgcttgacttcgatttcgtgtgcaacagaaaaagtcccagcgttgtagcaataatttaccccttcactggcgaccacaagcaaaaatactactggggacacaaagaaatactcattccggtatacaaacaaatgagagacgcgatgatgaaacatcctgacgctgatgtccttgttaacttcgcttcattacgttcaggttattctagtaccgtggaaaccctggagtatccacaaatcagaacaattgccatcattgctgaaggtattccagaaaactacaccaggaagttgatcaagttggctgacgagaagaaggtttctattattggacctgccacagttggtggagttaaaccagggtgctttaagattggtaacactggaggaatgatggacaacatcttacactcaaaattgtacagaccaggcagtgtagcttacgtctcaagatctggtggtatgtctaacgaattaaacaacatcgtgtccaaagcaaccgacggagtctacgaaggtgtagctatcggtggagacagataccctggaactactttcatggatcacattatgagatatcaagctgatgataatgttaagatgatcatccttcttggtgaagtaggaggtactgaggaataccaagtatgtaaagcattgcaaaccaaacaaattacaaagcctttggtagcttggtgtataggaacttgcgctggaatgttcacttcagaagtccaattcggccatgcaggatcttgcgctaactcaaaccaagaaactgccacagctaagaacgaagctctcaaggcagccggtgcacacgtacctgattctttcgattatttaggtgatatcgttggcaaagtatacgagcagcttgtaaaacaaggcgtgatagtgccaagaccagaagttcctccaccaaccgtgccaatggactacagttgggctcgtgagttggggcttattagaaaacccgccagcttcatgacttccatctgtgatgaaagaggacaagagctcatatatgcaggtatgcccatttctgatgtgcttcaaaagaacgtaggcatcggcggagtcatatcgcttttgtggttccaaagatgcttacctccgtacgcttgcaaattcttcgagatgtgcttgatggtgacagccgatcatggacctgcagtatcaggagctcacaacaccatagtctgtgcccgtgctggtaaagatctagtttccagtttggtatccggtcttcttacaatcggtgacaggttcggtggagctttggacggtgcagctaagatgttcagtgaagcctatgacaaaggtatgcatcctgccgaattcgttaaccacatgaggaacattggtcagctcatcatgggtattggccacagagtcaaatctatcaacaaccccgatcagagagtaaaaatagtcaaagagttcgtcatggctaacttccccgccactcccttacttcagtacgcactagaagtagaaaaaatcaccaccagcaagaaacccaacctcatccttaacgtcgacggtgtcatcgcatgctccttcgtagatatgttgaggaactgtggtgtcttcacaccggaagaagcccaagaatacatcgacatcggtgctatcaactcattattcgtccttggtagatccatcggatttatcggccattacatggaccaaaagagactcaaacaaggattgtacaggcacccatgggatgacatttcatacgttctacctgaacaatacaacaatgataattagagtatagcatttaactaggtaaaaatcttgtaattattgaccgatagaggtctaggcacgtaccgtggcaccttacgcaatcggctcagtgtgtaagatttaggtttttaggatccaaatgttcgtgaagatgaaactagttatcagttatatttatgtagttaacactatattgaaacatcgacatgttaatctgatgtttttattactttgtttatgttattaaaaagctgtttgtgtacctgcggcatcgcagctgtatgatcgtctatgaaaagaataataaataggaaaaaactactcatgtttccgtcttttacatcgaaatttatagtgtattgttcccatagagtcttctaaagctgtgattgtaggcttaactaatacctcaaaaatattttggtgcctaaaaattattttttatacacttggtctttttgtaaaaacagtttttattgataattgataaatggttaccgtttgtcttgatgttaacaacacagttgctgttaacattattacaaaatatatgcgtgtttcataatgcaaataatgattagtatgcacctaaatgtaattgaagttgaatggtaaatatatctattagtagatccaaccgtcatttgtatcatggttacttttttgttcttgcattatgaactaactgcttagatgttcctctttatatttatatagccgaggcggaatatcgttgttgaccataacattatcgttttccatgttattttaataataattatttttagattttttatattgtagacgttatttattttttgaaaaattatgttgtaacattatgatttaaaattttgtaaatggtagaattttctgataaatataagtgttttatttttgtgaaagtcattcacatggatcaatgtttgactattttgttaacatggcggatttgatcataaatataattttatttcatataaaaa

SEQ ID NO: 1321 - DNA, 4447 bp, Diabrotica virgifera
  SmartBlast Evalue=0; Info=ATP-citrate synthase n=1 Tax=Aedes aegypti RepID=Q17D87_AEDAE
gtaccgtttttgcgcggtgacaggacagtcctcttgcggcatttaccaaggtaggtcctacacgatcgccccgttcctcgttcaaaccgttcgctgcaggctgtgaaagttttttgacgcacaccatacacctctagatttttacgcgttcgaaagtgccatcgcttcgcgctacataaactttctgtgatattgttaaaaagtagaaattttaaaaaatgtcagcaaaagctatacgggaggcgacagggaaacacctcatcaacaaatacctcggcggtaacacagcggccgtacaatgcagatttgcttcagtcgaggctgacactaaattctctgaattagtaagcaacaacccatggttgaaaaccgaaaaactagtcgttaaacctgatcaactaatcaaaaggagaggaaaattaggactgatagccgtaaataaagatttaaacaccgtcgtggactgggtaaatgaacgcatgaaccaaaatcaaaaagtcggcaacgccacaggaaaactacgaaactttatcatcgaacctttcgttccacacaagcaagaagaagaggcttatgtctgcatatactcacatcgtcacgcagacactatcctcttttaccacgaagggggtgtcgatatcggtgatgtcgacagcaaagctcttaagttagatgttcctgttggagagactgtggacgcagcaactatttcaaaggtactactaggagaagttccagcagccaaaaaacagatggtagctgattttatcgccaacctttacaaactctacgtggacttgtacttcacatacttagaaattaatcccttagttgtgactgataaggagatctacattttggacttagctgccaaattagatgccactgccgattttatatgcaagccacaatggggtgaaatcgattatcctccacctttcggacgtgatgcttacccagaggaagcctatatagccgacctagattcaaaatctggagctagtcttaaactgacaattctcaacaaatctggtagaatatggacaatggtagctggaggtggagcttctgttatttacagtgacaccatctgtgatttgggtggagctagcgaactcgccaactatggggaatactcaggtgcaccaactgaacaacaaacttacgaatacgccaaaactatcctttccttgatgacccaagaaaagcatcctaaaggaaaagttttgattaccggaggaggtattgccaatttcactaatgtagctgccactttccgcggtatcatcacagctttggtagagttcagggaaaggttgattgaacacaaaatttccattttcgtcagaagagctggacccaattaccaggaaggtttaaggagaatgagagaagtcggacagactttgggtattcctctatacgtcttcggacctgaaactcacatgactgctatttgtggtatggctttgggaactcgcccaattccatcagaaaatcacgtagaaactgccacagcaaatttcgctcttcctagcggtgaaattgaacccaacaaacagcagcttgccagcaaagatggtgcggccaaaccagcagcccctcctgcaaggaatatggtgggagactcaaaagcccttccaatgttcaccaacaatactaaagccataatttggggaatgcagaaccgtgctatccagagcatgctcgacttcgatttcgtgtgcaacagaaaaagccccagcgttgtagcaataatctaccccttcactggcgaccacaagcaaaaatactactggggacacaaagaaatacttattccggtatataaacaaatgagagacgcgatgatgaaacatcctgacgctgatgtccttgttaacttcgcttcattacgttcaggttattctagtaccgtggaaaccctggagtatccacaaatcagaacaattgccatcattgctgaaggtattccagaaaactacaccaggaagttgatcaagttggctgacgagaagaaggtttctattattggacctgccacagttggtggagttaaaccagggtgctttaagattggtaacactggaggaatgatggacaacatcttacactcaaaattgtacagaccaggcagtgtagcttacgtctcaagatctggtggtatgtctaacgaattaaacaacatcgtgtccaaagcaaccgacggagtctacgaaggtgtagctatcggtggagacagataccctggaactactttcatggatcacattatgagatatcaagctgatgataatgttaagatgatcatccttcttggtgaagtaggaggtactgaggaataccaagtatgtaaagcattgcaaaccaaacaaattacaaagcctttggtagcttggtgtataggaacttgcgctggaatgttcacttcagaagtccaattcggccatgcaggatcttgcgctaactcaaaccaagaaactgccacagctaagaacgaagctctcaaggcagccggtgcacacgtacctgattctttcgattatttaggtgatatcgttggcaaagtatacgagcagcttgtaaaacaaggcgtgatagtgccaagaccagaagttcctccaccaaccgtgccaatggactacagttgggctcgtgagttggggcttattagaaaacccgccagcttcatgacttccatctgtgatgaaagaggacaagagctcatatatgcaggtatgcccatttctgatgtgcttcaaaagaacgtaggcatcggcggagtcatatcgcttttgtggttccaaagatgcttacctccgtacgcttgcaaattcttcgagatgtgcttgatggtgacagccgatcatggacctgcagtatcaggagctcacaacaccatagtctgtgcccgtgctggtaaagatctagtttccagtttggtatccggtcttcttacaatcggtgacaggttcggtggagctttggacggtgcagctaagatgttcagtgaagcctatgacaaaggtatgcatcctgccgaattcgttaaccacatgaggaacattggtcagctcatcatgggtattggccacagagtcaaatctatcaacaaccccgatcagagagtaaaaatagtcaaagagttcgtcatggctaacttccccgccactcccttacttcagtacgcactagaagtagaaaaaatcaccaccagcaagaaacccaacctcatccttaacgtcgacggtgtcatcgcatgctccttcgtagatatgttgaggaactgtggtgtcttcacaccggaagaagcccaagaatacatcgacatcggtgctatcaactcattattcgtccttggtagatccatcggatttatcggccattacatggaccaaaagagactcaaacaaggattgtacaggcacccatgggatgacatttcatacgttctacctgaacaatacaacaatgataattagagtatagcatttaactaggtaaaaatcttgtaattattgaccgatagaggtctaggcacgtaccgtggcaccttacgcaatcggctcagtgtgtaagatttaggtttttaggatccaaatgttcgtgaagatgaaactagttatcagttatatttatgtagttaacactatattgaaacatcgacatgttaatctgatgtttttattactttgtttatgttattaaaaagctgtttgtgtacctgcggcatcgcagctgtatgatcgtctatgaaaagaataataaataggaaaaaactactcatgtttccgtcttttacatcgaaatttatagtgtattgttcccatagagtcttctaaagctgtgattgtaggcttaactaatacctcaaaaatattttggtgcctaaaaattattttttatacacttggtctttttgtaaaaacagtttttattgataattgataaatggttaccgtttgtcttgatgttaacaacacagttgctgttaacattattacaaaatatatgcgtgtttcataatgcaaataatgattagtatgcacctaaatgtaattgaagttgaatggtaaatatatctattagtagatccaaccgtcatttgtatcatggttacttttttgttcttgcattatgaactaactgcttagatgttcctctttatatttatatagccgaggcggaatatcgttgttgaccataacattatcgttttccatgttattttaataataattatttttagattttttatattgtagacgttatttattttttgaaaaattatgttgtaacattatgatttaaaattttgtaaatggtagaattttctgataaatataagtgttttatttttgtgaaagtcattcacatggatcaatgtttgactattttgttaacatggcggatttgatcataaatataattttatttcatataaaaa

SEQ ID NO: 1322 - DNA, 4390 bp, Diabrotica virgifera
  SmartBlast Evalue=0; Info=ATP-citrate synthase n=1 Tax=Aedes aegypti RepID=Q17D87_AEDAE
cgacaacatgtcatgtcaaaaatttgtcagcagaatcgtatgatttgaaagtgaattccgaaagcaatttatagtttttgttgtaataaaatagtgaatttttagtaactacctttaattcctgtccagtgtcttcttatttgtcagcccagttttaaaaaatgtcagcaaaagctatacgggaggcgacagggaaacacctcatcaacaaatacctcggcggtaacacagcggccgtacaatgcagatttgcttcagtcgaggctgacactaaattctctgaattagtaagcaacaacccatggttgaaaaccgaaaaactagtcgttaaacctgatcaactaatcaaaaggagaggaaaattaggactgatagccgtaaataaagatttaaacaccgtcgtggactgggtaaatgaacgcatgaaccaaaatcaaaaagtcggcaacgccacaggaaaactacgaaactttatcatcgaacctttcgttccacacaagcaagaagaagaggcttatgtctgcatatactcacatcgtcacgcagacactatcctcttttaccacgaagggggtgtcgatatcggtgatgtcgacagcaaagctcttaagttagatgttcctgttggagagactgtggacgcagcaactatttcaaaggtactactaggagaagttccagcagccaaaaaacagatggtagctgattttatcgccaacctttacaaactctacgtggacttgtacttcacatacttagaaattaatcccttagttgtgactgataaggagatctacattttggacttagctgccaaattagatgccactgccgattttatatgcaagccacaatggggtgaaatcgattatcctccacctttcggacgtgatgcttacccagaggaagcctatatagccgacctagattcaaaatctggagctagtcttaaactgacaattctcaacaaatctggtagaatatggacaatggtagctggaggtggagcttctgttatttacagtgacaccatctgtgatttgggtggagctagcgaactcgccaactatggggaatactcaggtgcaccaactgaacaacaaacttacgaatacgccaaaaccatcctttccttgatgacacaagaaaagcatcctaaaggaaaagttctgattaccggagggggtattgccaatttcactaatgtagctgccactttccgcggtatcatcacggctttggtagagttcagggaaaggttgattgaacacaaaatttccatcttcgtcagaagagctggacccaattaccaggaaggtttaaggagaatgagagaagtcggacagactttgggtattcctctatacgtcttcggacctgaaactcacatgactgctatttgtggtatggctttgggaactcgcccaattccatcagaaaatcacgtagaaactgccacagcaaatttcgctcttcctagcggtgaaattgaacccaacaaacagcagcttgccagcaaagatggtgcggccaaaccagcagcccctccggcaaggaatatggtgggagactcaaaagcccttccaatgttcaccaacaatactaaagccataatttggggaatgcagaaccgtgctatccagagcatgctcgacttcgatttcgtgtgcaacagaaaaagccccagcgttgtagcaataatctaccccttcactggcgaccacaagcaaaaatactactggggacacaaagaaatacttattccggtatataaacaaatgagagacgcgatgatgaaacatcctgacgctgatgtccttgttaacttcgcttcattacgttcaggttattctagtaccgtggaaaccctggagtatccacaaatcagaacaattgccatcattgctgaaggtattccagaaaactacaccaggaagttgatcaagttggctgacgagaagaaggtttctattattggacctgccacagttggtggagttaaaccagggtgctttaagattggtaacactggaggaatgatggacaacatcttacactcaaaattgtacagaccaggcagtgtagcttacgtctcaagatctggtggtatgtctaacgaattaaacaacatcgtgtccaaagcaaccgacggagtctacgaaggtgtagctatcggtggagacagataccctggaactactttcatggatcacattatgagatatcaagctgatgataatgttaagatgatcatccttcttggtgaagtaggaggtactgaggaataccaagtatgtaaagcattgcaaaccaaacaaattacaaagcctttggtagcttggtgtataggaacttgcgctggaatgttcacttcagaagtccaattcggccatgcaggatcttgcgctaactcaaaccaagaaactgccacagctaagaacgaagctctcaaggcagccggtgcacacgtacctgattctttcgattatttaggtgatatcgttggcaaagtatacgagcagcttgtaaaacaaggcgtgatagtgccaagaccagaagttcctccaccaaccgtgccaatggactacagttgggctcgtgagttggggcttattagaaaacccgccagcttcatgacttccatctgtgatgaaagaggacaagagctcatatatgcaggtatgcccatttctgatgtgcttcaaaagaacgtaggcatcggcggagtcatatcgcttttgtggttccaaagatgcttacctccgtacgcttgcaaattcttcgagatgtgcttgatggtgacagccgatcatggacctgcagtatcaggagctcacaacaccatagtctgtgcccgtgctggtaaagatctagtttccagtttggtatccggtcttcttacaatcggtgacaggttcggtggagctttggacggtgcagctaagatgttcagtgaagcctatgacaaaggtatgcatcctgccgaattcgttaaccacatgaggaacattggtcagctcatcatgggtattggccacagagtcaaatctatcaacaaccccgatcagagagtaaaaatagtcaaagagttcgtcatggctaacttccccgccactcccttacttcagtacgcactagaagtagaaaaaatcaccaccagcaagaaacccaacctcatccttaacgtcgacggtgtcatcgcatgctccttcgtagatatgttgaggaactgtggtgtcttcacaccggaagaagcccaagaatacatcgacatcggtgctatcaactcattattcgtccttggtagatccatcggatttatcggccattacatggaccaaaagagactcaaacaaggattgtacaggcacccatgggatgacatttcatacgttctacctgaacaatacaacaatgataattagagtatagcatttaactaggtaaaaatcttgtaattattgaccgatagaggtctaggcacgtaccgtggcaccttacgcaatcggctcagtgtgtaagatttaggtttttaggatccaaatgttcgtgaagatgaaactagttatcagttatatttatgtagttaacactatattgaaacatcgacatgttaatctgatgtttttattactttgtttatgttattaaaaagctgtttgtgtacctgcggcatcgcagctgtatgatcgtctatgaaaagaataataaataggaaaaaactactcatgtttccgtcttttacatcgaaatttatagtgtattgttcccatagagtcttctaaagctgtgattgtaggcttaactaatacctcaaaaatattttggtgcctaaaaattattttttatacacttggtctttttgtaaaaacagtttttattgataattgataaatggttaccgtttgtcttgatgttaacaacacagttgctgttaacattattacaaaatatatgcgtgtttcataatgcaaataatgattagtatgcacctaaatgtaattgaagttgaatggtaaatatatctattagtagatccaaccgtcatttgtatcatggttacttttttgttcttgcattatgaactaactgcttagatgttcctctttatatttatatagccgaggcggaatatcgttgttgaccataacattatcgttttccatgttattttaataataattatttttagattttttatattgtagacgttatttattttttgaaaaattatgttgtaacattatgatttaaaattttgtaaatggtagaattttctgataaatataagtgttttatttttgtgaaagtcattcacatggatcaatgtttgactattttgttaacatggcggatttgatcataaatataattttatttcatataaaaa

SEQ ID NO: 1323 - DNA, 4390 bp, Diabrotica virgifera
  SmartBlast Evalue=0; Info=ATP-citrate synthase n=1 Tax=Aedes aegypti RepID=Q17D87_AEDAE
cgacaacatgtcatgtcaaaaatttgtcagcagaatcgtatgatttgaaagtgaattccgaaagcaatttatagtttttgttgtaataaaatagtgaatttttagtaactacctttaattcctgtccagtgtcttcttatttgtcagcccagttttaaaaaatgtcagcaaaagctatacgggaggcgacagggaaacacctcatcaacaaatacctcggcggtaacacagcggccgtacaatgcagatttgcttcagtcgaggctgacactaaattctctgaattagtaagcaacaacccatggttgaaaactgaaaaactagtcgttaaacctgatcaactaatcaaaaggagaggaaaattaggactgatagccgtaaataaagatttaaacaccgtcgtggactgggtaaatgaacgcatgaaccaaaatcaaaaagtcggcaacgccacaggaaaactacgaaacttcatcatcgaacctttcgttccacacaagcaagaagaagaggcttatgtctgcatatactcacatcgtcacgcagacactatcctcttttaccacgaagggggtgtcgatatcggtgatgtcgacagcaaagctcttaaattagatgttcctgttggacagactgtggacgcaggaactatttctaaggtactactaggagaagttccagcagccaaaaaacagatggtagctgattttatcgccaacctttacaaactctacgtggacttgtacttcacatacttagaaattaatcccttagttgtgactgataaggagatctacattttggacttagctgccaaattagatgccactgccgattttatatgcaagccacaatggggtgaaatcgattatcctccacctttcggacgtgatgcttacccagaggaagcctatatagccgacctagattcaaaatctggagctagtcttaaactgacaattctcaacaaatctggtagaatatggacaatggtagctggaggtggagcttctgttatttacagtgacaccatctgtgatttgggtggagctagcgaactcgccaactatggggaatactcaggtgcaccaactgaacaacaaacttacgaatacgccaaaactatcctttccttgatgacccaagaaaagcatcctaaaggaaaagttttgattaccggaggaggtattgccaatttcactaatgtagctgccactttccgcggtatcatcacagctttggtagagttcagggaaaggttgattgaacacaaaatttccattttcgtcagaagagctggacccaattaccaggaaggtttaaggagaatgagagaagtcggacagactttgggtattcctctatacgtcttcggacctgaaactcacatgactgctatttgtggtatggctttgggaactcgcccaattccatcagaaaatcacgtagaaactgccacagcaaatttcgctcttcctagcggtgaaattgaacccaacaaacagcagcttgccagcaaagatggtgcggccaaaccagcagcccctcctgcaaggaatatggtgggagactcaaaagcccttccaatgttcaccaacaatactaaagcaataatttggggaatgcagaaccgtgctatccagagcatgctcgacttcgatttcgtgtgcaacagaaaaagtcccagcgttgtagcaataatctaccccttcactggcgaccacaagcaaaaatactactgggggcacaaagaaatactcattccggtatataaacaaatgagagacgcgatgatgaaacatcctgacgctgatgtcctggttaacttcgcttcattacgttcaggttattctagtaccgtggaaaccctggagtatccacaaatcagaacaattgccatcattgctgaaggtattccagaaaactacaccaggaagttgatcaagttggctgacgagaagaaggtttctattattggacctgccacagttggtggagttaaaccagggtgctttaagattggtaacactggaggaatgatggacaacatcttacactcaaaattgtacagaccaggcagtgtagcttacgtctcaagatctggtggtatgtctaacgaattaaacaacatcgtgtccaaagcaaccgacggagtctacgaaggtgtagctatcggtggagacagataccctggaactactttcatggatcacattatgagatatcaagctgatgataatgttaagatgatcatccttcttggtgaagtaggaggtactgaggaataccaagtatgtaaagcattgcaaaccaaacaaattacaaagcctttggtagcttggtgtataggaacttgcgctggaatgttcacttcagaagtccaattcggccatgcaggatcttgcgctaactcaaaccaagaaactgccacagctaagaacgaagctctcaaggcagccggtgcacacgtacctgattctttcgattatttaggtgatatcgttggcaaagtatacgagcagcttgtaaaacaaggcgtgatagtgccaagaccagaagttcctccaccaaccgtgccaatggactacagttgggctcgtgagttggggcttattagaaaacccgccagcttcatgacttccatctgtgatgaaagaggacaagagctcatatatgcaggtatgcccatttctgatgtgcttcaaaagaacgtaggcatcggcggagtcatatcgcttttgtggttccaaagatgcttacctccgtacgcttgcaaattcttcgagatgtgcttgatggtgacagccgatcatggacctgcagtatcaggagctcacaacaccatagtctgtgcccgtgctggtaaagatctagtttccagtttggtatccggtcttcttacaatcggtgacaggttcggtggagctttggacggtgcagctaagatgttcagtgaagcctatgacaaaggtatgcatcctgccgaattcgttaaccacatgaggaacattggtcagctcatcatgggtattggccacagagtcaaatctatcaacaaccccgatcagagagtaaaaatagtcaaagagttcgtcatggctaacttccccgccactcccttacttcagtacgcactagaagtagaaaaaatcaccaccagcaagaaacccaacctcatccttaacgtcgacggtgtcatcgcatgctccttcgtagatatgttgaggaactgtggtgtcttcacaccggaagaagcccaagaatacatcgacatcggtgctatcaactcattattcgtccttggtagatccatcggatttatcggccattacatggaccaaaagagactcaaacaaggattgtacaggcacccatgggatgacatttcatacgttctacctgaacaatacaacaatgataattagagtatagcatttaactaggtaaaaatcttgtaattattgaccgatagaggtctaggcacgtaccgtggcaccttacgcaatcggctcagtgtgtaagatttaggtttttaggatccaaatgttcgtgaagatgaaactagttatcagttatatttatgtagttaacactatattgaaacatcgacatgttaatctgatgtttttattactttgtttatgttattaaaaagctgtttgtgtacctgcggcatcgcagctgtatgatcgtctatgaaaagaataataaataggaaaaaactactcatgtttccgtcttttacatcgaaatttatagtgtattgttcccatagagtcttctaaagctgtgattgtaggcttaactaatacctcaaaaatattttggtgcctaaaaattattttttatacacttggtctttttgtaaaaacagtttttattgataattgataaatggttaccgtttgtcttgatgttaacaacacagttgctgttaacattattacaaaatatatgcgtgtttcataatgcaaataatgattagtatgcacctaaatgtaattgaagttgaatggtaaatatatctattagtagatccaaccgtcatttgtatcatggttacttttttgttcttgcattatgaactaactgcttagatgttcctctttatatttatatagccgaggcggaatatcgttgttgaccataacattatcgttttccatgttattttaataataattatttttagattttttatattgtagacgttatttattttttgaaaaattatgttgtaacattatgatttaaaattttgtaaatggtagaattttctgataaatataagtgttttatttttgtgaaagtcattcacatggatcaatgtttgactattttgttaacatggcggatttgatcataaatataattttatttcatataaaaa

SEQ ID NO: 1324 - DNA, 4447 bp, Diabrotica virgifera
  SmartBlast Evalue=0; Info=ATP-citrate synthase n=1 Tax=Aedes aegypti RepID=Q17D87_AEDAE
gtaccgtttttgcgcggtgacaggacagtcctcttgcggcatttaccaaggtaggtcctacacgatcgccccgttcctcgttcaaaccgttcgctgcaggctgtgaaagttttttgacgcacaccatacacctctagatttttacgcgttcgaaagtgccatcgcttcgcgctacataaactttctgtgatattgttaaaaagtagaaattttaaaaaatgtcagcaaaagctatacgggaggcgacagggaaacacctcatcaacaaatacctcggcggtaacacagcggccgtacaatgcagatttgcttcagtcgaggctgacactaaattctctgaattagtaagcaacaacccatggttgaaaactgaaaaactagtcgttaaacctgatcaactaatcaaaaggagaggaaaattaggactgatagccgtaaataaagatttaaacaccgtcgtggactgggtaaatgaacgcatgaaccaaaatcaaaaagtcggcaacgccacaggaaaactacgaaacttcatcatcgaacctttcgttccacacaagcaagaagaagaggcttatgtctgcatatactcacatcgtcacgcagacactatcctcttttaccacgaagggggtgtcgatatcggtgatgtcgacagcaaagctcttaaattagatgttcctgttggacagactgtggacgcaggaactatttctaaggtactactaggagaagttccagcagccaaaaaacagatggtagctgattttatcgccaacctttacaaactctacgtggacttgtacttcacatacttagaaattaatcccttagttgtgactgataaggagatctacattttggacttagctgccaaattagatgccactgccgattttatatgcaagccacaatggggtgaaatcgattatcctccacctttcggacgtgatgcttacccagaggaagcctatatagccgacctagattcaaaatctggagctagtcttaaactgacaattctcaacaaatctggtagaatatggacaatggtagctggaggtggagcttctgttatttacagtgacaccatctgtgatttgggtggagctagcgaactcgccaactatggggaatactcaggtgcaccaactgaacaacaaacttacgaatacgccaaaaccatcctttccttgatgacacaagaaaagcatcctaaaggaaaagttctgattaccggagggggtattgccaatttcactaatgtagctgccactttccgcggtatcatcacggctttggtagagttcagggaaaggttgattgaacacaaaatttccatcttcgtcagaagagctggacccaattaccaggaaggtttaaggagaatgagagaagtcggacagactttgggtattcctctatacgtcttcggacctgaaactcacatgactgctatttgtggtatggctttgggaactcgcccaattccatcagaaaatcacgtagaaactgccacagcaaatttcgctcttcctagcggtgaaattgaacccaacaaacagcagcttgccagcaaagatggtgcggccaaaccagcagcccctccggcaaggaatatggtgggagactcaaaagcccttccaatgttcaccaacaatactaaagcaataatttggggaatgcagaaccgtgctatccagagcatgctcgacttcgatttcgtgtgcaacagaaaaagtcccagcgttgtagcaataatctaccccttcactggcgaccacaagcaaaaatactactgggggcacaaagaaatactcattccggtatataaacaaatgagagacgcgatgatgaaacatcctgacgctgatgtcctggttaacttcgcttcattacgttcaggttattctagtaccgtggaaaccctggagtatccacaaatcagaacaattgccatcattgctgaaggtattccagaaaactacaccaggaagttgatcaagttggctgacgagaagaaggtttctattattggacctgccacagttggtggagttaaaccagggtgctttaagattggtaacactggaggaatgatggacaacatcttacactcaaaattgtacagaccaggcagtgtagcttacgtctcaagatctggtggtatgtctaacgaattaaacaacatcgtgtccaaagcaaccgacggagtctacgaaggtgtagctatcggtggagacagataccctggaactactttcatggatcacattatgagatatcaagctgatgataatgttaagatgatcatccttcttggtgaagtaggaggtactgaggaataccaagtatgtaaagcattgcaaaccaaacaaattacaaagcctttggtagcttggtgtataggaacttgcgctggaatgttcacttcagaagtccaattcggccatgcaggatcttgcgctaactcaaaccaagaaactgccacagctaagaacgaagctctcaaggcagccggtgcacacgtacctgattctttcgattatttaggtgatatcgttggcaaagtatacgagcagcttgtaaaacaaggcgtgatagtgccaagaccagaagttcctccaccaaccgtgccaatggactacagttgggctcgtgagttggggcttattagaaaacccgccagcttcatgacttccatctgtgatgaaagaggacaagagctcatatatgcaggtatgcccatttctgatgtgcttcaaaagaacgtaggcatcggcggagtcatatcgcttttgtggttccaaagatgcttacctccgtacgcttgcaaattcttcgagatgtgcttgatggtgacagccgatcatggacctgcagtatcaggagctcacaacaccatagtctgtgcccgtgctggtaaagatctagtttccagtttggtatccggtcttcttacaatcggtgacaggttcggtggagctttggacggtgcagctaagatgttcagtgaagcctatgacaaaggtatgcatcctgccgaattcgttaaccacatgaggaacattggtcagctcatcatgggtattggccacagagtcaaatctatcaacaaccccgatcagagagtaaaaatagtcaaagagttcgtcatggctaacttccccgccactcccttacttcagtacgcactagaagtagaaaaaatcaccaccagcaagaaacccaacctcatccttaacgtcgacggtgtcatcgcatgctccttcgtagatatgttgaggaactgtggtgtcttcacaccggaagaagcccaagaatacatcgacatcggtgctatcaactcattattcgtccttggtagatccatcggatttatcggccattacatggaccaaaagagactcaaacaaggattgtacaggcacccatgggatgacatttcatacgttctacctgaacaatacaacaatgataattagagtatagcatttaactaggtaaaaatcttgtaattattgaccgatagaggtctaggcacgtaccgtggcaccttacgcaatcggctcagtgtgtaagatttaggtttttaggatccaaatgttcgtgaagatgaaactagttatcagttatatttatgtagttaacactatattgaaacatcgacatgttaatctgatgtttttattactttgtttatgttattaaaaagctgtttgtgtacctgcggcatcgcagctgtatgatcgtctatgaaaagaataataaataggaaaaaactactcatgtttccgtcttttacatcgaaatttatagtgtattgttcccatagagtcttctaaagctgtgattgtaggcttaactaatacctcaaaaatattttggtgcctaaaaattattttttatacacttggtctttttgtaaaaacagtttttattgataattgataaatggttaccgtttgtcttgatgttaacaacacagttgctgttaacattattacaaaatatatgcgtgtttcataatgcaaataatgattagtatgcacctaaatgtaattgaagttgaatggtaaatatatctattagtagatccaaccgtcatttgtatcatggttacttttttgttcttgcattatgaactaactgcttagatgttcctctttatatttatatagccgaggcggaatatcgttgttgaccataacattatcgttttccatgttattttaataataattatttttagattttttatattgtagacgttatttattttttgaaaaattatgttgtaacattatgatttaaaattttgtaaatggtagaattttctgataaatataagtgttttatttttgtgaaagtcattcacatggatcaatgtttgactattttgttaacatggcggatttgatcataaatataattttatttcatataaaaa

SEQ ID NO: 1325 - DNA, 4390 bp, Diabrotica virgifera
  SmartBlast Evalue=0; Info=ATP-citrate synthase n=1 Tax=Aedes aegypti RepID=Q17D87_AEDAE
cgacaacatgtcatgtcaaaaatttgtcagcagaatcgtatgatttgaaagtgaattccgaaagcaatttatagtttttgttgtaataaaatagtgaatttttagtaactacctttaattcctgtccagtgtcttcttatttgtcagcccagttttaaaaaatgtcagcaaaagctatacgggaggcgacagggaaacacctcatcaacaaatacctcggcggtaacacagcggccgtacaatgcagatttgcttcagtcgaggctgacactaaattctctgaattagtaagcaacaacccatggttgaaaactgaaaaactagtcgttaaacctgatcaactaatcaaaaggagaggaaaattaggactgatagccgtaaataaagatttaaacaccgtcgtggactgggtaaatgaacgcatgaaccaaaatcaaaaagtcggcaacgccacaggaaaactacgaaacttcatcatcgaacctttcgttccacacaagcaagaagaagaggcttatgtctgcatatactcacatcgtcacgcagacactatcctcttttaccacgaagggggtgtcgatatcggtgatgtcgacagcaaagctcttaaattagatgttcctgttggacagactgtggacgcaggaactatttctaaggtactactaggagaagttccagcagccaaaaaacagatggtagctgattttatcgccaacctttacaaactctacgtggacttgtacttcacatacttagaaattaatcccttagttgtgactgataaggagatctacattttggacttagctgccaaattagatgccactgccgattttatatgcaagccacaatggggtgaaatcgattatcctccacctttcggacgtgatgcttacccagaggaagcctatatagccgacctagattcaaaatctggagctagtcttaaactgacaattctcaacaaatctggtagaatatggacaatggtagctggaggtggagcttctgttatttacagtgacaccatctgtgatttgggtggagctagcgaactcgccaactatggggaatactcaggtgcaccaactgaacaacaaacttacgaatacgccaaaactatcctttccttgatgacccaagaaaagcatcctaaaggaaaagttttgattaccggaggaggtattgccaatttcactaatgtagctgccactttccgcggtatcatcacagctttggtagagttcagggaaaggttgattgaacacaaaatttccattttcgtcagaagagctggacccaattaccaggaaggtttaaggagaatgagagaagtcggacagactttgggtattcctctatacgtcttcggacctgaaactcacatgactgctatttgtggtatggctttgggaactcgcccaattccatcagaaaatcacgtagaaactgccacagcaaatttcgctcttcctagcggtgaaattgaacccaacaaacagcagcttgccagcaaagatggtgcggccaaaccagcagcccctcctgcaaggaatatggtgggagactcaaaagcccttccaatgttcaccaacaatactaaagcaataatttggggaatgcagaaccgtgctatccagagcatgcttgacttcgatttcgtgtgcaacagaaaaagtcccagcgttgtagcaataatttaccccttcactggcgaccacaagcaaaaatactactggggacacaaagaaatactcattccggtatacaaacaaatgagagacgcgatgatgaaacatcctgacgctgatgtccttgttaacttcgcttcattacgttcaggttattctagtaccgtggaaaccctggagtatccacaaatcagaacaattgccatcattgctgaaggtattccagaaaactacaccaggaagttgatcaagttggctgacgagaagaaggtttctattattggacctgccacagttggtggagttaaaccagggtgctttaagattggtaacactggaggaatgatggacaacatcttacactcaaaattgtacagaccaggcagtgtagcttacgtctcaagatctggtggtatgtctaacgaattaaacaacatcgtgtccaaagcaaccgacggagtctacgaaggtgtagctatcggtggagacagataccctggaactactttcatggatcacattatgagatatcaagctgatgataatgttaagatgatcatccttcttggtgaagtaggaggtactgaggaataccaagtatgtaaagcattgcaaaccaaacaaattacaaagcctttggtagcttggtgtataggaacttgcgctggaatgttcacttcagaagtccaattcggccatgcaggatcttgcgctaactcaaaccaagaaactgccacagctaagaacgaagctctcaaggcagccggtgcacacgtacctgattctttcgattatttaggtgatatcgttggcaaagtatacgagcagcttgtaaaacaaggcgtgatagtgccaagaccagaagttcctccaccaaccgtgccaatggactacagttgggctcgtgagttggggcttattagaaaacccgccagcttcatgacttccatctgtgatgaaagaggacaagagctcatatatgcaggtatgcccatttctgatgtgcttcaaaagaacgtaggcatcggcggagtcatatcgcttttgtggttccaaagatgcttacctccgtacgcttgcaaattcttcgagatgtgcttgatggtgacagccgatcatggacctgcagtatcaggagctcacaacaccatagtctgtgcccgtgctggtaaagatctagtttccagtttggtatccggtcttcttacaatcggtgacaggttcggtggagctttggacggtgcagctaagatgttcagtgaagcctatgacaaaggtatgcatcctgccgaattcgttaaccacatgaggaacattggtcagctcatcatgggtattggccacagagtcaaatctatcaacaaccccgatcagagagtaaaaatagtcaaagagttcgtcatggctaacttccccgccactcccttacttcagtacgcactagaagtagaaaaaatcaccaccagcaagaaacccaacctcatccttaacgtcgacggtgtcatcgcatgctccttcgtagatatgttgaggaactgtggtgtcttcacaccggaagaagcccaagaatacatcgacatcggtgctatcaactcattattcgtccttggtagatccatcggatttatcggccattacatggaccaaaagagactcaaacaaggattgtacaggcacccatgggatgacatttcatacgttctacctgaacaatacaacaatgataattagagtatagcatttaactaggtaaaaatcttgtaattattgaccgatagaggtctaggcacgtaccgtggcaccttacgcaatcggctcagtgtgtaagatttaggtttttaggatccaaatgttcgtgaagatgaaactagttatcagttatatttatgtagttaacactatattgaaacatcgacatgttaatctgatgtttttattactttgtttatgttattaaaaagctgtttgtgtacctgcggcatcgcagctgtatgatcgtctatgaaaagaataataaataggaaaaaactactcatgtttccgtcttttacatcgaaatttatagtgtattgttcccatagagtcttctaaagctgtgattgtaggcttaactaatacctcaaaaatattttggtgcctaaaaattattttttatacacttggtctttttgtaaaaacagtttttattgataattgataaatggttaccgtttgtcttgatgttaacaacacagttgctgttaacattattacaaaatatatgcgtgtttcataatgcaaataatgattagtatgcacctaaatgtaattgaagttgaatggtaaatatatctattagtagatccaaccgtcatttgtatcatggttacttttttgttcttgcattatgaactaactgcttagatgttcctctttatatttatatagccgaggcggaatatcgttgttgaccataacattatcgttttccatgttattttaataataattatttttagattttttatattgtagacgttatttattttttgaaaaattatgttgtaacattatgatttaaaattttgtaaatggtagaattttctgataaatataagtgttttatttttgtgaaagtcattcacatggatcaatgtttgactattttgttaacatggcggatttgatcataaatataattttatttcatataaaaa

SEQ ID NO: 1326 - DNA, 4390 bp, Diabrotica virgifera
  SmartBlast Evalue=0; Info=ATP-citrate synthase n=1 Tax=Aedes aegypti RepID=Q17D87_AEDAE
cgacaacatgtcatgtcaaaaatttgtcagcagaatcgtatgatttgaaagtgaattccgaaagcaatttatagtttttgttgtaataaaatagtgaatttttagtaactacctttaattcctgtccagtgtcttcttatttgtcagcccagttttaaaaaatgtcagcaaaagctatacgggaggcgacagggaaacacctcatcaacaaatacctcggcggtaacacagcggccgtacaatgcagatttgcttcagtcgaggctgacactaaattctctgaattagtaagcaacaacccatggttgaaaactgaaaaactagtcgttaaacctgatcaactaatcaaaaggagaggaaaattaggactgatagccgtaaataaagatttaaacaccgtcgtggactgggtaaatgaacgcatgaaccaaaatcaaaaagtcggcaacgccacaggaaaactacgaaacttcatcatcgaacctttcgttccacacaagcaagaagaagaggcttatgtctgcatatactcacatcgtcacgcagacactatcctcttttaccacgaagggggtgtcgatatcggtgatgtcgacagcaaagctcttaaattagatgttcctgttggacagactgtggacgcaggaactatttctaaggtactactaggagaagttccagcagccaaaaaacagatggtagctgattttatcgccaacctttacaaactctacgtggacttgtacttcacatacttagaaattaatcccttagttgtgactgataaggagatctacattttggacttagctgccaaattagatgccactgccgattttatatgcaagccacaatggggtgaaatcgattatcctccacctttcggacgtgatgcttacccagaggaagcctatatagccgacctagattcaaaatctggagctagtcttaaactgacaattctcaacaaatctggtagaatatggacaatggtagctggaggtggagcttctgttatttacagtgacaccatctgtgatttgggtggagctagcgaactcgccaactatggggaatactcaggtgcaccaactgaacaacaaacttacgaatacgccaaaactatcctttccttgatgacccaagaaaagcatcctaaaggaaaagttttgattaccggaggaggtattgccaatttcactaatgtagctgccactttccgcggtatcatcacagctttggtagagttcagggaaaggttgattgaacacaaaatttccattttcgtcagaagagctggacccaattaccaggaaggtttaaggagaatgagagaagtcggacagactttgggtattcctctatacgtcttcggacctgaaactcacatgactgctatttgtggtatggctttgggaactcgcccaattccatcagaaaatcacgtagaaactgccacagcaaatttcgctcttcctagcggtgaaattgaacccaacaaacagcagcttgccagcaaagatggtgcggccaaaccagcagcccctcctgcaaggaatatggtgggagactcaaaagcccttccaatgttcaccaacaatactaaagccataatttggggaatgcagaaccgtgctatccagagcatgctcgacttcgatttcgtgtgcaacagaaaaagccccagcgttgtagcaataatctaccccttcactggcgaccacaagcaaaaatactactggggacacaaagaaatacttattccggtatataaacaaatgagagacgcgatgatgaaacatcctgacgctgatgtccttgttaacttcgcttcattacgttcaggttattctagtaccgtggaaaccctggagtatccacaaatcagaacaattgccatcattgctgaaggtattccagaaaactacaccaggaagttgatcaagttggctgacgagaagaaggtttctattattggacctgccacagttggtggagttaaaccagggtgctttaagattggtaacactggaggaatgatggacaacatcttacactcaaaattgtacagaccaggcagtgtagcttacgtctcaagatctggtggtatgtctaacgaattaaacaacatcgtgtccaaagcaaccgacggagtctacgaaggtgtagctatcggtggagacagataccctggaactactttcatggatcacattatgagatatcaagctgatgataatgttaagatgatcatccttcttggtgaagtaggaggtactgaggaataccaagtatgtaaagcattgcaaaccaaacaaattacaaagcctttggtagcttggtgtataggaacttgcgctggaatgttcacttcagaagtccaattcggccatgcaggatcttgcgctaactcaaaccaagaaactgccacagctaagaacgaagctctcaaggcagccggtgcacacgtacctgattctttcgattatttaggtgatatcgttggcaaagtatacgagcagcttgtaaaacaaggcgtgatagtgccaagaccagaagttcctccaccaaccgtgccaatggactacagttgggctcgtgagttggggcttattagaaaacccgccagcttcatgacttccatctgtgatgaaagaggacaagagctcatatatgcaggtatgcccatttctgatgtgcttcaaaagaacgtaggcatcggcggagtcatatcgcttttgtggttccaaagatgcttacctccgtacgcttgcaaattcttcgagatgtgcttgatggtgacagccgatcatggacctgcagtatcaggagctcacaacaccatagtctgtgcccgtgctggtaaagatctagtttccagtttggtatccggtcttcttacaatcggtgacaggttcggtggagctttggacggtgcagctaagatgttcagtgaagcctatgacaaaggtatgcatcctgccgaattcgttaaccacatgaggaacattggtcagctcatcatgggtattggccacagagtcaaatctatcaacaaccccgatcagagagtaaaaatagtcaaagagttcgtcatggctaacttccccgccactcccttacttcagtacgcactagaagtagaaaaaatcaccaccagcaagaaacccaacctcatccttaacgtcgacggtgtcatcgcatgctccttcgtagatatgttgaggaactgtggtgtcttcacaccggaagaagcccaagaatacatcgacatcggtgctatcaactcattattcgtccttggtagatccatcggatttatcggccattacatggaccaaaagagactcaaacaaggattgtacaggcacccatgggatgacatttcatacgttctacctgaacaatacaacaatgataattagagtatagcatttaactaggtaaaaatcttgtaattattgaccgatagaggtctaggcacgtaccgtggcaccttacgcaatcggctcagtgtgtaagatttaggtttttaggatccaaatgttcgtgaagatgaaactagttatcagttatatttatgtagttaacactatattgaaacatcgacatgttaatctgatgtttttattactttgtttatgttattaaaaagctgtttgtgtacctgcggcatcgcagctgtatgatcgtctatgaaaagaataataaataggaaaaaactactcatgtttccgtcttttacatcgaaatttatagtgtattgttcccatagagtcttctaaagctgtgattgtaggcttaactaatacctcaaaaatattttggtgcctaaaaattattttttatacacttggtctttttgtaaaaacagtttttattgataattgataaatggttaccgtttgtcttgatgttaacaacacagttgctgttaacattattacaaaatatatgcgtgtttcataatgcaaataatgattagtatgcacctaaatgtaattgaagttgaatggtaaatatatctattagtagatccaaccgtcatttgtatcatggttacttttttgttcttgcattatgaactaactgcttagatgttcctctttatatttatatagccgaggcggaatatcgttgttgaccataacattatcgttttccatgttattttaataataattatttttagattttttatattgtagacgttatttattttttgaaaaattatgttgtaacattatgatttaaaattttgtaaatggtagaattttctgataaatataagtgttttatttttgtgaaagtcattcacatggatcaatgtttgactattttgttaacatggcggatttgatcataaatataattttatttcatataaaaa

SEQ ID NO: 1327 - DNA, 4390 bp, Diabrotica virgifera
  SmartBlast Evalue=0; Info=ATP-citrate synthase n=1 Tax=Aedes aegypti RepID=Q17D87_AEDAE
cgacaacatgtcatgtcaaaaatttgtcagcagaatcgtatgatttgaaagtgaattccgaaagcaatttatagtttttgttgtaataaaatagtgaatttttagtaactacctttaattcctgtccagtgtcttcttatttgtcagcccagttttaaaaaatgtcagcaaaagctatacgggaggcgacagggaaacacctcatcaacaaatacctcggcggtaacacagcggccgtacaatgcagatttgcttcagtcgaggctgacactaaattctctgaattagtaagcaacaacccatggttgaaaaccgaaaaactagtcgttaaacctgatcaactaatcaaaaggagaggaaaattaggactgatagccgtaaataaagatttaaacaccgtcgtggactgggtaaatgaacgcatgaaccaaaatcaaaaagtcggcaacgccacaggaaaactacgaaactttatcatcgaacctttcgttccacacaagcaagaagaagaggcttatgtctgcatatactcacatcgtcacgcagacactatcctcttttaccacgaagggggtgtcgatatcggtgatgtcgacagcaaagctcttaagttagatgttcctgttggagagactgtggacgcagcaactatttcaaaggtactactaggagaagttccagcagccaaaaaacagatggtagctgattttatcgccaacctttacaaactctacgtggacttgtacttcacatacttagaaattaatcccttagttgtgactgataaggagatctacattttggacttagctgccaaattagatgccactgccgattttatatgcaagccacaatggggtgaaatcgattatcctccacctttcggacgtgatgcttacccagaggaagcctatatagccgacctagattcaaaatctggagctagtcttaaactgacaattctcaacaaatctggtagaatatggacaatggtagctggaggtggagcttctgttatttacagtgacaccatctgtgatttgggtggagctagcgaactcgccaactatggggaatactcaggtgcaccaactgaacaacaaacttacgaatacgccaaaactatcctttccttgatgacccaagaaaagcatcctaaaggaaaagttttgattaccggaggaggtattgccaatttcactaatgtagctgccactttccgcggtatcatcacagctttggtagagttcagggaaaggttgattgaacacaaaatttccattttcgtcagaagagctggacccaattaccaggaaggtttaaggagaatgagagaagtcggacagactttgggtattcctctatacgtcttcggacctgaaactcacatgactgctatttgtggtatggctttgggaactcgcccaattccatcagaaaatcacgtagaaactgccacagcaaatttcgctcttcctagcggtgaaattgaacccaacaaacagcagcttgccagcaaagatggtgcggccaaaccagcagcccctcctgcaaggaatatggtgggagactcaaaagcccttccaatgttcaccaacaatactaaagcaataatttggggaatgcagaaccgtgctatccagagcatgctcgacttcgatttcgtgtgcaacagaaaaagtcccagcgttgtagcaataatctaccccttcactggcgaccacaagcaaaaatactactgggggcacaaagaaatactcattccggtatataaacaaatgagagacgcgatgatgaaacatcctgacgctgatgtcctggttaacttcgcttcattacgttcaggttattctagtaccgtggaaaccctggagtatccacaaatcagaacaattgccatcattgctgaaggtattccagaaaactacaccaggaagttgatcaagttggctgacgagaagaaggtttctattattggacctgccacagttggtggagttaaaccagggtgctttaagattggtaacactggaggaatgatggacaacatcttacactcaaaattgtacagaccaggcagtgtagcttacgtctcaagatctggtggtatgtctaacgaattaaacaacatcgtgtccaaagcaaccgacggagtctacgaaggtgtagctatcggtggagacagataccctggaactactttcatggatcacattatgagatatcaagctgatgataatgttaagatgatcatccttcttggtgaagtaggaggtactgaggaataccaagtatgtaaagcattgcaaaccaaacaaattacaaagcctttggtagcttggtgtataggaacttgcgctggaatgttcacttcagaagtccaattcggccatgcaggatcttgcgctaactcaaaccaagaaactgccacagctaagaacgaagctctcaaggcagccggtgcacacgtacctgattctttcgattatttaggtgatatcgttggcaaagtatacgagcagcttgtaaaacaaggcgtgatagtgccaagaccagaagttcctccaccaaccgtgccaatggactacagttgggctcgtgagttggggcttattagaaaacccgccagcttcatgacttccatctgtgatgaaagaggacaagagctcatatatgcaggtatgcccatttctgatgtgcttcaaaagaacgtaggcatcggcggagtcatatcgcttttgtggttccaaagatgcttacctccgtacgcttgcaaattcttcgagatgtgcttgatggtgacagccgatcatggacctgcagtatcaggagctcacaacaccatagtctgtgcccgtgctggtaaagatctagtttccagtttggtatccggtcttcttacaatcggtgacaggttcggtggagctttggacggtgcagctaagatgttcagtgaagcctatgacaaaggtatgcatcctgccgaattcgttaaccacatgaggaacattggtcagctcatcatgggtattggccacagagtcaaatctatcaacaaccccgatcagagagtaaaaatagtcaaagagttcgtcatggctaacttccccgccactcccttacttcagtacgcactagaagtagaaaaaatcaccaccagcaagaaacccaacctcatccttaacgtcgacggtgtcatcgcatgctccttcgtagatatgttgaggaactgtggtgtcttcacaccggaagaagcccaagaatacatcgacatcggtgctatcaactcattattcgtccttggtagatccatcggatttatcggccattacatggaccaaaagagactcaaacaaggattgtacaggcacccatgggatgacatttcatacgttctacctgaacaatacaacaatgataattagagtatagcatttaactaggtaaaaatcttgtaattattgaccgatagaggtctaggcacgtaccgtggcaccttacgcaatcggctcagtgtgtaagatttaggtttttaggatccaaatgttcgtgaagatgaaactagttatcagttatatttatgtagttaacactatattgaaacatcgacatgttaatctgatgtttttattactttgtttatgttattaaaaagctgtttgtgtacctgcggcatcgcagctgtatgatcgtctatgaaaagaataataaataggaaaaaactactcatgtttccgtcttttacatcgaaatttatagtgtattgttcccatagagtcttctaaagctgtgattgtaggcttaactaatacctcaaaaatattttggtgcctaaaaattattttttatacacttggtctttttgtaaaaacagtttttattgataattgataaatggttaccgtttgtcttgatgttaacaacacagttgctgttaacattattacaaaatatatgcgtgtttcataatgcaaataatgattagtatgcacctaaatgtaattgaagttgaatggtaaatatatctattagtagatccaaccgtcatttgtatcatggttacttttttgttcttgcattatgaactaactgcttagatgttcctctttatatttatatagccgaggcggaatatcgttgttgaccataacattatcgttttccatgttattttaataataattatttttagattttttatattgtagacgttatttattttttgaaaaattatgttgtaacattatgatttaaaattttgtaaatggtagaattttctgataaatataagtgttttatttttgtgaaagtcattcacatggatcaatgtttgactattttgttaacatggcggatttgatcataaatataattttatttcatataaaaa

SEQ ID NO: 1328 - DNA, 4390 bp, Diabrotica virgifera
  SmartBlast Evalue=0; Info=ATP-citrate synthase n=1 Tax=Aedes aegypti RepID=Q17D87_AEDAE
cgacaacatgtcatgtcaaaaatttgtcagcagaatcgtatgatttgaaagtgaattccgaaagcaatttatagtttttgttgtaataaaatagtgaatttttagtaactacctttaattcctgtccagtgtcttcttatttgtcagcccagttttaaaaaatgtcagcaaaagctatacgggaggcgacagggaaacacctcatcaacaaatacctcggcggtaacacagcggccgtacaatgcagatttgcttcagtcgaggctgacactaaattctctgaattagtaagcaacaacccatggttgaaaaccgaaaaactagtcgttaaacctgatcaactaatcaaaaggagaggaaaattaggactgatagccgtaaataaagatttaaacaccgtcgtggactgggtaaatgaacgcatgaaccaaaatcaaaaagtcggcaacgccacaggaaaactacgaaactttatcatcgaacctttcgttccacacaagcaagaagaagaggcttatgtctgcatatactcacatcgtcacgcagacactatcctcttttaccacgaagggggtgtcgatatcggtgatgtcgacagcaaagctcttaagttagatgttcctgttggagagactgtggacgcagcaactatttcaaaggtactactaggagaagttccagcagccaaaaaacagatggtagctgattttatcgccaacctttacaaactctacgtggacttgtacttcacatacttagaaattaatcccttagttgtgactgataaggagatctacattttggacttagctgccaaattagatgccactgccgattttatatgcaagccacaatggggtgaaatcgattatcctccacctttcggacgtgatgcttacccagaggaagcctatatagccgacctagattcaaaatctggagctagtcttaaactgacaattctcaacaaatctggtagaatatggacaatggtagctggaggtggagcttctgttatttacagtgacaccatctgtgatttgggtggagctagcgaactcgccaactatggggaatactcaggtgcaccaactgaacaacaaacttacgaatacgccaaaactatcctttccttgatgacccaagaaaagcatcctaaaggaaaagttttgattaccggaggaggtattgccaatttcactaatgtagctgccactttccgcggtatcatcacagctttggtagagttcagggaaaggttgattgaacacaaaatttccattttcgtcagaagagctggacccaattaccaggaaggtttaaggagaatgagagaagtcggacagactttgggtattcctctatacgtcttcggacctgaaactcacatgactgctatttgtggtatggctttgggaactcgcccaattccatcagaaaatcacgtagaaactgccacagcaaatttcgctcttcctagcggtgaaattgaacccaacaaacagcagcttgccagcaaagatggtgcggccaaaccagcagcccctcctgcaaggaatatggtgggagactcaaaagcccttccaatgttcaccaacaatactaaagcaataatttggggaatgcagaaccgtgctatccagagcatgcttgacttcgatttcgtgtgcaacagaaaaagtcccagcgttgtagcaataatttaccccttcactggcgaccacaagcaaaaatactactggggacacaaagaaatactcattccggtatacaaacaaatgagagacgcgatgatgaaacatcctgacgctgatgtccttgttaacttcgcttcattacgttcaggttattctagtaccgtggaaaccctggagtatccacaaatcagaacaattgccatcattgctgaaggtattccagaaaactacaccaggaagttgatcaagttggctgacgagaagaaggtttctattattggacctgccacagttggtggagttaaaccagggtgctttaagattggtaacactggaggaatgatggacaacatcttacactcaaaattgtacagaccaggcagtgtagcttacgtctcaagatctggtggtatgtctaacgaattaaacaacatcgtgtccaaagcaaccgacggagtctacgaaggtgtagctatcggtggagacagataccctggaactactttcatggatcacattatgagatatcaagctgatgataatgttaagatgatcatccttcttggtgaagtaggaggtactgaggaataccaagtatgtaaagcattgcaaaccaaacaaattacaaagcctttggtagcttggtgtataggaacttgcgctggaatgttcacttcagaagtccaattcggccatgcaggatcttgcgctaactcaaaccaagaaactgccacagctaagaacgaagctctcaaggcagccggtgcacacgtacctgattctttcgattatttaggtgatatcgttggcaaagtatacgagcagcttgtaaaacaaggcgtgatagtgccaagaccagaagttcctccaccaaccgtgccaatggactacagttgggctcgtgagttggggcttattagaaaacccgccagcttcatgacttccatctgtgatgaaagaggacaagagctcatatatgcaggtatgcccatttctgatgtgcttcaaaagaacgtaggcatcggcggagtcatatcgcttttgtggttccaaagatgcttacctccgtacgcttgcaaattcttcgagatgtgcttgatggtgacagccgatcatggacctgcagtatcaggagctcacaacaccatagtctgtgcccgtgctggtaaagatctagtttccagtttggtatccggtcttcttacaatcggtgacaggttcggtggagctttggacggtgcagctaagatgttcagtgaagcctatgacaaaggtatgcatcctgccgaattcgttaaccacatgaggaacattggtcagctcatcatgggtattggccacagagtcaaatctatcaacaaccccgatcagagagtaaaaatagtcaaagagttcgtcatggctaacttccccgccactcccttacttcagtacgcactagaagtagaaaaaatcaccaccagcaagaaacccaacctcatccttaacgtcgacggtgtcatcgcatgctccttcgtagatatgttgaggaactgtggtgtcttcacaccggaagaagcccaagaatacatcgacatcggtgctatcaactcattattcgtccttggtagatccatcggatttatcggccattacatggaccaaaagagactcaaacaaggattgtacaggcacccatgggatgacatttcatacgttctacctgaacaatacaacaatgataattagagtatagcatttaactaggtaaaaatcttgtaattattgaccgatagaggtctaggcacgtaccgtggcaccttacgcaatcggctcagtgtgtaagatttaggtttttaggatccaaatgttcgtgaagatgaaactagttatcagttatatttatgtagttaacactatattgaaacatcgacatgttaatctgatgtttttattactttgtttatgttattaaaaagctgtttgtgtacctgcggcatcgcagctgtatgatcgtctatgaaaagaataataaataggaaaaaactactcatgtttccgtcttttacatcgaaatttatagtgtattgttcccatagagtcttctaaagctgtgattgtaggcttaactaatacctcaaaaatattttggtgcctaaaaattattttttatacacttggtctttttgtaaaaacagtttttattgataattgataaatggttaccgtttgtcttgatgttaacaacacagttgctgttaacattattacaaaatatatgcgtgtttcataatgcaaataatgattagtatgcacctaaatgtaattgaagttgaatggtaaatatatctattagtagatccaaccgtcatttgtatcatggttacttttttgttcttgcattatgaactaactgcttagatgttcctctttatatttatatagccgaggcggaatatcgttgttgaccataacattatcgttttccatgttattttaataataattatttttagattttttatattgtagacgttatttattttttgaaaaattatgttgtaacattatgatttaaaattttgtaaatggtagaattttctgataaatataagtgttttatttttgtgaaagtcattcacatggatcaatgtttgactattttgttaacatggcggatttgatcataaatataattttatttcatataaaaa

SEQ ID NO: 1329 - DNA, 4390 bp, Diabrotica virgifera
  SmartBlast Evalue=0; Info=ATP-citrate synthase n=1 Tax=Aedes aegypti RepID=Q17D87_AEDAE
cgacaacatgtcatgtcaaaaatttgtcagcagaatcgtatgatttgaaagtgaattccgaaagcaatttatagtttttgttgtaataaaatagtgaatttttagtaactacctttaattcctgtccagtgtcttcttatttgtcagcccagttttaaaaaatgtcagcaaaagctatacgggaggcgacagggaaacacctcatcaacaaatacctcggcggtaacacagcggccgtacaatgcagatttgcttcagtcgaggctgacactaaattctctgaattagtaagcaacaacccatggttgaaaaccgaaaaactagtcgttaaacctgatcaactaatcaaaaggagaggaaaattaggactgatagccgtaaataaagatttaaacaccgtcgtggactgggtaaatgaacgcatgaaccaaaatcaaaaagtcggcaacgccacaggaaaactacgaaactttatcatcgaacctttcgttccacacaagcaagaagaagaggcttatgtctgcatatactcacatcgtcacgcagacactatcctcttttaccacgaagggggtgtcgatatcggtgatgtcgacagcaaagctcttaagttagatgttcctgttggagagactgtggacgcagcaactatttcaaaggtactactaggagaagttccagcagccaaaaaacagatggtagctgattttatcgccaacctttacaaactctacgtggacttgtacttcacatacttagaaattaatcccttagttgtgactgataaggagatctacattttggacttagctgccaaattagatgccactgccgattttatatgcaagccacaatggggtgaaatcgattatcctccacctttcggacgtgatgcttacccagaggaagcctatatagccgacctagattcaaaatctggagctagtcttaaactgacaattctcaacaaatctggtagaatatggacaatggtagctggaggtggagcttctgttatttacagtgacaccatctgtgatttgggtggagctagcgaactcgccaactatggggaatactcaggtgcaccaactgaacaacaaacttacgaatacgccaaaactatcctttccttgatgacccaagaaaagcatcctaaaggaaaagttttgattaccggaggaggtattgccaatttcactaatgtagctgccactttccgcggtatcatcacagctttggtagagttcagggaaaggttgattgaacacaaaatttccattttcgtcagaagagctggacccaattaccaggaaggtttaaggagaatgagagaagtcggacagactttgggtattcctctatacgtcttcggacctgaaactcacatgactgctatttgtggtatggctttgggaactcgcccaattccatcagaaaatcacgtagaaactgccacagcaaatttcgctcttcctagcggtgaaattgaacccaacaaacagcagcttgccagcaaagatggtgcggccaaaccagcagcccctcctgcaaggaatatggtgggagactcaaaagcccttccaatgttcaccaacaatactaaagccataatttggggaatgcagaaccgtgctatccagagcatgctcgacttcgatttcgtgtgcaacagaaaaagccccagcgttgtagcaataatctaccccttcactggcgaccacaagcaaaaatactactggggacacaaagaaatacttattccggtatataaacaaatgagagacgcgatgatgaaacatcctgacgctgatgtccttgttaacttcgcttcattacgttcaggttattctagtaccgtggaaaccctggagtatccacaaatcagaacaattgccatcattgctgaaggtattccagaaaactacaccaggaagttgatcaagttggctgacgagaagaaggtttctattattggacctgccacagttggtggagttaaaccagggtgctttaagattggtaacactggaggaatgatggacaacatcttacactcaaaattgtacagaccaggcagtgtagcttacgtctcaagatctggtggtatgtctaacgaattaaacaacatcgtgtccaaagcaaccgacggagtctacgaaggtgtagctatcggtggagacagataccctggaactactttcatggatcacattatgagatatcaagctgatgataatgttaagatgatcatccttcttggtgaagtaggaggtactgaggaataccaagtatgtaaagcattgcaaaccaaacaaattacaaagcctttggtagcttggtgtataggaacttgcgctggaatgttcacttcagaagtccaattcggccatgcaggatcttgcgctaactcaaaccaagaaactgccacagctaagaacgaagctctcaaggcagccggtgcacacgtacctgattctttcgattatttaggtgatatcgttggcaaagtatacgagcagcttgtaaaacaaggcgtgatagtgccaagaccagaagttcctccaccaaccgtgccaatggactacagttgggctcgtgagttggggcttattagaaaacccgccagcttcatgacttccatctgtgatgaaagaggacaagagctcatatatgcaggtatgcccatttctgatgtgcttcaaaagaacgtaggcatcggcggagtcatatcgcttttgtggttccaaagatgcttacctccgtacgcttgcaaattcttcgagatgtgcttgatggtgacagccgatcatggacctgcagtatcaggagctcacaacaccatagtctgtgcccgtgctggtaaagatctagtttccagtttggtatccggtcttcttacaatcggtgacaggttcggtggagctttggacggtgcagctaagatgttcagtgaagcctatgacaaaggtatgcatcctgccgaattcgttaaccacatgaggaacattggtcagctcatcatgggtattggccacagagtcaaatctatcaacaaccccgatcagagagtaaaaatagtcaaagagttcgtcatggctaacttccccgccactcccttacttcagtacgcactagaagtagaaaaaatcaccaccagcaagaaacccaacctcatccttaacgtcgacggtgtcatcgcatgctccttcgtagatatgttgaggaactgtggtgtcttcacaccggaagaagcccaagaatacatcgacatcggtgctatcaactcattattcgtccttggtagatccatcggatttatcggccattacatggaccaaaagagactcaaacaaggattgtacaggcacccatgggatgacatttcatacgttctacctgaacaatacaacaatgataattagagtatagcatttaactaggtaaaaatcttgtaattattgaccgatagaggtctaggcacgtaccgtggcaccttacgcaatcggctcagtgtgtaagatttaggtttttaggatccaaatgttcgtgaagatgaaactagttatcagttatatttatgtagttaacactatattgaaacatcgacatgttaatctgatgtttttattactttgtttatgttattaaaaagctgtttgtgtacctgcggcatcgcagctgtatgatcgtctatgaaaagaataataaataggaaaaaactactcatgtttccgtcttttacatcgaaatttatagtgtattgttcccatagagtcttctaaagctgtgattgtaggcttaactaatacctcaaaaatattttggtgcctaaaaattattttttatacacttggtctttttgtaaaaacagtttttattgataattgataaatggttaccgtttgtcttgatgttaacaacacagttgctgttaacattattacaaaatatatgcgtgtttcataatgcaaataatgattagtatgcacctaaatgtaattgaagttgaatggtaaatatatctattagtagatccaaccgtcatttgtatcatggttacttttttgttcttgcattatgaactaactgcttagatgttcctctttatatttatatagccgaggcggaatatcgttgttgaccataacattatcgttttccatgttattttaataataattatttttagattttttatattgtagacgttatttattttttgaaaaattatgttgtaacattatgatttaaaattttgtaaatggtagaattttctgataaatataagtgttttatttttgtgaaagtcattcacatggatcaatgtttgactattttgttaacatggcggatttgatcataaatataattttatttcatataaaaa

SEQ ID NO: 1330 - DNA, 4447 bp, Diabrotica virgifera
  SmartBlast Evalue=0; Info=ATP-citrate synthase n=1 Tax=Aedes aegypti RepID=Q17D87_AEDAE
gtaccgtttttgcgcggtgacaggacagtcctcttgcggcatttaccaaggtaggtcctacacgatcgccccgttcctcgttcaaaccgttcgctgcaggctgtgaaagttttttgacgcacaccatacacctctagatttttacgcgttcgaaagtgccatcgcttcgcgctacataaactttctgtgatattgttaaaaagtagaaattttaaaaaatgtcagcaaaagctatacgggaggcgacagggaaacacctcatcaacaaatacctcggcggtaacacagcggccgtacaatgcagatttgcttcagtcgaggctgacactaaattctctgaattagtaagcaacaacccatggttgaaaactgaaaaactagtcgttaaacctgatcaactaatcaaaaggagaggaaaattaggactgatagccgtaaataaagatttaaacaccgtcgtggactgggtaaatgaacgcatgaaccaaaatcaaaaagtcggcaacgccacaggaaaactacgaaacttcatcatcgaacctttcgttccacacaagcaagaagaagaggcttatgtctgcatatactcacatcgtcacgcagacactatcctcttttaccacgaagggggtgtcgatatcggtgatgtcgacagcaaagctcttaaattagatgttcctgttggacagactgtggacgcaggaactatttctaaggtactactaggagaagttccagcagccaaaaaacagatggtagctgattttatcgccaacctttacaaactctacgtggacttgtacttcacatacttagaaattaatcccttagttgtgactgataaggagatctacattttggacttagctgccaaattagatgccactgccgattttatatgcaagccacaatggggtgaaatcgattatcctccacctttcggacgtgatgcttacccagaggaagcctatatagccgacctagattcaaaatctggagctagtcttaaactgacaattctcaacaaatctggtagaatatggacaatggtagctggaggtggagcttctgttatttacagtgacaccatctgtgatttgggtggagctagcgaactcgccaactatggggaatactcaggtgcaccaactgaacaacaaacttacgaatacgccaaaaccatcctttccttgatgacacaagaaaagcatcctaaaggaaaagttctgattaccggagggggtattgccaatttcactaatgtagctgccactttccgcggtatcatcacggctttggtagagttcagggaaaggttgattgaacacaaaatttccatcttcgtcagaagagctggacccaattaccaggaaggtttaaggagaatgagagaagtcggacagactttgggtattcctctatacgtcttcggacctgaaactcacatgactgctatttgtggtatggctttgggaactcgcccaattccatcagaaaatcacgtagaaactgccacagcaaatttcgctcttcctagcggtgaaattgaacccaacaaacagcagcttgccagcaaagatggtgcggccaaaccagcagcccctccggcaaggaatatggtgggagactcaaaagcccttccaatgttcaccaacaatactaaagcaataatttggggaatgcagaaccgtgctatccagagcatgcttgacttcgatttcgtgtgcaacagaaaaagtcccagcgttgtagcaataatttaccccttcactggcgaccacaagcaaaaatactactggggacacaaagaaatactcattccggtatacaaacaaatgagagacgcgatgatgaaacatcctgacgctgatgtccttgttaacttcgcttcattacgttcaggttattctagtaccgtggaaaccctggagtatccacaaatcagaacaattgccatcattgctgaaggtattccagaaaactacaccaggaagttgatcaagttggctgacgagaagaaggtttctattattggacctgccacagttggtggagttaaaccagggtgctttaagattggtaacactggaggaatgatggacaacatcttacactcaaaattgtacagaccaggcagtgtagcttacgtctcaagatctggtggtatgtctaacgaattaaacaacatcgtgtccaaagcaaccgacggagtctacgaaggtgtagctatcggtggagacagataccctggaactactttcatggatcacattatgagatatcaagctgatgataatgttaagatgatcatccttcttggtgaagtaggaggtactgaggaataccaagtatgtaaagcattgcaaaccaaacaaattacaaagcctttggtagcttggtgtataggaacttgcgctggaatgttcacttcagaagtccaattcggccatgcaggatcttgcgctaactcaaaccaagaaactgccacagctaagaacgaagctctcaaggcagccggtgcacacgtacctgattctttcgattatttaggtgatatcgttggcaaagtatacgagcagcttgtaaaacaaggcgtgatagtgccaagaccagaagttcctccaccaaccgtgccaatggactacagttgggctcgtgagttggggcttattagaaaacccgccagcttcatgacttccatctgtgatgaaagaggacaagagctcatatatgcaggtatgcccatttctgatgtgcttcaaaagaacgtaggcatcggcggagtcatatcgcttttgtggttccaaagatgcttacctccgtacgcttgcaaattcttcgagatgtgcttgatggtgacagccgatcatggacctgcagtatcaggagctcacaacaccatagtctgtgcccgtgctggtaaagatctagtttccagtttggtatccggtcttcttacaatcggtgacaggttcggtggagctttggacggtgcagctaagatgttcagtgaagcctatgacaaaggtatgcatcctgccgaattcgttaaccacatgaggaacattggtcagctcatcatgggtattggccacagagtcaaatctatcaacaaccccgatcagagagtaaaaatagtcaaagagttcgtcatggctaacttccccgccactcccttacttcagtacgcactagaagtagaaaaaatcaccaccagcaagaaacccaacctcatccttaacgtcgacggtgtcatcgcatgctccttcgtagatatgttgaggaactgtggtgtcttcacaccggaagaagcccaagaatacatcgacatcggtgctatcaactcattattcgtccttggtagatccatcggatttatcggccattacatggaccaaaagagactcaaacaaggattgtacaggcacccatgggatgacatttcatacgttctacctgaacaatacaacaatgataattagagtatagcatttaactaggtaaaaatcttgtaattattgaccgatagaggtctaggcacgtaccgtggcaccttacgcaatcggctcagtgtgtaagatttaggtttttaggatccaaatgttcgtgaagatgaaactagttatcagttatatttatgtagttaacactatattgaaacatcgacatgttaatctgatgtttttattactttgtttatgttattaaaaagctgtttgtgtacctgcggcatcgcagctgtatgatcgtctatgaaaagaataataaataggaaaaaactactcatgtttccgtcttttacatcgaaatttatagtgtattgttcccatagagtcttctaaagctgtgattgtaggcttaactaatacctcaaaaatattttggtgcctaaaaattattttttatacacttggtctttttgtaaaaacagtttttattgataattgataaatggttaccgtttgtcttgatgttaacaacacagttgctgttaacattattacaaaatatatgcgtgtttcataatgcaaataatgattagtatgcacctaaatgtaattgaagttgaatggtaaatatatctattagtagatccaaccgtcatttgtatcatggttacttttttgttcttgcattatgaactaactgcttagatgttcctctttatatttatatagccgaggcggaatatcgttgttgaccataacattatcgttttccatgttattttaataataattatttttagattttttatattgtagacgttatttattttttgaaaaattatgttgtaacattatgatttaaaattttgtaaatggtagaattttctgataaatataagtgttttatttttgtgaaagtcattcacatggatcaatgtttgactattttgttaacatggcggatttgatcataaatataattttatttcatataaaaa

SEQ ID NO: 1331 - DNA, 4447 bp, Diabrotica virgifera
  SmartBlast Evalue=0; Info=ATP-citrate synthase n=1 Tax=Aedes aegypti RepID=Q17D87_AEDAE
gtaccgtttttgcgcggtgacaggacagtcctcttgcggcatttaccaaggtaggtcctacacgatcgccccgttcctcgttcaaaccgttcgctgcaggctgtgaaagttttttgacgcacaccatacacctctagatttttacgcgttcgaaagtgccatcgcttcgcgctacataaactttctgtgatattgttaaaaagtagaaattttaaaaaatgtcagcaaaagctatacgggaggcgacagggaaacacctcatcaacaaatacctcggcggtaacacagcggccgtacaatgcagatttgcttcagtcgaggctgacactaaattctctgaattagtaagcaacaacccatggttgaaaactgaaaaactagtcgttaaacctgatcaactaatcaaaaggagaggaaaattaggactgatagccgtaaataaagatttaaacaccgtcgtggactgggtaaatgaacgcatgaaccaaaatcaaaaagtcggcaacgccacaggaaaactacgaaacttcatcatcgaacctttcgttccacacaagcaagaagaagaggcttatgtctgcatatactcacatcgtcacgcagacactatcctcttttaccacgaagggggtgtcgatatcggtgatgtcgacagcaaagctcttaaattagatgttcctgttggacagactgtggacgcaggaactatttctaaggtactactaggagaagttccagcagccaaaaaacagatggtagctgattttatcgccaacctttacaaactctacgtggacttgtacttcacatacttagaaattaatcccttagttgtgactgataaggagatctacattttggacttagctgccaaattagatgccactgccgattttatatgcaagccacaatggggtgaaatcgattatcctccacctttcggacgtgatgcttacccagaggaagcctatatagccgacctagattcaaaatctggagctagtcttaaactgacaattctcaacaaatctggtagaatatggacaatggtagctggaggtggagcttctgttatttacagtgacaccatctgtgatttgggtggagctagcgaactcgccaactatggggaatactcaggtgcaccaactgaacaacaaacttacgaatacgccaaaaccatcctttccttgatgacacaagaaaagcatcctaaaggaaaagttctgattaccggagggggtattgccaatttcactaatgtagctgccactttccgcggtatcatcacggctttggtagagttcagggaaaggttgattgaacacaaaatttccatcttcgtcagaagagctggacccaattaccaggaaggtttaaggagaatgagagaagtcggacagactttgggtattcctctatacgtcttcggacctgaaactcacatgactgctatttgtggtatggctttgggaactcgcccaattccatcagaaaatcacgtagaaactgccacagcaaatttcgctcttcctagcggtgaaattgaacccaacaaacagcagcttgccagcaaagatggtgcggccaaaccagcagcccctccggcaaggaatatggtgggagactcaaaagcccttccaatgttcaccaacaatactaaagccataatttggggaatgcagaaccgtgctatccagagcatgctcgacttcgatttcgtgtgcaacagaaaaagccccagcgttgtagcaataatctaccccttcactggcgaccacaagcaaaaatactactggggacacaaagaaatacttattccggtatataaacaaatgagagacgcgatgatgaaacatcctgacgctgatgtccttgttaacttcgcttcattacgttcaggttattctagtaccgtggaaaccctggagtatccacaaatcagaacaattgccatcattgctgaaggtattccagaaaactacaccaggaagttgatcaagttggctgacgagaagaaggtttctattattggacctgccacagttggtggagttaaaccagggtgctttaagattggtaacactggaggaatgatggacaacatcttacactcaaaattgtacagaccaggcagtgtagcttacgtctcaagatctggtggtatgtctaacgaattaaacaacatcgtgtccaaagcaaccgacggagtctacgaaggtgtagctatcggtggagacagataccctggaactactttcatggatcacattatgagatatcaagctgatgataatgttaagatgatcatccttcttggtgaagtaggaggtactgaggaataccaagtatgtaaagcattgcaaaccaaacaaattacaaagcctttggtagcttggtgtataggaacttgcgctggaatgttcacttcagaagtccaattcggccatgcaggatcttgcgctaactcaaaccaagaaactgccacagctaagaacgaagctctcaaggcagccggtgcacacgtacctgattctttcgattatttaggtgatatcgttggcaaagtatacgagcagcttgtaaaacaaggcgtgatagtgccaagaccagaagttcctccaccaaccgtgccaatggactacagttgggctcgtgagttggggcttattagaaaacccgccagcttcatgacttccatctgtgatgaaagaggacaagagctcatatatgcaggtatgcccatttctgatgtgcttcaaaagaacgtaggcatcggcggagtcatatcgcttttgtggttccaaagatgcttacctccgtacgcttgcaaattcttcgagatgtgcttgatggtgacagccgatcatggacctgcagtatcaggagctcacaacaccatagtctgtgcccgtgctggtaaagatctagtttccagtttggtatccggtcttcttacaatcggtgacaggttcggtggagctttggacggtgcagctaagatgttcagtgaagcctatgacaaaggtatgcatcctgccgaattcgttaaccacatgaggaacattggtcagctcatcatgggtattggccacagagtcaaatctatcaacaaccccgatcagagagtaaaaatagtcaaagagttcgtcatggctaacttccccgccactcccttacttcagtacgcactagaagtagaaaaaatcaccaccagcaagaaacccaacctcatccttaacgtcgacggtgtcatcgcatgctccttcgtagatatgttgaggaactgtggtgtcttcacaccggaagaagcccaagaatacatcgacatcggtgctatcaactcattattcgtccttggtagatccatcggatttatcggccattacatggaccaaaagagactcaaacaaggattgtacaggcacccatgggatgacatttcatacgttctacctgaacaatacaacaatgataattagagtatagcatttaactaggtaaaaatcttgtaattattgaccgatagaggtctaggcacgtaccgtggcaccttacgcaatcggctcagtgtgtaagatttaggtttttaggatccaaatgttcgtgaagatgaaactagttatcagttatatttatgtagttaacactatattgaaacatcgacatgttaatctgatgtttttattactttgtttatgttattaaaaagctgtttgtgtacctgcggcatcgcagctgtatgatcgtctatgaaaagaataataaataggaaaaaactactcatgtttccgtcttttacatcgaaatttatagtgtattgttcccatagagtcttctaaagctgtgattgtaggcttaactaatacctcaaaaatattttggtgcctaaaaattattttttatacacttggtctttttgtaaaaacagtttttattgataattgataaatggttaccgtttgtcttgatgttaacaacacagttgctgttaacattattacaaaatatatgcgtgtttcataatgcaaataatgattagtatgcacctaaatgtaattgaagttgaatggtaaatatatctattagtagatccaaccgtcatttgtatcatggttacttttttgttcttgcattatgaactaactgcttagatgttcctctttatatttatatagccgaggcggaatatcgttgttgaccataacattatcgttttccatgttattttaataataattatttttagattttttatattgtagacgttatttattttttgaaaaattatgttgtaacattatgatttaaaattttgtaaatggtagaattttctgataaatataagtgttttatttttgtgaaagtcattcacatggatcaatgtttgactattttgttaacatggcggatttgatcataaatataattttatttcatataaaaa

SEQ ID NO: 1332 - DNA, 4447 bp, Diabrotica virgifera
  SmartBlast Evalue=0; Info=ATP-citrate synthase n=1 Tax=Aedes aegypti RepID=Q17D87_AEDAE
gtaccgtttttgcgcggtgacaggacagtcctcttgcggcatttaccaaggtaggtcctacacgatcgccccgttcctcgttcaaaccgttcgctgcaggctgtgaaagttttttgacgcacaccatacacctctagatttttacgcgttcgaaagtgccatcgcttcgcgctacataaactttctgtgatattgttaaaaagtagaaattttaaaaaatgtcagcaaaagctatacgggaggcgacagggaaacacctcatcaacaaatacctcggcggtaacacagcggccgtacaatgcagatttgcttcagtcgaggctgacactaaattctctgaattagtaagcaacaacccatggttgaaaaccgaaaaactagtcgttaaacctgatcaactaatcaaaaggagaggaaaattaggactgatagccgtaaataaagatttaaacaccgtcgtggactgggtaaatgaacgcatgaaccaaaatcaaaaagtcggcaacgccacaggaaaactacgaaactttatcatcgaacctttcgttccacacaagcaagaagaagaggcttatgtctgcatatactcacatcgtcacgcagacactatcctcttttaccacgaagggggtgtcgatatcggtgatgtcgacagcaaagctcttaagttagatgttcctgttggagagactgtggacgcagcaactatttcaaaggtactactaggagaagttccagcagccaaaaaacagatggtagctgattttatcgccaacctttacaaactctacgtggacttgtacttcacatacttagaaattaatcccttagttgtgactgataaggagatctacattttggacttagctgccaaattagatgccactgccgattttatatgcaagccacaatggggtgaaatcgattatcctccacctttcggacgtgatgcttacccagaggaagcctatatagccgacctagattcaaaatctggagctagtcttaaactgacaattctcaacaaatctggtagaatatggacaatggtagctggaggtggagcttctgttatttacagtgacaccatctgtgatttgggtggagctagcgaactcgccaactatggggaatactcaggtgcaccaactgaacaacaaacttacgaatacgccaaaaccatcctttccttgatgacacaagaaaagcatcctaaaggaaaagttctgattaccggagggggtattgccaatttcactaatgtagctgccactttccgcggtatcatcacggctttggtagagttcagggaaaggttgattgaacacaaaatttccatcttcgtcagaagagctggacccaattaccaggaaggtttaaggagaatgagagaagtcggacagactttgggtattcctctatacgtcttcggacctgaaactcacatgactgctatttgtggtatggctttgggaactcgcccaattccatcagaaaatcacgtagaaactgccacagcaaatttcgctcttcctagcggtgaaattgaacccaacaaacagcagcttgccagcaaagatggtgcggccaaaccagcagcccctccggcaaggaatatggtgggagactcaaaagcccttccaatgttcaccaacaatactaaagcaataatttggggaatgcagaaccgtgctatccagagcatgctcgacttcgatttcgtgtgcaacagaaaaagtcccagcgttgtagcaataatctaccccttcactggcgaccacaagcaaaaatactactgggggcacaaagaaatactcattccggtatataaacaaatgagagacgcgatgatgaaacatcctgacgctgatgtcctggttaacttcgcttcattacgttcaggttattctagtaccgtggaaaccctggagtatccacaaatcagaacaattgccatcattgctgaaggtattccagaaaactacaccaggaagttgatcaagttggctgacgagaagaaggtttctattattggacctgccacagttggtggagttaaaccagggtgctttaagattggtaacactggaggaatgatggacaacatcttacactcaaaattgtacagaccaggcagtgtagcttacgtctcaagatctggtggtatgtctaacgaattaaacaacatcgtgtccaaagcaaccgacggagtctacgaaggtgtagctatcggtggagacagataccctggaactactttcatggatcacattatgagatatcaagctgatgataatgttaagatgatcatccttcttggtgaagtaggaggtactgaggaataccaagtatgtaaagcattgcaaaccaaacaaattacaaagcctttggtagcttggtgtataggaacttgcgctggaatgttcacttcagaagtccaattcggccatgcaggatcttgcgctaactcaaaccaagaaactgccacagctaagaacgaagctctcaaggcagccggtgcacacgtacctgattctttcgattatttaggtgatatcgttggcaaagtatacgagcagcttgtaaaacaaggcgtgatagtgccaagaccagaagttcctccaccaaccgtgccaatggactacagttgggctcgtgagttggggcttattagaaaacccgccagcttcatgacttccatctgtgatgaaagaggacaagagctcatatatgcaggtatgcccatttctgatgtgcttcaaaagaacgtaggcatcggcggagtcatatcgcttttgtggttccaaagatgcttacctccgtacgcttgcaaattcttcgagatgtgcttgatggtgacagccgatcatggacctgcagtatcaggagctcacaacaccatagtctgtgcccgtgctggtaaagatctagtttccagtttggtatccggtcttcttacaatcggtgacaggttcggtggagctttggacggtgcagctaagatgttcagtgaagcctatgacaaaggtatgcatcctgccgaattcgttaaccacatgaggaacattggtcagctcatcatgggtattggccacagagtcaaatctatcaacaaccccgatcagagagtaaaaatagtcaaagagttcgtcatggctaacttccccgccactcccttacttcagtacgcactagaagtagaaaaaatcaccaccagcaagaaacccaacctcatccttaacgtcgacggtgtcatcgcatgctccttcgtagatatgttgaggaactgtggtgtcttcacaccggaagaagcccaagaatacatcgacatcggtgctatcaactcattattcgtccttggtagatccatcggatttatcggccattacatggaccaaaagagactcaaacaaggattgtacaggcacccatgggatgacatttcatacgttctacctgaacaatacaacaatgataattagagtatagcatttaactaggtaaaaatcttgtaattattgaccgatagaggtctaggcacgtaccgtggcaccttacgcaatcggctcagtgtgtaagatttaggtttttaggatccaaatgttcgtgaagatgaaactagttatcagttatatttatgtagttaacactatattgaaacatcgacatgttaatctgatgtttttattactttgtttatgttattaaaaagctgtttgtgtacctgcggcatcgcagctgtatgatcgtctatgaaaagaataataaataggaaaaaactactcatgtttccgtcttttacatcgaaatttatagtgtattgttcccatagagtcttctaaagctgtgattgtaggcttaactaatacctcaaaaatattttggtgcctaaaaattattttttatacacttggtctttttgtaaaaacagtttttattgataattgataaatggttaccgtttgtcttgatgttaacaacacagttgctgttaacattattacaaaatatatgcgtgtttcataatgcaaataatgattagtatgcacctaaatgtaattgaagttgaatggtaaatatatctattagtagatccaaccgtcatttgtatcatggttacttttttgttcttgcattatgaactaactgcttagatgttcctctttatatttatatagccgaggcggaatatcgttgttgaccataacattatcgttttccatgttattttaataataattatttttagattttttatattgtagacgttatttattttttgaaaaattatgttgtaacattatgatttaaaattttgtaaatggtagaattttctgataaatataagtgttttatttttgtgaaagtcattcacatggatcaatgtttgactattttgttaacatggcggatttgatcataaatataattttatttcatataaaaa

SEQ ID NO: 1333 - DNA, 4447 bp, Diabrotica virgifera
  SmartBlast Evalue=0; Info=ATP-citrate synthase n=1 Tax=Aedes aegypti RepID=Q17D87_AEDAE
gtaccgtttttgcgcggtgacaggacagtcctcttgcggcatttaccaaggtaggtcctacacgatcgccccgttcctcgttcaaaccgttcgctgcaggctgtgaaagttttttgacgcacaccatacacctctagatttttacgcgttcgaaagtgccatcgcttcgcgctacataaactttctgtgatattgttaaaaagtagaaattttaaaaaatgtcagcaaaagctatacgggaggcgacagggaaacacctcatcaacaaatacctcggcggtaacacagcggccgtacaatgcagatttgcttcagtcgaggctgacactaaattctctgaattagtaagcaacaacccatggttgaaaaccgaaaaactagtcgttaaacctgatcaactaatcaaaaggagaggaaaattaggactgatagccgtaaataaagatttaaacaccgtcgtggactgggtaaatgaacgcatgaaccaaaatcaaaaagtcggcaacgccacaggaaaactacgaaactttatcatcgaacctttcgttccacacaagcaagaagaagaggcttatgtctgcatatactcacatcgtcacgcagacactatcctcttttaccacgaagggggtgtcgatatcggtgatgtcgacagcaaagctcttaagttagatgttcctgttggagagactgtggacgcagcaactatttcaaaggtactactaggagaagttccagcagccaaaaaacagatggtagctgattttatcgccaacctttacaaactctacgtggacttgtacttcacatacttagaaattaatcccttagttgtgactgataaggagatctacattttggacttagctgccaaattagatgccactgccgattttatatgcaagccacaatggggtgaaatcgattatcctccacctttcggacgtgatgcttacccagaggaagcctatatagccgacctagattcaaaatctggagctagtcttaaactgacaattctcaacaaatctggtagaatatggacaatggtagctggaggtggagcttctgttatttacagtgacaccatctgtgatttgggtggagctagcgaactcgccaactatggggaatactcaggtgcaccaactgaacaacaaacttacgaatacgccaaaaccatcctttccttgatgacacaagaaaagcatcctaaaggaaaagttctgattaccggagggggtattgccaatttcactaatgtagctgccactttccgcggtatcatcacggctttggtagagttcagggaaaggttgattgaacacaaaatttccatcttcgtcagaagagctggacccaattaccaggaaggtttaaggagaatgagagaagtcggacagactttgggtattcctctatacgtcttcggacctgaaactcacatgactgctatttgtggtatggctttgggaactcgcccaattccatcagaaaatcacgtagaaactgccacagcaaatttcgctcttcctagcggtgaaattgaacccaacaaacagcagcttgccagcaaagatggtgcggccaaaccagcagcccctccggcaaggaatatggtgggagactcaaaagcccttccaatgttcaccaacaatactaaagcaataatttggggaatgcagaaccgtgctatccagagcatgcttgacttcgatttcgtgtgcaacagaaaaagtcccagcgttgtagcaataatttaccccttcactggcgaccacaagcaaaaatactactggggacacaaagaaatactcattccggtatacaaacaaatgagagacgcgatgatgaaacatcctgacgctgatgtccttgttaacttcgcttcattacgttcaggttattctagtaccgtggaaaccctggagtatccacaaatcagaacaattgccatcattgctgaaggtattccagaaaactacaccaggaagttgatcaagttggctgacgagaagaaggtttctattattggacctgccacagttggtggagttaaaccagggtgctttaagattggtaacactggaggaatgatggacaacatcttacactcaaaattgtacagaccaggcagtgtagcttacgtctcaagatctggtggtatgtctaacgaattaaacaacatcgtgtccaaagcaaccgacggagtctacgaaggtgtagctatcggtggagacagataccctggaactactttcatggatcacattatgagatatcaagctgatgataatgttaagatgatcatccttcttggtgaagtaggaggtactgaggaataccaagtatgtaaagcattgcaaaccaaacaaattacaaagcctttggtagcttggtgtataggaacttgcgctggaatgttcacttcagaagtccaattcggccatgcaggatcttgcgctaactcaaaccaagaaactgccacagctaagaacgaagctctcaaggcagccggtgcacacgtacctgattctttcgattatttaggtgatatcgttggcaaagtatacgagcagcttgtaaaacaaggcgtgatagtgccaagaccagaagttcctccaccaaccgtgccaatggactacagttgggctcgtgagttggggcttattagaaaacccgccagcttcatgacttccatctgtgatgaaagaggacaagagctcatatatgcaggtatgcccatttctgatgtgcttcaaaagaacgtaggcatcggcggagtcatatcgcttttgtggttccaaagatgcttacctccgtacgcttgcaaattcttcgagatgtgcttgatggtgacagccgatcatggacctgcagtatcaggagctcacaacaccatagtctgtgcccgtgctggtaaagatctagtttccagtttggtatccggtcttcttacaatcggtgacaggttcggtggagctttggacggtgcagctaagatgttcagtgaagcctatgacaaaggtatgcatcctgccgaattcgttaaccacatgaggaacattggtcagctcatcatgggtattggccacagagtcaaatctatcaacaaccccgatcagagagtaaaaatagtcaaagagttcgtcatggctaacttccccgccactcccttacttcagtacgcactagaagtagaaaaaatcaccaccagcaagaaacccaacctcatccttaacgtcgacggtgtcatcgcatgctccttcgtagatatgttgaggaactgtggtgtcttcacaccggaagaagcccaagaatacatcgacatcggtgctatcaactcattattcgtccttggtagatccatcggatttatcggccattacatggaccaaaagagactcaaacaaggattgtacaggcacccatgggatgacatttcatacgttctacctgaacaatacaacaatgataattagagtatagcatttaactaggtaaaaatcttgtaattattgaccgatagaggtctaggcacgtaccgtggcaccttacgcaatcggctcagtgtgtaagatttaggtttttaggatccaaatgttcgtgaagatgaaactagttatcagttatatttatgtagttaacactatattgaaacatcgacatgttaatctgatgtttttattactttgtttatgttattaaaaagctgtttgtgtacctgcggcatcgcagctgtatgatcgtctatgaaaagaataataaataggaaaaaactactcatgtttccgtcttttacatcgaaatttatagtgtattgttcccatagagtcttctaaagctgtgattgtaggcttaactaatacctcaaaaatattttggtgcctaaaaattattttttatacacttggtctttttgtaaaaacagtttttattgataattgataaatggttaccgtttgtcttgatgttaacaacacagttgctgttaacattattacaaaatatatgcgtgtttcataatgcaaataatgattagtatgcacctaaatgtaattgaagttgaatggtaaatatatctattagtagatccaaccgtcatttgtatcatggttacttttttgttcttgcattatgaactaactgcttagatgttcctctttatatttatatagccgaggcggaatatcgttgttgaccataacattatcgttttccatgttattttaataataattatttttagattttttatattgtagacgttatttattttttgaaaaattatgttgtaacattatgatttaaaattttgtaaatggtagaattttctgataaatataagtgttttatttttgtgaaagtcattcacatggatcaatgtttgactattttgttaacatggcggatttgatcataaatataattttatttcatataaaaa

SEQ ID NO: 1334 - DNA, 4447 bp, Diabrotica virgifera
  SmartBlast Evalue=0; Info=ATP-citrate synthase n=1 Tax=Aedes aegypti RepID=Q17D87_AEDAE
gtaccgtttttgcgcggtgacaggacagtcctcttgcggcatttaccaaggtaggtcctacacgatcgccccgttcctcgttcaaaccgttcgctgcaggctgtgaaagttttttgacgcacaccatacacctctagatttttacgcgttcgaaagtgccatcgcttcgcgctacataaactttctgtgatattgttaaaaagtagaaattttaaaaaatgtcagcaaaagctatacgggaggcgacagggaaacacctcatcaacaaatacctcggcggtaacacagcggccgtacaatgcagatttgcttcagtcgaggctgacactaaattctctgaattagtaagcaacaacccatggttgaaaaccgaaaaactagtcgttaaacctgatcaactaatcaaaaggagaggaaaattaggactgatagccgtaaataaagatttaaacaccgtcgtggactgggtaaatgaacgcatgaaccaaaatcaaaaagtcggcaacgccacaggaaaactacgaaactttatcatcgaacctttcgttccacacaagcaagaagaagaggcttatgtctgcatatactcacatcgtcacgcagacactatcctcttttaccacgaagggggtgtcgatatcggtgatgtcgacagcaaagctcttaagttagatgttcctgttggagagactgtggacgcagcaactatttcaaaggtactactaggagaagttccagcagccaaaaaacagatggtagctgattttatcgccaacctttacaaactctacgtggacttgtacttcacatacttagaaattaatcccttagttgtgactgataaggagatctacattttggacttagctgccaaattagatgccactgccgattttatatgcaagccacaatggggtgaaatcgattatcctccacctttcggacgtgatgcttacccagaggaagcctatatagccgacctagattcaaaatctggagctagtcttaaactgacaattctcaacaaatctggtagaatatggacaatggtagctggaggtggagcttctgttatttacagtgacaccatctgtgatttgggtggagctagcgaactcgccaactatggggaatactcaggtgcaccaactgaacaacaaacttacgaatacgccaaaaccatcctttccttgatgacacaagaaaagcatcctaaaggaaaagttctgattaccggagggggtattgccaatttcactaatgtagctgccactttccgcggtatcatcacggctttggtagagttcagggaaaggttgattgaacacaaaatttccatcttcgtcagaagagctggacccaattaccaggaaggtttaaggagaatgagagaagtcggacagactttgggtattcctctatacgtcttcggacctgaaactcacatgactgctatttgtggtatggctttgggaactcgcccaattccatcagaaaatcacgtagaaactgccacagcaaatttcgctcttcctagcggtgaaattgaacccaacaaacagcagcttgccagcaaagatggtgcggccaaaccagcagcccctccggcaaggaatatggtgggagactcaaaagcccttccaatgttcaccaacaatactaaagccataatttggggaatgcagaaccgtgctatccagagcatgctcgacttcgatttcgtgtgcaacagaaaaagccccagcgttgtagcaataatctaccccttcactggcgaccacaagcaaaaatactactggggacacaaagaaatacttattccggtatataaacaaatgagagacgcgatgatgaaacatcctgacgctgatgtccttgttaacttcgcttcattacgttcaggttattctagtaccgtggaaaccctggagtatccacaaatcagaacaattgccatcattgctgaaggtattccagaaaactacaccaggaagttgatcaagttggctgacgagaagaaggtttctattattggacctgccacagttggtggagttaaaccagggtgctttaagattggtaacactggaggaatgatggacaacatcttacactcaaaattgtacagaccaggcagtgtagcttacgtctcaagatctggtggtatgtctaacgaattaaacaacatcgtgtccaaagcaaccgacggagtctacgaaggtgtagctatcggtggagacagataccctggaactactttcatggatcacattatgagatatcaagctgatgataatgttaagatgatcatccttcttggtgaagtaggaggtactgaggaataccaagtatgtaaagcattgcaaaccaaacaaattacaaagcctttggtagcttggtgtataggaacttgcgctggaatgttcacttcagaagtccaattcggccatgcaggatcttgcgctaactcaaaccaagaaactgccacagctaagaacgaagctctcaaggcagccggtgcacacgtacctgattctttcgattatttaggtgatatcgttggcaaagtatacgagcagcttgtaaaacaaggcgtgatagtgccaagaccagaagttcctccaccaaccgtgccaatggactacagttgggctcgtgagttggggcttattagaaaacccgccagcttcatgacttccatctgtgatgaaagaggacaagagctcatatatgcaggtatgcccatttctgatgtgcttcaaaagaacgtaggcatcggcggagtcatatcgcttttgtggttccaaagatgcttacctccgtacgcttgcaaattcttcgagatgtgcttgatggtgacagccgatcatggacctgcagtatcaggagctcacaacaccatagtctgtgcccgtgctggtaaagatctagtttccagtttggtatccggtcttcttacaatcggtgacaggttcggtggagctttggacggtgcagctaagatgttcagtgaagcctatgacaaaggtatgcatcctgccgaattcgttaaccacatgaggaacattggtcagctcatcatgggtattggccacagagtcaaatctatcaacaaccccgatcagagagtaaaaatagtcaaagagttcgtcatggctaacttccccgccactcccttacttcagtacgcactagaagtagaaaaaatcaccaccagcaagaaacccaacctcatccttaacgtcgacggtgtcatcgcatgctccttcgtagatatgttgaggaactgtggtgtcttcacaccggaagaagcccaagaatacatcgacatcggtgctatcaactcattattcgtccttggtagatccatcggatttatcggccattacatggaccaaaagagactcaaacaaggattgtacaggcacccatgggatgacatttcatacgttctacctgaacaatacaacaatgataattagagtatagcatttaactaggtaaaaatcttgtaattattgaccgatagaggtctaggcacgtaccgtggcaccttacgcaatcggctcagtgtgtaagatttaggtttttaggatccaaatgttcgtgaagatgaaactagttatcagttatatttatgtagttaacactatattgaaacatcgacatgttaatctgatgtttttattactttgtttatgttattaaaaagctgtttgtgtacctgcggcatcgcagctgtatgatcgtctatgaaaagaataataaataggaaaaaactactcatgtttccgtcttttacatcgaaatttatagtgtattgttcccatagagtcttctaaagctgtgattgtaggcttaactaatacctcaaaaatattttggtgcctaaaaattattttttatacacttggtctttttgtaaaaacagtttttattgataattgataaatggttaccgtttgtcttgatgttaacaacacagttgctgttaacattattacaaaatatatgcgtgtttcataatgcaaataatgattagtatgcacctaaatgtaattgaagttgaatggtaaatatatctattagtagatccaaccgtcatttgtatcatggttacttttttgttcttgcattatgaactaactgcttagatgttcctctttatatttatatagccgaggcggaatatcgttgttgaccataacattatcgttttccatgttattttaataataattatttttagattttttatattgtagacgttatttattttttgaaaaattatgttgtaacattatgatttaaaattttgtaaatggtagaattttctgataaatataagtgttttatttttgtgaaagtcattcacatggatcaatgtttgactattttgttaacatggcggatttgatcataaatataattttatttcatataaaaa

SEQ ID NO: 1335 - DNA, 4447 bp, Diabrotica virgifera
  SmartBlast Evalue=0; Info=ATP-citrate synthase n=1 Tax=Aedes aegypti RepID=Q17D87_AEDAE
gtaccgtttttgcgcggtgacaggacagtcctcttgcggcatttaccaaggtaggtcctacacgatcgccccgttcctcgttcaaaccgttcgctgcaggctgtgaaagttttttgacgcacaccatacacctctagatttttacgcgttcgaaagtgccatcgcttcgcgctacataaactttctgtgatattgttaaaaagtagaaattttaaaaaatgtcagcaaaagctatacgggaggcgacagggaaacacctcatcaacaaatacctcggcggtaacacagcggccgtacaatgcagatttgcttcagtcgaggctgacactaaattctctgaattagtaagcaacaacccatggttgaaaactgaaaaactagtcgttaaacctgatcaactaatcaaaaggagaggaaaattaggactgatagccgtaaataaagatttaaacaccgtcgtggactgggtaaatgaacgcatgaaccaaaatcaaaaagtcggcaacgccacaggaaaactacgaaacttcatcatcgaacctttcgttccacacaagcaagaagaagaggcttatgtctgcatatactcacatcgtcacgcagacactatcctcttttaccacgaagggggtgtcgatatcggtgatgtcgacagcaaagctcttaaattagatgttcctgttggacagactgtggacgcaggaactatttctaaggtactactaggagaagttccagcagccaaaaaacagatggtagctgattttatcgccaacctttacaaactctacgtggacttgtacttcacatacttagaaattaatcccttagttgtgactgataaggagatctacattttggacttagctgccaaattagatgccactgccgattttatatgcaagccacaatggggtgaaatcgattatcctccacctttcggacgtgatgcttacccagaggaagcctatatagccgacctagattcaaaatctggagctagtcttaaactgacaattctcaacaaatctggtagaatatggacaatggtagctggaggtggagcttctgttatttacagtgacaccatctgtgatttgggtggagctagcgaactcgccaactatggggaatactcaggtgcaccaactgaacaacaaacttacgaatacgccaaaactatcctttccttgatgacccaagaaaagcatcctaaaggaaaagttttgattaccggaggaggtattgccaatttcactaatgtagctgccactttccgcggtatcatcacagctttggtagagttcagggaaaggttgattgaacacaaaatttccattttcgtcagaagagctggacccaattaccaggaaggtttaaggagaatgagagaagtcggacagactttgggtattcctctatacgtcttcggacctgaaactcacatgactgctatttgtggtatggctttgggaactcgcccaattccatcagaaaatcacgtagaaactgccacagcaaatttcgctcttcctagcggtgaaattgaacccaacaaacagcagcttgccagcaaagatggtgcggccaaaccagcagcccctcctgcaaggaatatggtgggagactcaaaagcccttccaatgttcaccaacaatactaaagcaataatttggggaatgcagaaccgtgctatccagagcatgctcgacttcgatttcgtgtgcaacagaaaaagtcccagcgttgtagcaataatctaccccttcactggcgaccacaagcaaaaatactactgggggcacaaagaaatactcattccggtatataaacaaatgagagacgcgatgatgaaacatcctgacgctgatgtcctggttaacttcgcttcattacgttcaggttattctagtaccgtggaaaccctggagtatccacaaatcagaacaattgccatcattgctgaaggtattccagaaaactacaccaggaagttgatcaagttggctgacgagaagaaggtttctattattggacctgccacagttggtggagttaaaccagggtgctttaagattggtaacactggaggaatgatggacaacatcttacactcaaaattgtacagaccaggcagtgtagcttacgtctcaagatctggtggtatgtctaacgaattaaacaacatcgtgtccaaagcaaccgacggagtctacgaaggtgtagctatcggtggagacagataccctggaactactttcatggatcacattatgagatatcaagctgatgataatgttaagatgatcatccttcttggtgaagtaggaggtactgaggaataccaagtatgtaaagcattgcaaaccaaacaaattacaaagcctttggtagcttggtgtataggaacttgcgctggaatgttcacttcagaagtccaattcggccatgcaggatcttgcgctaactcaaaccaagaaactgccacagctaagaacgaagctctcaaggcagccggtgcacacgtacctgattctttcgattatttaggtgatatcgttggcaaagtatacgagcagcttgtaaaacaaggcgtgatagtgccaagaccagaagttcctccaccaaccgtgccaatggactacagttgggctcgtgagttggggcttattagaaaacccgccagcttcatgacttccatctgtgatgaaagaggacaagagctcatatatgcaggtatgcccatttctgatgtgcttcaaaagaacgtaggcatcggcggagtcatatcgcttttgtggttccaaagatgcttacctccgtacgcttgcaaattcttcgagatgtgcttgatggtgacagccgatcatggacctgcagtatcaggagctcacaacaccatagtctgtgcccgtgctggtaaagatctagtttccagtttggtatccggtcttcttacaatcggtgacaggttcggtggagctttggacggtgcagctaagatgttcagtgaagcctatgacaaaggtatgcatcctgccgaattcgttaaccacatgaggaacattggtcagctcatcatgggtattggccacagagtcaaatctatcaacaaccccgatcagagagtaaaaatagtcaaagagttcgtcatggctaacttccccgccactcccttacttcagtacgcactagaagtagaaaaaatcaccaccagcaagaaacccaacctcatccttaacgtcgacggtgtcatcgcatgctccttcgtagatatgttgaggaactgtggtgtcttcacaccggaagaagcccaagaatacatcgacatcggtgctatcaactcattattcgtccttggtagatccatcggatttatcggccattacatggaccaaaagagactcaaacaaggattgtacaggcacccatgggatgacatttcatacgttctacctgaacaatacaacaatgataattagagtatagcatttaactaggtaaaaatcttgtaattattgaccgatagaggtctaggcacgtaccgtggcaccttacgcaatcggctcagtgtgtaagatttaggtttttaggatccaaatgttcgtgaagatgaaactagttatcagttatatttatgtagttaacactatattgaaacatcgacatgttaatctgatgtttttattactttgtttatgttattaaaaagctgtttgtgtacctgcggcatcgcagctgtatgatcgtctatgaaaagaataataaataggaaaaaactactcatgtttccgtcttttacatcgaaatttatagtgtattgttcccatagagtcttctaaagctgtgattgtaggcttaactaatacctcaaaaatattttggtgcctaaaaattattttttatacacttggtctttttgtaaaaacagtttttattgataattgataaatggttaccgtttgtcttgatgttaacaacacagttgctgttaacattattacaaaatatatgcgtgtttcataatgcaaataatgattagtatgcacctaaatgtaattgaagttgaatggtaaatatatctattagtagatccaaccgtcatttgtatcatggttacttttttgttcttgcattatgaactaactgcttagatgttcctctttatatttatatagccgaggcggaatatcgttgttgaccataacattatcgttttccatgttattttaataataattatttttagattttttatattgtagacgttatttattttttgaaaaattatgttgtaacattatgatttaaaattttgtaaatggtagaattttctgataaatataagtgttttatttttgtgaaagtcattcacatggatcaatgtttgactattttgttaacatggcggatttgatcataaatataattttatttcatataaaaa

SEQ ID NO: 1336 - DNA, 4390 bp, Diabrotica virgifera
  SmartBlast Evalue=0; Info=ATP-citrate synthase n=1 Tax=Aedes aegypti RepID=Q17D87_AEDAE
cgacaacatgtcatgtcaaaaatttgtcagcagaatcgtatgatttgaaagtgaattccgaaagcaatttatagtttttgttgtaataaaatagtgaatttttagtaactacctttaattcctgtccagtgtcttcttatttgtcagcccagttttaaaaaatgtcagcaaaagctatacgggaggcgacagggaaacacctcatcaacaaatacctcggcggtaacacagcggccgtacaatgcagatttgcttcagtcgaggctgacactaaattctctgaattagtaagcaacaacccatggttgaaaactgaaaaactagtcgttaaacctgatcaactaatcaaaaggagaggaaaattaggactgatagccgtaaataaagatttaaacaccgtcgtggactgggtaaatgaacgcatgaaccaaaatcaaaaagtcggcaacgccacaggaaaactacgaaacttcatcatcgaacctttcgttccacacaagcaagaagaagaggcttatgtctgcatatactcacatcgtcacgcagacactatcctcttttaccacgaagggggtgtcgatatcggtgatgtcgacagcaaagctcttaaattagatgttcctgttggacagactgtggacgcaggaactatttctaaggtactactaggagaagttccagcagccaaaaaacagatggtagctgattttatcgccaacctttacaaactctacgtggacttgtacttcacatacttagaaattaatcccttagttgtgactgataaggagatctacattttggacttagctgccaaattagatgccactgccgattttatatgcaagccacaatggggtgaaatcgattatcctccacctttcggacgtgatgcttacccagaggaagcctatatagccgacctagattcaaaatctggagctagtcttaaactgacaattctcaacaaatctggtagaatatggacaatggtagctggaggtggagcttctgttatttacagtgacaccatctgtgatttgggtggagctagcgaactcgccaactatggggaatactcaggtgcaccaactgaacaacaaacttacgaatacgccaaaaccatcctttccttgatgacacaagaaaagcatcctaaaggaaaagttctgattaccggagggggtattgccaatttcactaatgtagctgccactttccgcggtatcatcacggctttggtagagttcagggaaaggttgattgaacacaaaatttccatcttcgtcagaagagctggacccaattaccaggaaggtttaaggagaatgagagaagtcggacagactttgggtattcctctatacgtcttcggacctgaaactcacatgactgctatttgtggtatggctttgggaactcgcccaattccatcagaaaatcacgtagaaactgccacagcaaatttcgctcttcctagcggtgaaattgaacccaacaaacagcagcttgccagcaaagatggtgcggccaaaccagcagcccctccggcaaggaatatggtgggagactcaaaagcccttccaatgttcaccaacaatactaaagcaataatttggggaatgcagaaccgtgctatccagagcatgctcgacttcgatttcgtgtgcaacagaaaaagtcccagcgttgtagcaataatctaccccttcactggcgaccacaagcaaaaatactactgggggcacaaagaaatactcattccggtatataaacaaatgagagacgcgatgatgaaacatcctgacgctgatgtcctggttaacttcgcttcattacgttcaggttattctagtaccgtggaaaccctggagtatccacaaatcagaacaattgccatcattgctgaaggtattccagaaaactacaccaggaagttgatcaagttggctgacgagaagaaggtttctattattggacctgccacagttggtggagttaaaccagggtgctttaagattggtaacactggaggaatgatggacaacatcttacactcaaaattgtacagaccaggcagtgtagcttacgtctcaagatctggtggtatgtctaacgaattaaacaacatcgtgtccaaagcaaccgacggagtctacgaaggtgtagctatcggtggagacagataccctggaactactttcatggatcacattatgagatatcaagctgatgataatgttaagatgatcatccttcttggtgaagtaggaggtactgaggaataccaagtatgtaaagcattgcaaaccaaacaaattacaaagcctttggtagcttggtgtataggaacttgcgctggaatgttcacttcagaagtccaattcggccatgcaggatcttgcgctaactcaaaccaagaaactgccacagctaagaacgaagctctcaaggcagccggtgcacacgtacctgattctttcgattatttaggtgatatcgttggcaaagtatacgagcagcttgtaaaacaaggcgtgatagtgccaagaccagaagttcctccaccaaccgtgccaatggactacagttgggctcgtgagttggggcttattagaaaacccgccagcttcatgacttccatctgtgatgaaagaggacaagagctcatatatgcaggtatgcccatttctgatgtgcttcaaaagaacgtaggcatcggcggagtcatatcgcttttgtggttccaaagatgcttacctccgtacgcttgcaaattcttcgagatgtgcttgatggtgacagccgatcatggacctgcagtatcaggagctcacaacaccatagtctgtgcccgtgctggtaaagatctagtttccagtttggtatccggtcttcttacaatcggtgacaggttcggtggagctttggacggtgcagctaagatgttcagtgaagcctatgacaaaggtatgcatcctgccgaattcgttaaccacatgaggaacattggtcagctcatcatgggtattggccacagagtcaaatctatcaacaaccccgatcagagagtaaaaatagtcaaagagttcgtcatggctaacttccccgccactcccttacttcagtacgcactagaagtagaaaaaatcaccaccagcaagaaacccaacctcatccttaacgtcgacggtgtcatcgcatgctccttcgtagatatgttgaggaactgtggtgtcttcacaccggaagaagcccaagaatacatcgacatcggtgctatcaactcattattcgtccttggtagatccatcggatttatcggccattacatggaccaaaagagactcaaacaaggattgtacaggcacccatgggatgacatttcatacgttctacctgaacaatacaacaatgataattagagtatagcatttaactaggtaaaaatcttgtaattattgaccgatagaggtctaggcacgtaccgtggcaccttacgcaatcggctcagtgtgtaagatttaggtttttaggatccaaatgttcgtgaagatgaaactagttatcagttatatttatgtagttaacactatattgaaacatcgacatgttaatctgatgtttttattactttgtttatgttattaaaaagctgtttgtgtacctgcggcatcgcagctgtatgatcgtctatgaaaagaataataaataggaaaaaactactcatgtttccgtcttttacatcgaaatttatagtgtattgttcccatagagtcttctaaagctgtgattgtaggcttaactaatacctcaaaaatattttggtgcctaaaaattattttttatacacttggtctttttgtaaaaacagtttttattgataattgataaatggttaccgtttgtcttgatgttaacaacacagttgctgttaacattattacaaaatatatgcgtgtttcataatgcaaataatgattagtatgcacctaaatgtaattgaagttgaatggtaaatatatctattagtagatccaaccgtcatttgtatcatggttacttttttgttcttgcattatgaactaactgcttagatgttcctctttatatttatatagccgaggcggaatatcgttgttgaccataacattatcgttttccatgttattttaataataattatttttagattttttatattgtagacgttatttattttttgaaaaattatgttgtaacattatgatttaaaattttgtaaatggtagaattttctgataaatataagtgttttatttttgtgaaagtcattcacatggatcaatgtttgactattttgttaacatggcggatttgatcataaatataattttatttcatataaaaa

SEQ ID NO: 1337 - DNA, 4390 bp, Diabrotica virgifera
  SmartBlast Evalue=0; Info=ATP-citrate synthase n=1 Tax=Aedes aegypti RepID=Q17D87_AEDAE
cgacaacatgtcatgtcaaaaatttgtcagcagaatcgtatgatttgaaagtgaattccgaaagcaatttatagtttttgttgtaataaaatagtgaatttttagtaactacctttaattcctgtccagtgtcttcttatttgtcagcccagttttaaaaaatgtcagcaaaagctatacgggaggcgacagggaaacacctcatcaacaaatacctcggcggtaacacagcggccgtacaatgcagatttgcttcagtcgaggctgacactaaattctctgaattagtaagcaacaacccatggttgaaaactgaaaaactagtcgttaaacctgatcaactaatcaaaaggagaggaaaattaggactgatagccgtaaataaagatttaaacaccgtcgtggactgggtaaatgaacgcatgaaccaaaatcaaaaagtcggcaacgccacaggaaaactacgaaacttcatcatcgaacctttcgttccacacaagcaagaagaagaggcttatgtctgcatatactcacatcgtcacgcagacactatcctcttttaccacgaagggggtgtcgatatcggtgatgtcgacagcaaagctcttaaattagatgttcctgttggacagactgtggacgcaggaactatttctaaggtactactaggagaagttccagcagccaaaaaacagatggtagctgattttatcgccaacctttacaaactctacgtggacttgtacttcacatacttagaaattaatcccttagttgtgactgataaggagatctacattttggacttagctgccaaattagatgccactgccgattttatatgcaagccacaatggggtgaaatcgattatcctccacctttcggacgtgatgcttacccagaggaagcctatatagccgacctagattcaaaatctggagctagtcttaaactgacaattctcaacaaatctggtagaatatggacaatggtagctggaggtggagcttctgttatttacagtgacaccatctgtgatttgggtggagctagcgaactcgccaactatggggaatactcaggtgcaccaactgaacaacaaacttacgaatacgccaaaaccatcctttccttgatgacacaagaaaagcatcctaaaggaaaagttctgattaccggagggggtattgccaatttcactaatgtagctgccactttccgcggtatcatcacggctttggtagagttcagggaaaggttgattgaacacaaaatttccatcttcgtcagaagagctggacccaattaccaggaaggtttaaggagaatgagagaagtcggacagactttgggtattcctctatacgtcttcggacctgaaactcacatgactgctatttgtggtatggctttgggaactcgcccaattccatcagaaaatcacgtagaaactgccacagcaaatttcgctcttcctagcggtgaaattgaacccaacaaacagcagcttgccagcaaagatggtgcggccaaaccagcagcccctccggcaaggaatatggtgggagactcaaaagcccttccaatgttcaccaacaatactaaagcaataatttggggaatgcagaaccgtgctatccagagcatgcttgacttcgatttcgtgtgcaacagaaaaagtcccagcgttgtagcaataatttaccccttcactggcgaccacaagcaaaaatactactggggacacaaagaaatactcattccggtatacaaacaaatgagagacgcgatgatgaaacatcctgacgctgatgtccttgttaacttcgcttcattacgttcaggttattctagtaccgtggaaaccctggagtatccacaaatcagaacaattgccatcattgctgaaggtattccagaaaactacaccaggaagttgatcaagttggctgacgagaagaaggtttctattattggacctgccacagttggtggagttaaaccagggtgctttaagattggtaacactggaggaatgatggacaacatcttacactcaaaattgtacagaccaggcagtgtagcttacgtctcaagatctggtggtatgtctaacgaattaaacaacatcgtgtccaaagcaaccgacggagtctacgaaggtgtagctatcggtggagacagataccctggaactactttcatggatcacattatgagatatcaagctgatgataatgttaagatgatcatccttcttggtgaagtaggaggtactgaggaataccaagtatgtaaagcattgcaaaccaaacaaattacaaagcctttggtagcttggtgtataggaacttgcgctggaatgttcacttcagaagtccaattcggccatgcaggatcttgcgctaactcaaaccaagaaactgccacagctaagaacgaagctctcaaggcagccggtgcacacgtacctgattctttcgattatttaggtgatatcgttggcaaagtatacgagcagcttgtaaaacaaggcgtgatagtgccaagaccagaagttcctccaccaaccgtgccaatggactacagttgggctcgtgagttggggcttattagaaaacccgccagcttcatgacttccatctgtgatgaaagaggacaagagctcatatatgcaggtatgcccatttctgatgtgcttcaaaagaacgtaggcatcggcggagtcatatcgcttttgtggttccaaagatgcttacctccgtacgcttgcaaattcttcgagatgtgcttgatggtgacagccgatcatggacctgcagtatcaggagctcacaacaccatagtctgtgcccgtgctggtaaagatctagtttccagtttggtatccggtcttcttacaatcggtgacaggttcggtggagctttggacggtgcagctaagatgttcagtgaagcctatgacaaaggtatgcatcctgccgaattcgttaaccacatgaggaacattggtcagctcatcatgggtattggccacagagtcaaatctatcaacaaccccgatcagagagtaaaaatagtcaaagagttcgtcatggctaacttccccgccactcccttacttcagtacgcactagaagtagaaaaaatcaccaccagcaagaaacccaacctcatccttaacgtcgacggtgtcatcgcatgctccttcgtagatatgttgaggaactgtggtgtcttcacaccggaagaagcccaagaatacatcgacatcggtgctatcaactcattattcgtccttggtagatccatcggatttatcggccattacatggaccaaaagagactcaaacaaggattgtacaggcacccatgggatgacatttcatacgttctacctgaacaatacaacaatgataattagagtatagcatttaactaggtaaaaatcttgtaattattgaccgatagaggtctaggcacgtaccgtggcaccttacgcaatcggctcagtgtgtaagatttaggtttttaggatccaaatgttcgtgaagatgaaactagttatcagttatatttatgtagttaacactatattgaaacatcgacatgttaatctgatgtttttattactttgtttatgttattaaaaagctgtttgtgtacctgcggcatcgcagctgtatgatcgtctatgaaaagaataataaataggaaaaaactactcatgtttccgtcttttacatcgaaatttatagtgtattgttcccatagagtcttctaaagctgtgattgtaggcttaactaatacctcaaaaatattttggtgcctaaaaattattttttatacacttggtctttttgtaaaaacagtttttattgataattgataaatggttaccgtttgtcttgatgttaacaacacagttgctgttaacattattacaaaatatatgcgtgtttcataatgcaaataatgattagtatgcacctaaatgtaattgaagttgaatggtaaatatatctattagtagatccaaccgtcatttgtatcatggttacttttttgttcttgcattatgaactaactgcttagatgttcctctttatatttatatagccgaggcggaatatcgttgttgaccataacattatcgttttccatgttattttaataataattatttttagattttttatattgtagacgttatttattttttgaaaaattatgttgtaacattatgatttaaaattttgtaaatggtagaattttctgataaatataagtgttttatttttgtgaaagtcattcacatggatcaatgtttgactattttgttaacatggcggatttgatcataaatataattttatttcatataaaaa

SEQ ID NO: 1338 - DNA, 1243 bp, Diabrotica virgifera
  SmartBlast Evalue=1E-129; Info=Cathepsin B-like proteinase n=1 Tax=Diabrotica virgifera virgifera RepID=Q70EW7_DIAVI
gaatagagagccattccataagtctcgcagtactgcgtagtgcgatcaaccaaaatttgcagtccttctctgctgtccgcaaggagtataatatatagaatatagaaggagtataatatatagaccagtataatataaataaaagtataattaattcctcttcatcttttacagattgaccaaaatgaaagcggcttgtattattacactattactacctgttgtattaagttacaaagctaacttaaatcctctttcaaatgagtttataaactacatcaatagcaaacaaagtacatgggttgctggaagaaactttgatgaaaacctttcaatccaagagatgaaaaaattattaggaacaaagaaaaggaatttaggggatgtaaaaggatttatccatagtgagaatattcaagttccagattctttcgacgccagggaaaactggaaagtgtgttcagatgtaatcaacactattgcagatcaatctgcttgtttagctggttgggccgtagctgcagcttctgcaatgagtgacagacgatgcatagcctcccaaggaaagcttaaagtacctgtttctgctgaaaatctaatggcttgtatcgctttcggatgcgacggaggatatctggaagatggatggtggttatgggaggcgaatggaattcctacaggaggcctttatggcagcaaccagggttgccaaccttattctcttccaccatgtgaacataatacaactggtactaaagtgcaatgcagtactttgaagttagatacacctacttgcagaactcaatgtaacgatcccgcacttaattataagtccgagttaacttttgcttcaggtccatcgtattcgttcactacagtagccaatatgcaaaaggaaatattgacaaatggtccggtagaaacgactttccacttgtacagtgatttctggagttataaaagtggtgtttatcaacatgtcgctggagatgatttaggataccattccgtcaaagttttaggttggggtgtagagaatggagtcccatattggttggctgctaattcatggaatgaagattggggagacaagggattatttaaaatacttcgcggaaaaaatgaagtagagttcgagtaccaaatgatggcggcacgtccaaaagtctaattttaaacaaaatattggtgttacgcttatgtaggtacgttttattttaaataaaaaacttgatttctaaaa

SEQ ID NO: 1339 - DNA, 1239 bp, Diabrotica virgifera
  SmartBlast Evalue=1E-129; Info=Cathepsin B-like proteinase n=1 Tax=Diabrotica virgifera virgifera RepID=Q70EW7_DIAVI
gaatagagagccattccataagtctcgcagtactgcgtagtgcgatcaaccaaaatttgcagtccttctctgctgtccgcaaggagtataatatatagaatatagaaggagtataatatatagaccagtataatataaataaaagtataattaattcctcttcatcttttacagattgaccaaaatgaaagcggcttgtattattacactattactacctgttgtattaagttacaaagctaacttaaatcctctttcaaatgagtttataaactacatcaatagcaaacaaagtacatgggttgctggaagaaactttgatgaaaacctttcaatccaagagatgaaaaaattattaggaacaaagaaaaggaatttaggggatgtaaaaggatttatccatagtgagaatattcaagttccagattctttcgacgccagggaaaactggaaagtgtgttcagatgtaatcaacactattgcagatcaatctgcttgtttagctggttgggccgtagctgcagcttctgcaatgagtgacagacgatgcatagcctcccaaggaaagcttaaagtacctgtttctgctgaaaatctaatggcttgtatcgctttcggatgcgacggaggatatctggaagatggatggtggttatgggaggcgaatggaattcctacaggaggcctttatggcagcaaccagggttgccaaccttattctcttccaccatgtgaacataatacaactggtactaaagtgcaatgcagtactttgaagttagatacacctacttgcagaactcaatgtaacgatcccgcacttaattataagtccgagttaacttttgcttcaggtccatcgtattcgttcactacagtagccaatatgcaaaaggaaatattgacaaatggtccggtagaaacgactttccacttgtacagtgatttctggagttataaaagtggtgtttatcaacatgtcgctggagatgatttaggataccattccgtcaaagttttaggttggggtgtagagaatggagtcccatattggttggctgctaattcatggaatgaagattggggagacaagggattatttaaaatacttcgcggaaaaaatgaagtagagttcgagtaccaaatgatggcggcacgtccaaaagtctaattttaaacaaaatattggtgttacgcttatgtaggtacgttttattttaaataaaaaacttgatttct

SEQ ID NO: 1340 - DNA, 1084 bp, Diabrotica virgifera
  misc_feature (5)..(5): n is a, c, g, or t
  SmartBlast Evalue=1E-133; Info=Cathepsin B-like proteinase n=1 Tax=Diabrotica virgifera virgifera RepID=Q70EW7_DIAVI
taganattgaccaaaatgaaagcggcttgtattattacactattactacctgttgtattaagttacaaagctaacttaaatcctctttcaaatgagtttataaactatatcaatagcaagcaaaacacatgggttgctggaaagaactttgatgagaaactttcaatccaagaaataaaaaatttattaggagcgagaaaaaggagtttaggagatgtaaaaggatttatgcacagtgaagatattcaagttccagattctttcgatgcaagggaaaactggaaagactgttcagatgttatcagcactattgtagaccaatctgcttgtggatcttgctgggcaatgtctgcagcatctgcaatgagtgacagacgatgcatagtcacccagggaaagcttaaagtgcctgtttctgctgaaaatttattgtcttgttgcgatgactgtggatttggatgcgccggaggatatatagatgatgcatggtcgttttggcaagagaatggaattactacaggaggtctttacggcagcaaccagggttgtcaatcatattcgcttcaaccttgtgaacatcatacaaatggtactaaagtgcaatgcagtactttgaactacggcacaccttcttgcagaagcgatcaatgtgacgataccgcactaaattataagtccgagttaacttatgcctcaggtccagtgaattactatactacagttcccaatatgcaaaaggaaatattgacaaatggtccgatacaaactcgttttgatgtgtacagcgatttcttcagttacaaaagtggtgtttatcaacatgtcgctggagattatgtaggaggacatgccgtcagagttttaggttggggagtagagaatggagtcgcttattggttggctgctaattcatggaatgaagattggggagacaagggattgtttaaaataattcgcggaacaaatgaatgcagtttcgagaatggtatggttgcgtcaactccaaaagtctaattctaaacaaaatattggaaataggcttaattctgttttattttaaataaaacacttgatctctaaaaaa

SEQ ID NO: 1341 - DNA, 1183 bp, Diabrotica virgifera
  SmartBlast Evalue=1E-129; Info=Cathepsin B-like proteinase n=1 Tax=Diabrotica virgifera virgifera RepID=Q70EW7_DIAVI
tttcaatcaacgataatatcgaatgtactaaaaaacatttggtgcacgtgactttgaaactgatattatataaatggtatttcttgttttttagctcagaatttatgaatatagattcacgaaaatgaaggcggcttttattattacactattactacctgttgtattaagttacacagctaacttaaatcctctttcaaatgagtttataaactacatcaatagcaaacaaagtacatgggttgctggaagaaactttgatgaaaacctttcaatccaagagatgaaaaaattattaggaacaaagaaaaggaatttaggggatgtaaaaggatttatccatagtgagaatattcaagttccagattctttcgacgccagggaaaactggaaagtgtgttcagatgtaatcaacactattgcagatcaatctgcttgtttagctggttgggccgtagctgcagcttctgcaatgagtgacagacgatgcatagcctcccaaggaaagcttaaagtacctgtttctgctgaaaatctaatggcttgtatcgctttcggatgcgacggaggatatctggaagatggatggtggttatgggaggcgaatggaattcctacaggaggcctttatggcagcaaccagggttgccaaccttattctcttccaccatgtgaacataatacaactggtactaaagtgcaatgcagtactttgaagttagatacacctacttgcagaactcaatgtaacgatcccgcacttaattataagtccgagttaacttttgcttcaggtccatcgtattcgttcactacagtagccaatatgcaaaaggaaatattgacaaatggtccggtagaaacgactttccacttgtacagtgatttctggagttataaaagtggtgtttatcaacatgtcgctggagatgatttaggataccattccgtcaaagttttaggttggggtgtagagaatggagtcccatattggttggctgctaattcatggaatgaagattggggagacaagggattatttaaaatacttcgcggaaaaaatgaagtagagttcgagtaccaaatgatggcggcacgtccaaaagtctaattttaaacaaaatattggtgttacgcttatgtaggtacgttttattttaaataaaaaacttgatttctaaaa

SEQ ID NO: 1342 - DNA, 1179 bp, Diabrotica virgifera
  SmartBlast Evalue=1E-129; Info=Cathepsin B-like proteinase n=1 Tax=Diabrotica virgifera virgifera RepID=Q70EW7_DIAVI
tttcaatcaacgataatatcgaatgtactaaaaaacatttggtgcacgtgactttgaaactgatattatataaatggtatttcttgttttttagctcagaatttatgaatatagattcacgaaaatgaaggcggcttttattattacactattactacctgttgtattaagttacacagctaacttaaatcctctttcaaatgagtttataaactacatcaatagcaaacaaagtacatgggttgctggaagaaactttgatgaaaacctttcaatccaagagatgaaaaaattattaggaacaaagaaaaggaatttaggggatgtaaaaggatttatccatagtgagaatattcaagttccagattctttcgacgccagggaaaactggaaagtgtgttcagatgtaatcaacactattgcagatcaatctgcttgtttagctggttgggccgtagctgcagcttctgcaatgagtgacagacgatgcatagcctcccaaggaaagcttaaagtacctgtttctgctgaaaatctaatggcttgtatcgctttcggatgcgacggaggatatctggaagatggatggtggttatgggaggcgaatggaattcctacaggaggcctttatggcagcaaccagggttgccaaccttattctcttccaccatgtgaacataatacaactggtactaaagtgcaatgcagtactttgaagttagatacacctacttgcagaactcaatgtaacgatcccgcacttaattataagtccgagttaacttttgcttcaggtccatcgtattcgttcactacagtagccaatatgcaaaaggaaatattgacaaatggtccggtagaaacgactttccacttgtacagtgatttctggagttataaaagtggtgtttatcaacatgtcgctggagatgatttaggataccattccgtcaaagttttaggttggggtgtagagaatggagtcccatattggttggctgctaattcatggaatgaagattggggagacaagggattatttaaaatacttcgcggaaaaaatgaagtagagttcgagtaccaaatgatggcggcacgtccaaaagtctaattttaaacaaaatattggtgttacgcttatgtaggtacgttttattttaaataaaaaacttgatttct

SEQ ID NO: 1343 - DNA, 1074 bp, Diabrotica virgifera
  misc_feature (5)..(5): n is a, c, g, or t
  SmartBlast Evalue=1E-129; Info=Cathepsin B-like proteinase n=1 Tax=Diabrotica virgifera virgifera RepID=Q70EW7_DIAVI
taganattgaccaaaatgaaagcggcttgtattattacactattactacctgttgtattaagttacaaagctaacttaaatcctctttcaaatgagtttataaactacatcaatagcaaacaaagtacatgggttgctggaagaaactttgatgaaaacctttcaatccaagagatgaaaaaattattaggaacaaagaaaaggaatttaggggatgtaaaaggatttatccatagtgagaatattcaagttccagattctttcgacgccagggaaaactggaaagtgtgttcagatgtaatcaacactattgcagatcaatctgcttgtttagctggttgggccgtagctgcagcttctgcaatgagtgacagacgatgcatagcctcccaaggaaagcttaaagtacctgtttctgctgaaaatctaatggcttgtatcgctttcggatgcgacggaggatatctggaagatggatggtggttatgggaggcgaatggaattcctacaggaggcctttatggcagcaaccagggttgccaaccttattctcttccaccatgtgaacataatacaactggtactaaagtgcaatgcagtactttgaagttagatacacctacttgcagaactcaatgtaacgatcccgcacttaattataagtccgagttaacttttgcttcaggtccatcgtattcgttcactacagtagccaatatgcaaaaggaaatattgacaaatggtccggtagaaacgactttccacttgtacagtgatttctggagttataaaagtggtgtttatcaacatgtcgctggagatgatttaggataccattccgtcaaagttttaggttggggtgtagagaatggagtcccatattggttggctgctaattcatggaatgaagattggggagacaagggattatttaaaatacttcgcggaaaaaatgaagtagagttcgagtaccaaatgatggcggcacgtccaaaagtctaattttaaacaaaatattggtgttacgcttatgtaggtacgttttattttaaataaaaaacttgatttctaaaa

SEQ ID NO: 1344 - DNA, 1070 bp, Diabrotica virgifera
  misc_feature (5)..(5): n is a, c, g, or t
  SmartBlast Evalue=1E-129; Info=Cathepsin B-like proteinase n=1 Tax=Diabrotica virgifera virgifera RepID=Q70EW7_DIAVI
taganattgaccaaaatgaaagcggcttgtattattacactattactacctgttgtattaagttacaaagctaacttaaatcctctttcaaatgagtttataaactacatcaatagcaaacaaagtacatgggttgctggaagaaactttgatgaaaacctttcaatccaagagatgaaaaaattattaggaacaaagaaaaggaatttaggggatgtaaaaggatttatccatagtgagaatattcaagttccagattctttcgacgccagggaaaactggaaagtgtgttcagatgtaatcaacactattgcagatcaatctgcttgtttagctggttgggccgtagctgcagcttctgcaatgagtgacagacgatgcatagcctcccaaggaaagcttaaagtacctgtttctgctgaaaatctaatggcttgtatcgctttcggatgcgacggaggatatctggaagatggatggtggttatgggaggcgaatggaattcctacaggaggcctttatggcagcaaccagggttgccaaccttattctcttccaccatgtgaacataatacaactggtactaaagtgcaatgcagtactttgaagttagatacacctacttgcagaactcaatgtaacgatcccgcacttaattataagtccgagttaacttttgcttcaggtccatcgtattcgttcactacagtagccaatatgcaaaaggaaatattgacaaatggtccggtagaaacgactttccacttgtacagtgatttctggagttataaaagtggtgtttatcaacatgtcgctggagatgatttaggataccattccgtcaaagttttaggttggggtgtagagaatggagtcccatattggttggctgctaattcatggaatgaagattggggagacaagggattatttaaaatacttcgcggaaaaaatgaagtagagttcgagtaccaaatgatggcggcacgtccaaaagtctaattttaaacaaaatattggtgttacgcttatgtaggtacgttttattttaaataaaaaacttgatttct

SEQ ID NO: 1345 - DNA, 968 bp, Diabrotica virgifera
  SmartBlast Evalue=1E-112; Info=Cathepsin B-like proteinase n=1 Tax=Diabrotica virgifera virgifera RepID=Q70EW7_DIAVI
atatcaatagcaaacaaagctcatgggtggctggaagaaactttgatgaaaacctttcaacccaagagctcaaaaagttattaggcacaaagaaaaggaatttaggggacgtaaaaggatttatccatagtgaaaatattcaaattccagattctttcgatgcaagggaaaactggaaagagtgttcagatgttatcaacactattgtcgatcaatctgcttgtgcggctggttgggccctagctgcagcttctgcaatgagtgatagacgatgcatagcctcccaaggaaagcttaaagtgcctgtttctgctgaaaatgtagtggcttgtagccgtaatagtcttggatgcaaaataggatatatggaagatggatggtggtattggctaaaaaatggaattcctacaggaggtctttatggcagcaaacagggttgtcaaccatattcgcttcaatcttgtgaacatcatacaaatggtactaaagtggattgcagtactttgaaattggatacacctacttgcagaactcaatgtaacgatcccgcacttaattataagtccgagttaacttatgctgcaggtccaccagattggtacactagagttgccgatatgcaaagggaaataatgacaaatggtccagtagaaacaactttccgcttgtacactgatttctggaattataaaagtggtgtttatcataatgtcggtggagattatgctggagaccattgcgtcagagttttaggctggggtgtagagaatggagtcccatattggttggctgctaattcatggaatgaagattggggagacaagggattctttaaaatacttcgcggaaaaaatgaagtaaaattcgaagaccaaatgcttgcgtcacgtccaaaagtctaattgtaaacaaaatattggtgttacgctcacgtacgttttattttaaaaaaaaaacttgatttctaa

SEQ ID NO: 1346 - DNA, 1284 bp, Diabrotica virgifera
  SmartBlast Evalue=0; Info=Cathepsin B-like proteinase n=1 Tax= Diabrotica virgifera virgifera RepID=Q70EW7_DIAVI
attcttggattaatctgatgaaatcctttgcaacaaatgagaagttcgaagtataaaattcgaataaaaaaattgcaaaagataaaagtgattatatttaaacaatagatgtaatattgaatgaactaaaaaacatttaagtcacgtgacttagtatctaatatataaattgtgtttacgctttcttcgtaatcagtatttagtgaatacagattcacgaaaatgaaggctgcttttattattacactactactacctattgtattaagttacaaaggtaacccaaatcctctttcaaatgactttataaactacatcaatagcaaacaaagtacatgggttgctggaaaaaactttgatgagaacctttcaatccaagagatcaaaaatttgttaggagcaaagaaaggtaaattaggcgtggctaaagaatttacacacagtgaagatattcaagttcccaattctttcgatgcaagagaaaactggaaagaatgttcagatgttatcagcaccgttgtagatcaatccgattgtggatcttgctgggccgtcgctgcagcttctgcaatgagtgacagacgatgcatagcatcccagggaaagcttaaagtacctgtttcggctgaaaatctattgtcttgctgcgattcctgtggatatggatgcgaaggaggatatccaaccatggcatggagttattggatagatacaggaattactacaggaggcctttatggcagcaaacagggttgtcaaccttattcgcttcaaccatgtgaacatcatacagagggtaataaagtacaatgcagcactttggactatgacacaccttcttgtaaacataaatgtgacgattccgcactcaattataagtccgagttaacttttggttcaggttctgtgcgtaacttctattcagttgcaaatattcaaaaggaaatattgacgaatggtccggtagaagcagcttttgatgtgtacagcgacttcgtgaattataaaagtggtgtctatcaacatgttgctggagaatatttaggaggacatgccgtcagaattttaggttggggagaagagagtggagtcccttattggttggttgctaattcatggaatgaagattggggagacaagggattgtttaaaatacgtcgcggaaataatgaatcaggcttcgaggactctattgttgctgcacctgctcaagtctaattttaaacgaaatattagtgttacgtttaatatgttttattttaaataaaaaaattatttctaaaa

SEQ ID NO: 1347 - DNA, 1246 bp, Diabrotica virgifera
  SmartBlast Evalue=0; Info=Cathepsin B-like proteinase n=1 Tax= Diabrotica virgifera virgifera RepID=Q70EW7_DIAVI
gaatagagagccattccataagtctcgcagtactgcgtagtgcgatcaaccaaaatttgcagtccttctctgctgtccgcaaggagtataatatatagaatatagaaggagtataatatatagaccagtataatataaataaaagtataattaattcctcttcatcttttacagattgaccaaaatgaaagcggcttgtattattacactattactacctgttgtattaagttacaaagctaacttaaatcctctttcaaatgagtttataaactacatcaatagcaaacaaagtacatgggttgctggaaaaaactttgatgagaacctttcaatccaagagatcaaaaatttgttaggagcaaagaaaggtaaattaggcgtggctaaagaatttacacacagtgaagatattcaagttcccaattctttcgatgcaagagaaaactggaaagaatgttcagatgttatcagcaccgttgtagatcaatccgattgtggatcttgctgggccgtcgctgcagcttctgcaatgagtgacagacgatgcatagcatcccagggaaagcttaaagtacctgtttcggctgaaaatctattgtcttgctgcgattcctgtggatatggatgcgaaggaggatatccaaccatggcatggagttattggatagatacaggaattactacaggaggcctttatggcagcaaacagggttgtcaaccttattcgcttcaaccatgtgaacatcatacagagggtaataaagtacaatgcagcactttggactatgacacaccttcttgtaaacataaatgtgacgattccgcactcaattataagtccgagttaacttttggttcaggttctgtgcgtaacttctattcagttgcaaatattcaaaaggaaatattgacgaatggtccggtagaagcagcttttgatgtgtacagcgacttcgtgaattataaaagtggtgtctatcaacatgttgctggagaatatttaggaggacatgccgtcagaattttaggttggggagaagagagtggagtcccttattggttggttgctaattcatggaatgaagattggggagacaagggattgtttaaaatacgtcgcggaaataatgaatcaggcttcgaggactctattgttgctgcacctgctcaagtctaattttaaacgaaatattagtgttacgtttaatatgttttattttaaataaaaaaattatttctaaaa

SEQ ID NO: 1348 - DNA, 1186 bp, Diabrotica virgifera
  SmartBlast Evalue=0; Info=Cathepsin B-like proteinase n=1 Tax= Diabrotica virgifera virgifera RepID=Q70EW7_DIAVI
tttcaatcaacgataatatcgaatgtactaaaaaacatttggtgcacgtgactttgaaactgatattatataaatggtatttcttgttttttagctcagaatttatgaatatagattcacgaaaatgaaggcggcttttattattacactattactacctgttgtattaagttacacagctaacttaaatcctctttcaaatgagtttataaactacatcaatagcaaacaaagtacatgggttgctggaaaaaactttgatgagaacctttcaatccaagagatcaaaaatttgttaggagcaaagaaaggtaaattaggcgtggctaaagaatttacacacagtgaagatattcaagttcccaattctttcgatgcaagagaaaactggaaagaatgttcagatgttatcagcaccgttgtagatcaatccgattgtggatcttgctgggccgtcgctgcagcttctgcaatgagtgacagacgatgcatagcatcccagggaaagcttaaagtacctgtttcggctgaaaatctattgtcttgctgcgattcctgtggatatggatgcgaaggaggatatccaaccatggcatggagttattggatagatacaggaattactacaggaggcctttatggcagcaaacagggttgtcaaccttattcgcttcaaccatgtgaacatcatacagagggtaataaagtacaatgcagcactttggactatgacacaccttcttgtaaacataaatgtgacgattccgcactcaattataagtccgagttaacttttggttcaggttctgtgcgtaacttctattcagttgcaaatattcaaaaggaaatattgacgaatggtccggtagaagcagcttttgatgtgtacagcgacttcgtgaattataaaagtggtgtctatcaacatgttgctggagaatatttaggaggacatgccgtcagaattttaggttggggagaagagagtggagtcccttattggttggttgctaattcatggaatgaagattggggagacaagggattgtttaaaatacgtcgcggaaataatgaatcaggcttcgaggactctattgttgctgcacctgctcaagtctaattttaaacgaaatattagtgttacgtttaatatgttttattttaaataaaaaaattatttctaaaa

SEQ ID NO: 1349 - DNA, 1077 bp, Diabrotica virgifera
  misc_feature (5)..(5): n is a, c, g, or t
  SmartBlast Evalue=0; Info=Cathepsin B-like proteinase n=1 Tax= Diabrotica virgifera virgifera RepID=Q70EW7_DIAVI
taganattgaccaaaatgaaagcggcttgtattattacactattactacctgttgtattaagttacaaagctaacttaaatcctctttcaaatgagtttataaactacatcaatagcaaacaaagtacatgggttgctggaaaaaactttgatgagaacctttcaatccaagagatcaaaaatttgttaggagcaaagaaaggtaaattaggcgtggctaaagaatttacacacagtgaagatattcaagttcccaattctttcgatgcaagagaaaactggaaagaatgttcagatgttatcagcaccgttgtagatcaatccgattgtggatcttgctgggccgtcgctgcagcttctgcaatgagtgacagacgatgcatagcatcccagggaaagcttaaagtacctgtttcggctgaaaatctattgtcttgctgcgattcctgtggatatggatgcgaaggaggatatccaaccatggcatggagttattggatagatacaggaattactacaggaggcctttatggcagcaaacagggttgtcaaccttattcgcttcaaccatgtgaacatcatacagagggtaataaagtacaatgcagcactttggactatgacacaccttcttgtaaacataaatgtgacgattccgcactcaattataagtccgagttaacttttggttcaggttctgtgcgtaacttctattcagttgcaaatattcaaaaggaaatattgacgaatggtccggtagaagcagcttttgatgtgtacagcgacttcgtgaattataaaagtggtgtctatcaacatgttgctggagaatatttaggaggacatgccgtcagaattttaggttggggagaagagagtggagtcccttattggttggttgctaattcatggaatgaagattggggagacaagggattgtttaaaatacgtcgcggaaataatgaatcaggcttcgaggactctattgttgctgcacctgctcaagtctaattttaaacgaaatattagtgttacgtttaatatgttttattttaaataaaaaaattatttctaaaa

SEQ ID NO: 1350 - DNA, 1290 bp, Diabrotica virgifera
  SmartBlast Evalue=1E-106; Info=Cathepsin B-like proteinase n=1 Tax=Diabrotica virgifera virgifera RepID=Q70EW7_DIAVI
attcttggattaatctgatgaaatcctttgcaacaaatgagaagttcgaagtataaaattcgaataaaaaaattgcaaaagataaaagtgattatatttaaacaatagatgtaatattgaatgaactaaaaaacatttaagtcacgtgacttagtatctaatatataaattgtgtttacgctttcttcgtaatcagtatttagtgaatacagattcacgaaaatgaaggctgcttttattattacactactactacctattgtattaagttacaaaggtaacccaaatcctctttcaaatgactttataaactatatcaatagcaagcaaaacacatgggttgctggaaagaactttgatgagaaactttcaatccaagaaataaaaatttattaggagcgagaaaaaggagtttaggagatgtaaaaggatttatgcacagtgaagatattcaagttccagattctttcgatgcaagggaaaactggaaagactgttcagatgttatcagcactattgtagaccaatctgcttgtggatcttgctgggcaatgtctgcagcatctgcaatgagtgacagacgatgcatagtcacccagggaaagcttaaagtgcctgtttctgctgaaaatttattgtcttgttgcgatgactgtggatttggatgcgccggaggatatatagatgatgcatggtcgttttggcaagagaatggaattactacaggaggtctttacggcagcaaccagggttgtcaatcatattcgcttcaaccttgtgaacatcatacaaatggtactaaagtgcaatgcagtactttgaactacggcacaccttcttgcagaagcgatcaatgtgacgataccgcactaaattataagtccgagttaacttatgcctcaggtccagtgaattactatactacagttcccaatatgcaaaaggaaatattgacaaatggtccgatacaaactcgttttgatgtgtacagcgatttcttcagttacaaaagtggtgtttatcaacatgtcgctggagattatgtaggaggacatgccgtcagagttttaggttggggagtagagaatggagtcgcttattggttggctgctaattcatggaatgaagattggggagacaagggattgtttaaaataattcgcggaacaaatgaatgcagtttcgagaatggtatggttgcgtcaactccaaaagtctaattctaaacaaaatattggaaataggcttaattctgttttattttaaataaaacacttgatctctaaaaaa

SEQ ID NO: 1351 - DNA, 1253 bp, Diabrotica virgifera
  SmartBlast Evalue=1E-133; Info=Cathepsin B-like proteinase n=1 Tax=Diabrotica virgifera virgifera RepID=Q70EW7_DIAVI
gaatagagagccattccataagtctcgcagtactgcgtagtgcgatcaaccaaaatttgcagtccttctctgctgtccgcaaggagtataatatatagaatatagaaggagtataatatatagaccagtataatataaataaaagtataattaattcctcttcatcttttacagattgaccaaaatgaaagcggcttgtattattacactattactacctgttgtattaagttacaaagctaacttaaatcctctttcaaatgagtttataaactatatcaatagcaagcaaaacacatgggttgctggaaagaactttgatgagaaactttcaatccaagaaataaaaaatttattaggagcgagaaaaaggagtttaggagatgtaaaaggatttatgcacagtgaagatattcaagttccagattctttcgatgcaagggaaaactggaaagactgttcagatgttatcagcactattgtagaccaatctgcttgtggatcttgctgggcaatgtctgcagcatctgcaatgagtgacagacgatgcatagtcacccagggaaagcttaaagtgcctgtttctgctgaaaatttattgtcttgttgcgatgactgtggatttggatgcgccggaggatatatagatgatgcatggtcgttttggcaagagaatggaattactacaggaggtctttacggcagcaaccagggttgtcaatcatattcgcttcaaccttgtgaacatcatacaaatggtactaaagtgcaatgcagtactttgaactacggcacaccttcttgcagaagcgatcaatgtgacgataccgcactaaattataagtccgagttaacttatgcctcaggtccagtgaattactatactacagttcccaatatgcaaaaggaaatattgacaaatggtccgatacaaactcgttttgatgtgtacagcgatttcttcagttacaaaagtggtgtttatcaacatgtcgctggagattatgtaggaggacatgccgtcagagttttaggttggggagtagagaatggagtcgcttattggttggctgctaattcatggaatgaagattggggagacaagggattgtttaaaataattcgcggaacaaatgaatgcagtttcgagaatggtatggttgcgtcaactccaaaagtctaattctaaacaaaatattggaaataggcttaattctgttttattttaaataaaacacttgatctctaaaaaa

SEQ ID NO: 1352 - DNA, 1193 bp, Diabrotica virgifera
  SmartBlast Evalue=1E-133; Info=Cathepsin B-like proteinase n=1 Tax=Diabrotica virgifera virgifera RepID=Q70EW7_DIAVI
tttcaatcaacgataatatcgaatgtactaaaaaacatttggtgcacgtgactttgaaactgatattatataaatggtatttcttgttttttagctcagaatttatgaatatagattcacgaaaatgaaggcggcttttattattacactattactacctgttgtattaagttacacagctaacttaaatcctctttcaaatgagtttataaactatatcaatagcaagcaaaacacatgggttgctggaaagaactttgatgagaaactttcaatccaagaaataaaaaatttattaggagcgagaaaaaggagtttaggagatgtaaaaggatttatgcacagtgaagatattcaagttccagattctttcgatgcaagggaaaactggaaagactgttcagatgttatcagcactattgtagaccaatctgcttgtggatcttgctgggcaatgtctgcagcatctgcaatgagtgacagacgatgcatagtcacccagggaaagcttaaagtgcctgtttctgctgaaaatttattgtcttgttgcgatgactgtggatttggatgcgccggaggatatatagatgatgcatggtcgttttggcaagagaatggaattactacaggaggtctttacggcagcaaccagggttgtcaatcatattcgcttcaaccttgtgaacatcatacaaatggtactaaagtgcaatgcagtactttgaactacggcacaccttcttgcagaagcgatcaatgtgacgataccgcactaaattataagtccgagttaacttatgcctcaggtccagtgaattactatactacagttcccaatatgcaaaaggaaatattgacaaatggtccgatacaaactcgttttgatgtgtacagcgatttcttcagttacaaaagtggtgtttatcaacatgtcgctggagattatgtaggaggacatgccgtcagagttttaggttggggagtagagaatggagtcgcttattggttggctgctaattcatggaatgaagattggggagacaagggattgtttaaaataattcgcggaacaaatgaatgcagtttcgagaatggtatggttgcgtcaactccaaaagtctaattctaaacaaaatattggaaataggcttaattctgttttattttaaataaaacacttgatctctaaaaaa

SEQ ID NO: 1353 - DNA, 1281 bp, Diabrotica virgifera
  SmartBlast Evalue=1E-132; Info=Cathepsin B-like proteinase n=1 Tax=Diabrotica virgifera virgifera RepID=Q70EW7_DIAVI
attcttggattaatctgatgaaatcctttgcaacaaatgagaagttcgaagtataaaattcgaataaaaaaattgcaaaagataaaagtgattatatttaaacaatagatgtaatattgaatgaactaaaaaacatttaagtcacgtgacttagtatctaatatataaattgtgtttacgctttcttcgtaatcagtatttagtgaatacagattcacgaaaatgaaggctgcttttattattacactactactacctattgtattaagttacaaaggtaacccaaatcctctttcaaatgactttataaactacatcaatagcaaacaaagtacatgggttgctggaagaaactttgatgaaaacctttcaatccaagagatgaaaaaattattaggaacaaagaaaaggaatttaggggatgtaaaaggatttatccatagtgagaatattcaagttccagattctttcgacgccagggaaaactggaaagtgtgttcagatgtaatcaacactattgcagatcaatctgcttgtttagctggttgggccgtagctgcagcttctgcaatgagtgacagacgatgcatagcctcccaaggaaagcttaaagtacctgtttctgctgaaaatctaatggcttgtatcgctttcggatgcgacggaggatatctggaagatggatggtggttatgggaggcgaatggaattcctacaggaggcctttatggcagcaaccagggttgccaaccttattctcttccaccatgtgaacataatacaactggtactaaagtgcaatgcagtactttgaagttagatacacctacttgcagaactcaatgtaacgatcccgcacttaattataagtccgagttaacttttgcttcaggtccatcgtattcgttcactacagtagccaatatgcaaaaggaaatattgacaaatggtccggtagaaacgactttccacttgtacagtgatttctggagttataaaagtggtgtttatcaacatgtcgctggagatgatttaggataccattccgtcaaagttttaggttggggtgtagagaatggagtcccatattggttggctgctaattcatggaatgaagattggggagacaagggattatttaaaatacttcgcggaaaaaatgaagtagagttcgagtaccaaatgatggcggcacgtccaaaagtctaattttaaacaaaatattggtgttacgcttatgtaggtacgttttattttaaataaaaaacttgatttctaaaa

SEQ ID NO: 1354 - DNA, 1277 bp, Diabrotica virgifera
  SmartBlast Evalue=1E-132; Info=Cathepsin B-like proteinase n=1 Tax=Diabrotica virgifera virgifera RepID=Q70EW7_DIAVI
attcttggattaatctgatgaaatcctttgcaacaaatgagaagttcgaagtataaaattcgaataaaaaaattgcaaaagataaaagtgattatatttaaacaatagatgtaatattgaatgaactaaaaaacatttaagtcacgtgacttagtatctaatatataaattgtgtttacgctttcttcgtaatcagtatttagtgaatacagattcacgaaaatgaaggctgcttttattattacactactactacctattgtattaagttacaaaggtaacccaaatcctctttcaaatgactttataaactacatcaatagcaaacaaagtacatgggttgctggaagaaactttgatgaaaacctttcaatccaagagatgaaaaaattattaggaacaaagaaaaggaatttaggggatgtaaaaggatttatccatagtgagaatattcaagttccagattctttcgacgccagggaaaactggaaagtgtgttcagatgtaatcaacactattgcagatcaatctgcttgtttagctggttgggccgtagctgcagcttctgcaatgagtgacagacgatgcatagcctcccaaggaaagcttaaagtacctgtttctgctgaaaatctaatggcttgtatcgctttcggatgcgacggaggatatctggaagatggatggtggttatgggaggcgaatggaattcctacaggaggcctttatggcagcaaccagggttgccaaccttattctcttccaccatgtgaacataatacaactggtactaaagtgcaatgcagtactttgaagttagatacacctacttgcagaactcaatgtaacgatcccgcacttaattataagtccgagttaacttttgcttcaggtccatcgtattcgttcactacagtagccaatatgcaaaaggaaatattgacaaatggtccggtagaaacgactttccacttgtacagtgatttctggagttataaaagtggtgtttatcaacatgtcgctggagatgatttaggataccattccgtcaaagttttaggttggggtgtagagaatggagtcccatattggttggctgctaattcatggaatgaagattggggagacaagggattatttaaaatacttcgcggaaaaaatgaagtagagttcgagtaccaaatgatggcggcacgtccaaaagtctaattttaaacaaaatattggtgttacgcttatgtaggtacgttttattttaaataaaaaacttgatttct

SEQ ID NO: 1355 - DNA, 6283 bp, Diabrotica virgifera
  SmartBlast Evalue=0; Info=Muscle myosin heavy chain n=1 Tax= Papilio xuthus RepID=B2DBI1_9NEOP
aacaatataacttttatgtttattggtgccttatatcatacaacattatcatacatacaatatcattatacaacctacatattttcataacaaaataattggcattttgagaaatgaagagatcaaagggctgtcttggtggtaaatacgtgtctctgaatactcccttcgttctcctttttctcgaacatttacggaatcatacaactctaatattcaaaaacgaaaataaaaaattaataaaagtaaaatcgcatagagttggttttgatgcgacctaaacagttcgtttgtttattaagattctaacacagcgcgcatgttcactcgaaatcaggtgctaagtcgaaccttggggggaatggaccacctagagcgtctcccattcccaaggtggggcgctgtctttggggcgctggactggctcctctagctgcagatcctgaacgtcccttggcacggaatttggcgatggcctgttcggcgaggtcggctctttcttcggcttcttcgagctcttgttgggctttacggaatttggccaagttcaaagcggcgatttcttcggcttcttctatctgtctcttgtaggtcttgatcttttgttggagtttgtcgacgaggtcttgcatcctctcgtggttcttgcggtcttcttcagcttggaagctaagttccttgatacgacgttcagactttctcaagttcttttgggcatccgcgtgccgcctttgttcaccgtctaattcattttctaattctctaacacgttgttccaatttggcaatagccttctttcctcctttaagggcattggcttcagcttcgtccaagcgtacttggaggtccttgatttgagcttcgagagctttacggagtttctcttgtgtttgggcatggtcttgttcagcgcggagttcatcagcgagacgagcggcatctaccatagccttcttggccttctcttcggagttcttggcttcgttgagaagttcgtcaaggtctgagtggagggtttgcaattcggtttccaatttcctcttggcggcagacaaggaagcgttttgggctccaagatcgttcaattgttcgtgagcatctcccaattcttgttcagcttggcgacgagcacggtcggcttgttcgagaagagtgcgagattcttcaagttcattttgaagagcgttagcacgacgttctgaaattccaagttgttcacgggcttcatcgcgagctctttgttcttcttcaagggcggtttgggtgtccttaagttgttgttggtagcgtttgatggtcttttgggcttcagcgttggccttgttagcgtggtccaaagcgatttccaattcattgatatcagcttccaacttcttcttcatgcgaagggcctcagccttacctttggcttcagcttcaagggaggcttgcatggagtcgagggcacgttggtgattcttgcgggtgttttcgaattcttcttctttctcttggatacgtctgtcgatttcttgacggacttgagaaagttcaagttggctacgaagtactttgttttcttcttgttcaagagcagcttcagcttcttcaagagcagcttggagttcatctttttcagcttccaagcgcttgcgggccttttcgatttcgtggatgttgcggccaccttctccaatttggtcaaggagatccttaacttcatcagcgaggttcttgttttcacggcggacagcttcaagttgttcttgtccttcttcgtaggcgcccttaagtctgaacaattcggtggagtagtttctgcattctttctgactggcatcgagttcagcagccaagtcatcaaccttgagtttccattctccaatgattttgtcgaaggccttttgtttcttctcagcagcattggcaatggcgttagcacggtcgacttcgagttgcaagtcttcgacttcagtggccaaacgttgtttggtcttttcaagagctacaaccttctggttgagagattcgatggtttcttcagcctcagcaagacgagcttggagtttcctcttagcttcttcgagttcttcagagcgagcaactccttcagattcgtatttctggcgccagagttgagattcagcgttggctttgctgagttgtctttggatatcagccttggcttcggcttcttcttcaacttgttcacggatgttgtccaagtcgtgttccaagtttctgaatttgccgaggagggtagcgcgttctctgctctcttcatcggccaatctcttggtatcttccaattgagtggtaagggataccttgatcttgctgagttgagatacttgagattcggcttcctcgagttgtctgaggaggtcggagttttcaatagacaacttcttcttggcggcatcgaagtcgttaagagtgcggttggtttcgtcaagtttgccttggacgtcgttgagttgttgtcccaattgtttggataccttttctatagcggccttttcgttggctaagtggtcgactgaagcacggaggtcattgagttcaccgaagtattgagacttttctttctcagccttggctttgagtttgttgagttggtcaatttgttcacccatttcagaaacagcgtcgttgtgcttcttgcggaggttagcaagagttccttcatgttggatgttggattcttcgaggtcacgacggagtttggcgagttcggcttcacgtttcttgttgagttcgatttgggctgaggtagcaccaccggcttcttcaagacgttcgccgagttcttccaattcgcgggccaaatcagcgcgttgtttctcagctttagcacgggcttgacgttcagcttcaacttcctcttcgagttcctcaatgcgagcctggagttccttaacttgtttttgttgtttaccaacaacggattgttcgtcttcgagtttggcagtgagtgatgagatttccttgtctttgcgttggatggtttgttcgagttccttcttgttgcgttccaagtcagctacagcctcttgggtgagtttcaagtcgccttcaaccttacgtttagatttttctacgtcaccacggagtttcttttcgcgttccaaagagtcttcgagttcgtccaaggtttgttccaacttagccttaactttgttgaggtggttgaccttgtcctcggcggcctggagttcttcagaaaccttctggttgttttcaccagacattttcttttccttgttgagcttgttgatgagttcgtcttggtgggcgatctcatcgttcaagttcctgatttggtgatccttggtggctttgtcttgttcagacttttggaggttgagttccaaatcttcgatgtctttcttgaaaccggacatttcttgttcgagtttcttcttttgttgcatcaactggttgcgagcatcttcctcttggctcaaacgatcttgggtttcagaaagttgagactcgaggtcgttcttttgggcttggagtttgttggccctttcttgagtttcggaaagggatcccttttctccttccaagttagataacaactcggtcttctcagctaagagcttggcatagagagcttctaattccttcttggccttttcttcacgctcgaaggcttcttgggctttttgggctttctcttcaagtttggcaatctcatcctcgatacgggtgacgttgaggagaggtctgaccttctgccacaatttgtaccatggccatgtgcgcaatttgaggtatttgcgcaagttgcgttggcacacttggagggccaaacgttgttcttgcagtttcttgaattcctttcttgagagataaccacggacccaagattgcatccaggtgacgatcttgccaagacggtcgtcacgaagttcttccatctgacccaagacaccagcacggaagaagaccttcgttttacccaatcggtattgctcagcatcaagttgaacgttctccaatataatttgtgctgctttttcaggtgtcatagtatctttgatttgacttgcggccagaattttgtatcgaagtttgaagtcagggtagaccatcctgttggggaaacctttacggcaaatacggataccttcaagtacaccgttacatgtcagctggtgcattaccaagtgagagtcaatgacaccgggttgtttcaattcgttggggatgatacaacgtacgaagtgaggttgggtagatctcaaggtggtcatcaagttgttcaattgttccttgtatgcagaagatactgtggcaaaaccaccacccttcttaccacgacctttttcggcagcaccaccagattgacctggatggtcggcgaagatttcgacaacgagggcattggaacccttcttgtacaagtcaacaacggtgtcgttcaagggatccttgttcttttccaaccaaccggttatattgtatggtacattaccggcataatggcccaaggtgaagtgagcagcttgctgacctggttttggtggttttggtttttggaagttgggtgatttgcccaagtggttggtgttcaatttttcctcaaaggtcttgtcggtagctttggggaacatagattcttcttcaaggatggacaagatacccataggcttttcaataagttcaatacaagcagccaagtccattccaaaatcaatgaaggtccattggataccttcagttttgtattcttcttgttcgagaacgaacatgtgatggttaaagaattgttgcaatttttcgttggtaaagttaatacacagttgttcaaaaccgttgtagtcgaagatttcaaaaccagcaatatccagtacaccaatgaagtgctgtctcttttgtttggtgtccaaagtttcgttacactttttgaccaagaacttgaagaccctgtcaaacatggcctttgacatggcaccgacggagtaggatacttggttgacattacgaccttgggtgacgaattcgttaccgaccttaattcttggtttgacaagagcttggtagagagctggggcttcaacacccaagagtttactaacacgttcaccttcttcggtaccgtctggttcagcctgttcttcacgacctctttgtttgaacttcatgcaacccatgtgcattacagcggcggtgatcttgtatacgttgtccttttcttcttgtgtgaaaccaaggatatcgaaggcttcatctgtaagtctacattcctcagcatcatctacgccaggaattgtagtttttccttgggcgacgaagttgtactcgttgatattgttagacaacaaacacttttctttaactccaggtacagatccagacatgatctggtagaagatgtggtaagatctttccaatggctgttgggaaatgacacgggccttttctagcagataagtttcaatatcagcaccagcaagtttaccagttgggccgaagtggatacggatgaatttaccgaaacgggaagagttatcgttacgcacggtcttggcgttaccgaaggcttcaagtacagggttagtttgtacaacttgatcttccaagttacctttcttttggttgggatcagcatctttcttagttgaggcaccgacggtggcgaagtaggcaattaccttcttcgtgttttcagttttaccggcaccagattcaccagtaatcaacatagattgattttcgtgattggtcaacatgttgacgtaggcaccgtcagaaatggcgaaaatgtggggtggtacttcattacgcctcttaccacggtacaacttggcacaacggttggtatatacagggaaacgtttgtaggggttaatggcgacacagaacaaacctgagtatgtgtagataagcttatggtaataacgttgttttaaattgtgcaatactgaagcgtcgttgaggtatgtcaaatttgacatatcctcggccttttcgtactttggaggattgacctgagttacttggtccttcttgaagttcttttcctctcctccaggaagaccaacggtgacaagatcacccttggttcctttgatttcaccaagcaagaaaccctccttgtcgtccggtacccagcaagattttttggcatcatagggcttagtttggtcgatacgtttctgttcgagagatacgaacaagtatggggtgggatctgggtcatccccctcttgtttttgtggtttaggcatggtgtacggacttagtcggggctatcgagacacgtaatgcagccctagagccttcgttcgaaagg

SEQ ID NO: 1356 - DNA, 6283 bp, Diabrotica virgifera
  SmartBlast Evalue=0; Info=Muscle myosin heavy chain n=1 Tax= Papilio xuthus RepID=B2DBI1_9NEOP
aacaatataacttttatgtttattggtgccttatatcatacaacattatcatacatacaatatcattatacaacctacatattttcataacaaaataattggcattttgagaaatgaagagatcaaagggctgtcttggtggtaaatacgtgtctctgaatactcccttcgttctcctttttctcgaacatttacggaatcatacaactctaatattcaaaaacgaaaataaaaaattaataaaagtaaaatcgcatagagttggttttgatgcgacctaaacagttcgtttgtttattaagattctaacacagcgcgcatgttcactcgaaatcaggtgctaagtcgaaccttggggggaatggaccacctagagcgtctcccattcccaaggtggggcgctgtctttggggcgctggactggctcctctagctgcagatcctgaacgtcccttggcacggaatttggcgatggcctgttcggcgaggtcggctctttcttcggcttcttcgagctcttgttgggctttacggaatttggccaagttcaaagcggcgatttcttcggcttcttctatctgtctcttgtaggtcttgatcttttgttggagtttgtcgacgaggtcttgcatcctctcgtggttcttgcggtcttcttcagcttggaagctaagttccttgatacgacgttcagactttctcaagttcttttgggcatccgcgtgccgcctttgttcaccgtctaattcattttctaattctctaacacgttgttccaatttggcaatagccttctttcctcctttaagggcattggcttcagcttcgtccaagcgtacttggaggtccttgatttgagcttcgagagctttacggagtttctcttgtgtttgggcatggtcttgttcagcgcggagttcatcagcgagacgagcggcatctaccatagccttcttggccttctcttcggagttcttggcttcgttgagaagttcgtcaaggtctgagtggagggtttgcaattcggtttccaatttcctcttggcggcagacaaggaagcgttttgggctccaagatcgttcaattgttcgtgagcatctcccaattcttgttcagcttggcgacgagcacggtcggcttgttcgagaagagtgcgagattcttcaagttcattttgaagagcgttagcacgacgttctgaaattccaagttgttcacgggcttcatcgcgagctctttgttcttcttcaagggcggtttgggtgtccttaagttgttgttggtagcgtttgatggtcttttgggcttcagcgttggccttgttagcgtggtccaaagcgatttccaattcattgatatcagcttccaacttcttcttcatgcgaagggcctcagccttacctttggcttcagcttcaagggaggcttgcatggagtcgagggcacgttggtgattcttgcgggtgttttcgaattcttcttctttctcttggatacgtctgtcgatttcttgacggacttgagaaagttcaagttggctacgaagtactttgttttcttcttgttcaagagcagcttcagcttcttcaagagcagcttggagttcatctttttcagcttccaagcgcttgcgggccttttcgatttcgtggatgttgcggccaccttctccaatttggtcaaggagatccttaacttcatcagcgaggttcttgttttcacggcggacagcttcaagttgttcttgtccttcttcgtaggcgcccttaagtctgaacaattcggtggagtagtttctgcattctttctgactggcatcgagttcagcagccaagtcatcaaccttgagtttccattctccaatgattttgtcgaaggccttttgtttcttctcagcagcattggcaatggcgttagcacggtcgacttcgagttgcaagtcttcgacttcagtggccaaacgttgtttggtcttttcaagagctacaaccttctggttgagagattcgatggtttcttcagcctcagcaagacgagcttggagtttcctcttagcttcttcgagttcttcagagcgagcaactccttcagattcgtatttctggcgccagagttgagattcagcgttggctttgctgagttgtctttggatatcagccttggcttcggcttcttcttcaacttgttcacggatgttgtccaagtcgtgttccaagtttctgaatttgccgaggagggtagcgcgttctctgctctcttcatcggccaatctcttggtatcttccaattgagtggtaagggataccttgatcttgctgagttgagatacttgagattcggcttcctcgagttgtctgaggaggtcggagttttcaatagacaacttcttcttggcggcatcgaagtcgttaagagtgcggttggtttcgtcaagtttgccttggacgtcgttgagttgttgtcccaattgtttggataccttttctatagcggccttttcgttggctaagtggtcgactgaagcacggaggtcattgagttcaccgaagtattgagacttttctttctcagccttggctttgagtttgttgagttggtcaatttgttcacccatttcagaaacagcgtcgttgtgcttcttgcggaggttagcaagagttccttcatgttggatgttggattcttcgaggtcacgacggagtttggcgagttcggcttcacgtttcttgttgagttcgatttgggctgaggtagcaccaccggcttcttcaagacgttcgccgagttcttccaattcgcgggccaaatcagcgcgttgtttctcagctttagcacgggcttgacgttcagcttcaacttcctcttcgagttcctcaatgcgagcctggagttccttaacttgtttttgttgtttaccaacaacggattgttcgtcttcgagtttggcagtgagtgatgagatttccttgtctttgcgttggatggtttgttcgagttccttcttgttgcgttccaagtcagctacagcctcttgggtgagtttcaagtcgccttcaaccttacgtttagatttttctacgtcaccacggagtttcttttcgcgttccaaagagtcttcgagttcgtccaaggtttgttccaacttagccttaactttgttgaggtggttgaccttgtcctcggcggcctggagttcttcagaaaccttctggttgttttcaccagacattttcttttccttgttgagcttgttgatgagttcgtcttggtgggcgatctcatcgttcaagttcctgatttggtgatccttggtggctttgtcttgttcagacttttggaggttgagttccaaatcttcgatgtctttcttgaaaccggacatttcttgttcgagtttcttcttttgttgcatcaactggttgcgagcatcttcctcttggctcaaacgatcttgggtttcagaaagttgagactcgaggtcgttcttttgggcttggagtttgttggccctttcttgagtttcggaaagggatcccttttctccttccaagttagataacaactcggtcttctcagctaagagcttggcatagagagcttctaattccttcttggccttttcttcacgctcgaaggcttcttgggctttttgggctttctcttcaagtttggcaatctcatcctcgatacgggtgacgttgaggagaggtctgaccttctgccacaatttgtaccatggccatgtgcgcaatttgaggtatttgcgcaagttgcgttggcacacttggagggccaaacgttgttcttgcagtttcttgaattcctttcttgagagataaccacggacccaagattgcatccaggtgacgatcttgccaagacggtcgtcacgaagttcttccatctgacccaagacaccagcacggaagaagaccttagtgtgacctagacggtataattcagcatccaaaccggaagcatcaagaatgtgttctgcgcatttctttggatcagattctttggaaactgcggctgggttgaggattttgtaacgaagtttgaagtcagggtagaccatcctgttggggaaacctttacggcaaatacggataccttcaagtacaccgttacatgtcagctggtgcattaccaagtgagagtcaatgacaccgggttgtttcaattcgttggggatgatacaacgtacgaagtgaggttgggtagatctcaaggtggtcatcaagttgttcaattgttccttgtatgcagaagatactgtggcaaaaccaccacccttcttaccacgacctttttcggcagcaccaccagattgacctggatggtcggcgaagatttcgacaacgagggcattggaacccttcttgtacaagtcaacaacggtgtcgttcaagggatccttgttcttttccaaccaaccggttatattgtatggtacattaccggcataatggcccaaggtgaagtgagcagcttgctgacctggttttggtggttttggtttttggaagttgggtgatttgcccaagtggttggtgttcaatttttcctcaaaggtcttgtcggtagctttggggaacatagattcttcttcaaggatggacaagatacccataggcttttcaataagttcaatacaagcagccaagtccattccaaaatcaatgaaggtccattggataccttcagttttgtattcttcttgttcgagaacgaacatgtgatggttaaagaattgttgcaatttttcgttggtaaagttaatacacagttgttcaaaaccgttgtagtcgaagatttcaaaaccagcaatatccagtacaccaatgaagtgctgtctcttttgtttggtgtccaaagtttcgttacactttttgaccaagaacttgaagaccctgtcaaacatggcctttgacatggcaccgacggagtaggatacttggttgacattacgaccttgggtgacgaattcgttaccgaccttaattcttggtttgacaagagcttggtagagagctggggcttcaacacccaagagtttactaacacgttcaccttcttcggtaccgtctggttcagcctgttcttcacgacctctttgtttgaacttcatgcaacccatgtgcattacagcggcggtgatcttgtatacgttgtccttttcttcttgtgtgaaaccaaggatatcgaaggcttcatctgtaagtctacattcctcagcatcatctacgccaggaattgtagtttttccttgggcgacgaagttgtactcgttgatattgttagacaacaaacacttttctttaactccaggtacagatccagacatgatctggtagaagatgtggtaagatctttccaatggctgttgggaaatgacacgggccttttctagcagataagtttcaatatcagcaccagcaagtttaccagttgggccgaagtggatacggatgaatttaccgaaacgggaagagttatcgttacgcacggtcttggcgttaccgaaggcttcaagtacagggttagtttgtacaacttgatcttccaagttacctttcttttggttgggatcagcatctttcttagttgaggcaccgacggtggcgaagtaggcaattaccttcttcgtgttttcagttttaccggcaccagattcaccagtaatcaacatagattgattttcgtgattggtcaacatgttgacgtaggcaccgtcagaaatggcgaaaatgtggggtggtacttcattacgcctcttaccacggtacaacttggcacaacggttggtatatacagggaaacgtttgtaggggttaatggcgacacagaacaaacctgagtatgtgtagattagcttagcgtagtagcgttgtttcaaattatgtaagacagatgcgtcgtttaggtaggttaaatctgccatatcttcgactttttcgtatttgggaggattcacttggtgaacgttgtcttttttgaattgcttttcctctcctccaggaagaccaacggtgacaagatcacccttggttcctttgatttcaccaagcaagaaaccctccttgtcgtccggtacccagcaagattttttggcatcatagggcttagtttggtcgatacgtttctgttcgagagatacgaacaagtatggggtgggatctgggtcatccccctcttgtttttgtggtttaggcatggtgtacggacttagtcggggctatcgagacacgtaatgcagccctagagccttcgttcgaaagg

SEQ ID NO: 1357 - DNA, 6286 bp, Diabrotica virgifera
  SmartBlast Evalue=0; Info=Muscle myosin heavy chain n=1 Tax= Papilio xuthus RepID=B2DBI1_9NEOP
aacaatataacttttatgtttattggtgccttatatcatacaacattatcatacatacaatatcattatacaacctacatattttcataacaaaataattggcattttgagaaatgaagagatcaaagggctgtcttggtggtaaatacgtgtctctgaatactcccttcgttctcctttttctcgaacatttacggaatcatacaactctaatattcaaaaacgaaaataaaaaattaataaaagtaaaatcgcatagagttggttttgatgcgacctaaacagttcgtttgtttattaagattctaacacagcgcgcatgttcactcgaaatcaggtgctaagtcgaaccttggggggaatggaccacctagagcgtctcccattcccaaggtggggcgctgtctttggggcgctggactggctcctctagctgcagatcctgaacgtcccttggcacggaatttggcgatggcctgttcggcgaggtcggctctttcttcggcttcttcgagctcttgttgggctttacggaatttggccaagttcaaagcggcgatttcttcggcttcttctatctgtctcttgtaggtcttgatcttttgttggagtttgtcgacgaggtcttgcatcctctcgtggttcttgcggtcttcttcagcttggaagctaagttccttgatacgacgttcagactttctcaagttcttttgggcatccgcgtgccgcctttgttcaccgtctaattcattttctaattctctaacacgttgttccaatttggcaatagccttctttcctcctttaagggcattggcttcagcttcgtccaagcgtacttggaggtccttgatttgagcttcgagagctttacggagtttctcttgtgtttgggcatggtcttgttcagcgcggagttcatcagcgagacgagcggcatctaccatagccttcttggccttctcttcggagttcttggcttcgttgagaagttcgtcaaggtctgagtggagggtttgcaattcggtttccaatttcctcttggcggcagacaaggaagcgttttgggctccaagatcgttcaattgttcgtgagcatctcccaattcttgttcagcttggcgacgagcacggtcggcttgttcgagaagagtgcgagattcttcaagttcattttgaagagcgttagcacgacgttctgaaattccaagttgttcacgggcttcatcgcgagctctttgttcttcttcaagggcggtttgggtgtccttaagttgttgttggtagcgtttgatggtcttttgggcttcagcgttggccttgttagcgtggtccaaagcgatttccaattcattgatatcagcttccaacttcttcttcatgcgaagggcctcagccttacctttggcttcagcttcaagggaggcttgcatggagtcgagggcacgttggtgattcttgcgggtgttttcgaattcttcttctttctcttggatacgtctgtcgatttcttgacggacttgagaaagttcaagttggctacgaagtactttgttttcttcttgttcaagagcagcttcagcttcttcaagagcagcttggagttcatctttttcagcttccaagcgcttgcgggccttttcgatttcgtggatgttgcggccaccttctccaatttggtcaaggagatccttaacttcatcagcgaggttcttgttttcacggcggacagcttcaagttgttcttgtccttcttcgtaggcgcccttaagtctgaacaattcggtggagtagtttctgcattctttctgactggcatcgagttcagcagccaagtcatcaaccttgagtttccattctccaatgattttgtcgaaggccttttgtttcttctcagcagcattggcaatggcgttagcacggtcgacttcgagttgcaagtcttcgacttcagtggccaaacgttgtttggtcttttcaagagctacaaccttctggttgagagattcgatggtttcttcagcctcagcaagacgagcttggagtttcctcttagcttcttcgagttcttcagagcgagcaactccttcagattcgtatttctggcgccagagttgagattcagcgttggctttgctgagttgtctttggatatcagccttggcttcggcttcttcttcaacttgttcacggatgttgtccaagtcgtgttccaagtttctgaatttgccgaggagggtagcgcgttctctgctctcttcatcggccaatctcttggtatcttccaattgagtggtaagggataccttgatcttgctgagttgagatacttgagattcggcttcctcgagttgtctgaggaggtcggagttttcaatagacaacttcttcttggcggcatcgaagtcgttaagagtgcggttggtttcgtcaagtttgccttggacgtcgttgagttgttgtcccaattgtttggataccttttctatagcggccttttcgttggctaagtggtcgactgaagcacggaggtcattgagttcaccgaagtattgagacttttctttctcagccttggctttgagtttgttgagttggtcaatttgttcacccatttcagaaacagcgtcgttgtgcttcttgcggaggttagcaagagttccttcatgttggatgttggattcttcgaggtcacgacggagtttggcgagttcggcttcacgtttcttgttgagttcgatttgggctgaggtagcaccaccggcttcttcaagacgttcgccgagttcttccaattcgcgggccaaatcagcgcgttgtttctcagctttagcacgggcttgacgttcagcttcaacttcctcttcgagttcctcaatgcgagcctggagttccttaacttgtttttgttgtttaccaacaacggattgttcgtcttcgagtttggcagtgagtgatgagatttccttgtctttgcgttggatggtttgttcgagttccttcttgttgcgttccaagtcagctacagcctcttgggtgagtttcaagtcgccttcaaccttacgtttagatttttctacgtcaccacggagtttcttttcgcgttccaaagagtcttcgagttcgtccaaggtttgttccaacttagccttaactttgttgaggtggttgaccttgtcctcggcggcctggagttcttcagaaaccttctggttgttttcaccagacattttcttttccttgttgagcttgttgatgagttcgtcttggtgggcgatctcatcgttcaagttcctgatttggtgatccttggtggctttgtcttgttcagacttttggaggttgagttccaaatcttcgatgtctttcttgaaaccggacatttcttgttcgagtttcttcttttgttgcatcaactggttgcgagcatcttcctcttggctcaaacgatcttgggtttcagaaagttgagactcgaggtcgttcttttgggcttggagtttgttggccctttcttgagtttcggaaagggatcccttttctccttccaagttagataacaactcggtcttctcagctaagagcttggcatagagagcttctaattccttcttggccttttcttcacgctcgaaggcttcttgggctttttgggctttctcttcaagtttggcaatctcatcctcgatacgggtgacgttgaggagaggtctgaccttctgccacaatttgtaccatggccatgtgcgcaatttgaggtatttgcgcaagttgcgttggcacacttggagggccaaacgttgttcttgcagtttcttgaattcctttcttgagagataaccacggacccaagattgcatccaggtgacgatcttgccaagacggtcgtcacgaagttcttccatctgacccaagacaccagcacggaagaagaccttagtgtgacctagacggtataattcagcatccaaaccggaagcatcaagaatgtgttctgcgcatttctttggatcagattctttggaaactgcggctgggttgaggattttgtaacgaagtttgaagtcagggtagaccatcctgttggggaaacctttacggcaaatacggataccttcaagtacaccgttacatgtcagctggtgcattaccaagtgagagtcaatgacaccgggttgtttcaattcgttggggatgatacaacgtacgaagtgaggttgggtagatctcaaggtggtcatcaagttgttcaattgttccctgtataaactggaaacggtttggaaagcggaacccttggttctcttaccacctttttcggcagcaccaccagattgacctggatggtcggcgaagatttcgacaacgagggcattggaacccttcttgtacaagtcaacaacggtgtcgttcaagggatccttgttcttttccaaccaaccggttatattgtatggtacattaccggcataatggcccaaggtgaagtgagcagcttgctgacctggttttggtggttttggtttttggaagttgggtgatttgcccaagtggttggtgttcaatttttcctcaaaggtcttgtcggtagctttggggaacatagattcttcttcaaggatggacaagatacccataggcttttcgataagttcgatacaggcagctaagtccataccgaaatcaataaaagcccattcaataccctctctttggtattcttcttgttcaagtacaaacatgtggtggttaaagaactgttgcaacttttcattggtaaagttgatacaaagctgctcaaagccgttgaagtcgaagatttcaaaaccagcaatatccagtacaccaatgaagtgctgtctcttttgtttggtgtccaaagtttcgttacactttttgaccaagaacttgaagaccctgtcaaacatggcctttgacatggcaccgacggagtaggatacttggttgacattacgaccttgggtgacgaattcgttaccgaccttaattcttggtttgacaagagcttggtagagagctggggcttcaacacccaagagtttactaacacgttcaccttcttcggtaccgtctggttcagcctgttcttcacgacctctttgtttgaacttcatgcaacccatgtgcattacagcggcggtgatcttgtatacgttgtccttttcttcttgtgtgaaaccaaggatatcgaaggcttcatctgtaagtctacattcctcagcatcatctacgccaggaattgtagtttttccttgggcgacgaagttgtactcgttgatattgttagacaacaaacacttttctttaactccaggtacagatccagacatgatctggtagaagatgtggtaagatctttccaatggctgttgggaaatgacacgggccttttctagcagataagtttcaatatcagcaccagcaagtttaccagttgggccgaagtggatacggatgaatttaccgaaacgggaagagttatcgttacgcacggtcttggcgttaccgaaggcttcaagtacagggttagtttgtacaacttgatcttccaagttacctttcttttggttgggatcagcatctttcttagttgaggcaccgacggtggcgaagtaggcaattaccttcttcgtgttttcagttttaccggcaccagattcaccagtaatcaacatagattgattttcgtgattggtcaacatgttgacgtaggcaccgtcagaaatggcgaaaatgtggggtggtacttcattacgcctcttaccacggtacaacttggcacaacggttggtatatacagggaaacgtttgtaggggttaatggcgacacagaacaaacctgagtatgtgtagataagcttatggtaataacgttgttttaaattgtgcaatactgaagcgtcgttgaggtatgtcaaatttgacatatcctcggccttttcgtactttggaggattgacctgagttacttggtccttcttgaagttcttttcctctcctccaggaagaccaacggtgacaagatcacccttggttcctttgatttcaccaagcaagaaaccctccttgtcgtccggtacccagcaagattttttggcatcatagggcttagtttggtcgatacgtttctgttcgagagatacgaacaagtatggggtgggatctgggtcatccccctcttgtttttgtggtttaggcatggtgtacggacttagtcggggctatcgagacacgtaatgcagccctagagccttcgttcgaaagg

SEQ ID NO: 1358 - DNA, 6283 bp, Diabrotica virgifera
  SmartBlast Evalue=0; Info=Muscle myosin heavy chain n=1 Tax= Papilio xuthus RepID=B2DBI1_9NEOP
aacaatataacttttatgtttattggtgccttatatcatacaacattatcatacatacaatatcattatacaacctacatattttcataacaaaataattggcattttgagaaatgaagagatcaaagggctgtcttggtggtaaatacgtgtctctgaatactcccttcgttctcctttttctcgaacatttacggaatcatacaactctaatattcaaaaacgaaaataaaaaattaataaaagtaaaatcgcatagagttggttttgatgcgacctaaacagttcgtttgtttattaagattctaacacagcgcgcatgttcactcgaaatcaggtgctaagtcgaaccttggggggaatggaccacctagagcgtctcccattcccaaggtggggcgctgtctttggggcgctggactggctcctctagctgcagatcctgaacgtcccttggcacggaatttggcgatggcctgttcggcgaggtcggctctttcttcggcttcttcgagctcttgttgggctttacggaatttggccaagttcaaagcggcgatttcttcggcttcttctatctgtctcttgtaggtcttgatcttttgttggagtttgtcgacgaggtcttgcatcctctcgtggttcttgcggtcttcttcagcttggaagctaagttccttgatacgacgttcagactttctcaagttcttttgggcatccgcgtgccgcctttgttcaccgtctaattcattttctaattctctaacacgttgttccaatttggcaatagccttctttcctcctttaagggcattggcttcagcttcgtccaagcgtacttggaggtccttgatttgagcttcgagagctttacggagtttctcttgtgtttgggcatggtcttgttcagcgcggagttcatcagcgagacgagcggcatctaccatagccttcttggccttctcttcggagttcttggcttcgttgagaagttcgtcaaggtctgagtggagggtttgcaattcggtttccaatttcctcttggcggcagacaaggaagcgttttgggctccaagatcgttcaattgttcgtgagcatctcccaattcttgttcagcttggcgacgagcacggtcggcttgttcgagaagagtgcgagattcttcaagttcattttgaagagcgttagcacgacgttctgaaattccaagttgttcacgggcttcatcgcgagctctttgttcttcttcaagggcggtttgggtgtccttaagttgttgttggtagcgtttgatggtcttttgggcttcagcgttggccttgttagcgtggtccaaagcgatttccaattcattgatatcagcttccaacttcttcttcatgcgaagggcctcagccttacctttggcttcagcttcaagggaggcttgcatggagtcgagggcacgttggtgattcttgcgggtgttttcgaattcttcttctttctcttggatacgtctgtcgatttcttgacggacttgagaaagttcaagttggctacgaagtactttgttttcttcttgttcaagagcagcttcagcttcttcaagagcagcttggagttcatctttttcagcttccaagcgcttgcgggccttttcgatttcgtggatgttgcggccaccttctccaatttggtcaaggagatccttaacttcatcagcgaggttcttgttttcacggcggacagcttcaagttgttcttgtccttcttcgtaggcgcccttaagtctgaacaattcggtggagtagtttctgcattctttctgactggcatcgagttcagcagccaagtcatcaaccttgagtttccattctccaatgattttgtcgaaggccttttgtttcttctcagcagcattggcaatggcgttagcacggtcgacttcgagttgcaagtcttcgacttcagtggccaaacgttgtttggtcttttcaagagctacaaccttctggttgagagattcgatggtttcttcagcctcagcaagacgagcttggagtttcctcttagcttcttcgagttcttcagagcgagcaactccttcagattcgtatttctggcgccagagttgagattcagcgttggctttgctgagttgtctttggatatcagccttggcttcggcttcttcttcaacttgttcacggatgttgtccaagtcgtgttccaagtttctgaatttgccgaggagggtagcgcgttctctgctctcttcatcggccaatctcttggtatcttccaattgagtggtaagggataccttgatcttgctgagttgagatacttgagattcggcttcctcgagttgtctgaggaggtcggagttttcaatagacaacttcttcttggcggcatcgaagtcgttaagagtgcggttggtttcgtcaagtttgccttggacgtcgttgagttgttgtcccaattgtttggataccttttctatagcggccttttcgttggctaagtggtcgactgaagcacggaggtcattgagttcaccgaagtattgagacttttctttctcagccttggctttgagtttgttgagttggtcaatttgttcacccatttcagaaacagcgtcgttgtgcttcttgcggaggttagcaagagttccttcatgttggatgttggattcttcgaggtcacgacggagtttggcgagttcggcttcacgtttcttgttgagttcgatttgggctgaggtagcaccaccggcttcttcaagacgttcgccgagttcttccaattcgcgggccaaatcagcgcgttgtttctcagctttagcacgggcttgacgttcagcttcaacttcctcttcgagttcctcaatgcgagcctggagttccttaacttgtttttgttgtttaccaacaacggattgttcgtcttcgagtttggcagtgagtgatgagatttccttgtctttgcgttggatggtttgttcgagttccttcttgttgcgttccaagtcagctacagcctcttgggtgagtttcaagtcgccttcaaccttacgtttagatttttctacgtcaccacggagtttcttttcgcgttccaaagagtcttcgagttcgtccaaggtttgttccaacttagccttaactttgttgaggtggttgaccttgtcctcggcggcctggagttcttcagaaaccttctggttgttttcaccagacattttcttttccttgttgagcttgttgatgagttcgtcttggtgggcgatctcatcgttcaagttcctgatttggtgatccttggtggctttgtcttgttcagacttttggaggttgagttccaaatcttcgatgtctttcttgaaaccggacatttcttgttcgagtttcttcttttgttgcatcaactggttgcgagcatcttcctcttggctcaaacgatcttgggtttcagaaagttgagactcgaggtcgttcttttgggcttggagtttgttggccctttcttgagtttcggaaagggatcccttttctccttccaagttagataacaactcggtcttctcagctaagagcttggcatagagagcttctaattccttcttggccttttcttcacgctcgaaggcttcttgggctttttgggctttctcttcaagtttggcaatctcatcctcgatacgggtgacgttgaggagaggtctgaccttctgccacaatttgtaccatggccatgtgcgcaatttgaggtatttgcgcaagttgcgttggcacacttggagggccaaacgttgttcttgcagtttcttgaattcctttcttgagagataaccacggacccaagattgcatccaggtgacgatcttgccaagacggtcgtcacgaagttcttccatctgacccaagacaccagcacggaagaagaccttcgttttacccaatcggtattgctcagcatcaagttgaacgttctccaatataatttgtgctgctttttcaggtgtcatagtatctttgatttgacttgcggccagaattttgtatcgaagtttgaagtcagggtagaccatcctgttggggaaacctttacggcaaatacggataccttcaagtacaccgttacatgtcagctggtgcattaccaagtgagagtcaatgacaccgggttgtttcaattcgttggggatgatacaacgtacgaagtgaggttgggtagatctcaaggtggtcatcaagttgttcaattgttccttgtatgcagaagatactgtggcaaaaccaccacccttcttaccacgacctttttcggcagcaccaccagattgacctggatggtcggcgaagatttcgacaacgagggcattggaacccttcttgtacaagtcaacaacggtgtcgttcaagggatccttgttcttttccaaccaaccggttatattgtatggtacattaccggcataatggcccaaggtgaagtgagcagcttgctgacctggttttggtggttttggtttttggaagttgggtgatttgcccaagtggttggtgttcaatttttcctcaaaggtcttgtcggtagctttggggaacatagattcttcttcaaggatggacaagatacccataggcttttcgataagttcgatacaggcagctaagtccataccgaaatcaataaaagcccattcaataccctctctttggtattcttcttgttcaagtacaaacatgtggtggttaaagaactgttgcaacttttcattggtaaagttgatacaaagctgctcaaagccgttgaagtcgaagatttcaaaaccagcaatatccagtacaccaatgaagtgctgtctcttttgtttggtgtccaaagtttcgttacactttttgaccaagaacttgaagaccctgtcaaacatggcctttgacatggcaccgacggagtaggatacttggttgacattacgaccttgggtgacgaattcgttaccgaccttaattcttggtttgacaagagcttggtagagagctggggcttcaacacccaagagtttactaacacgttcaccttcttcggtaccgtctggttcagcctgttcttcacgacctctttgtttgaacttcatgcaacccatgtgcattacagcggcggtgatcttgtatacgttgtccttttcttcttgtgtgaaaccaaggatatcgaaggcttcatctgtaagtctacattcctcagcatcatctacgccaggaattgtagtttttccttgggcgacgaagttgtactcgttgatattgttagacaacaaacacttttctttaactccaggtacagatccagacatgatctggtagaagatgtggtaagatctttccaatggctgttgggaaatgacacgggccttttctagcagataagtttcaatatcagcaccagcaagtttaccagttgggccgaagtggatacggatgaatttaccgaaacgggaagagttatcgttacgcacggtcttggcgttaccgaaggcttcaagtacagggttagtttgtacaacttgatcttccaagttacctttcttttggttgggatcagcatctttcttagttgaggcaccgacggtggcgaagtaggcaattaccttcttcgtgttttcagttttaccggcaccagattcaccagtaatcaacatagattgattttcgtgattggtcaacatgttgacgtaggcaccgtcagaaatggcgaaaatgtggggtggtacttcattacgcctcttaccacggtacaacttggcacaacggttggtatatacagggaaacgtttgtaggggttaatggcgacacagaacaaacctgagtatgtgtagataagcttatggtaataacgttgttttaaattgtgcaatactgaagcgtcgttgaggtatgtcaaatttgacatatcctcggccttttcgtactttggaggattgacctgagttacttggtccttcttgaagttcttttcctctcctccaggaagaccaacggtgacaagatcacccttggttcctttgatttcaccaagcaagaaaccctccttgtcgtccggtacccagcaagattttttggcatcatagggcttagtttggtcgatacgtttctgttcgagagatacgaacaagtatggggtgggatctgggtcatccccctcttgtttttgtggtttaggcatggtgtacggacttagtcggggctatcgagacacgtaatgcagccctagagccttcgttcgaaagg

SEQ ID NO: 1359 - DNA, 6283 bp, Diabrotica virgifera
  SmartBlast Evalue=0; Info=Muscle myosin heavy chain n=1 Tax= Papilio xuthus RepID=B2DBI1_9NEOP
aacaatataacttttatgtttattggtgccttatatcatacaacattatcatacatacaatatcattatacaacctacatattttcataacaaaataattggcattttgagaaatgaagagatcaaagggctgtcttggtggtaaatacgtgtctctgaatactcccttcgttctcctttttctcgaacatttacggaatcatacaactctaatattcaaaaacgaaaataaaaaattaataaaagtaaaatcgcatagagttggttttgatgcgacctaaacagttcgtttgtttattaagattctaacacagcgcgcatgttcactcgaaatcaggtgctaagtcgaaccttggggggaatggaccacctagagcgtctcccattcccaaggtggggcgctgtctttggggcgctggactggctcctctagctgcagatcctgaacgtcccttggcacggaatttggcgatggcctgttcggcgaggtcggctctttcttcggcttcttcgagctcttgttgggctttacggaatttggccaagttcaaagcggcgatttcttcggcttcttctatctgtctcttgtaggtcttgatcttttgttggagtttgtcgacgaggtcttgcatcctctcgtggttcttgcggtcttcttcagcttggaagctaagttccttgatacgacgttcagactttctcaagttcttttgggcatccgcgtgccgcctttgttcaccgtctaattcattttctaattctctaacacgttgttccaatttggcaatagccttctttcctcctttaagggcattggcttcagcttcgtccaagcgtacttggaggtccttgatttgagcttcgagagctttacggagtttctcttgtgtttgggcatggtcttgttcagcgcggagttcatcagcgagacgagcggcatctaccatagccttcttggccttctcttcggagttcttggcttcgttgagaagttcgtcaaggtctgagtggagggtttgcaattcggtttccaatttcctcttggcggcagacaaggaagcgttttgggctccaagatcgttcaattgttcgtgagcatctcccaattcttgttcagcttggcgacgagcacggtcggcttgttcgagaagagtgcgagattcttcaagttcattttgaagagcgttagcacgacgttctgaaattccaagttgttcacgggcttcatcgcgagctctttgttcttcttcaagggcggtttgggtgtccttaagttgttgttggtagcgtttgatggtcttttgggcttcagcgttggccttgttagcgtggtccaaagcgatttccaattcattgatatcagcttccaacttcttcttcatgcgaagggcctcagccttacctttggcttcagcttcaagggaggcttgcatggagtcgagggcacgttggtgattcttgcgggtgttttcgaattcttcttctttctcttggatacgtctgtcgatttcttgacggacttgagaaagttcaagttggctacgaagtactttgttttcttcttgttcaagagcagcttcagcttcttcaagagcagcttggagttcatctttttcagcttccaagcgcttgcgggccttttcgatttcgtggatgttgcggccaccttctccaatttggtcaaggagatccttaacttcatcagcgaggttcttgttttcacggcggacagcttcaagttgttcttgtccttcttcgtaggcgcccttaagtctgaacaattcggtggagtagtttctgcattctttctgactggcatcgagttcagcagccaagtcatcaaccttgagtttccattctccaatgattttgtcgaaggccttttgtttcttctcagcagcattggcaatggcgttagcacggtcgacttcgagttgcaagtcttcgacttcagtggccaaacgttgtttggtcttttcaagagctacaaccttctggttgagagattcgatggtttcttcagcctcagcaagacgagcttggagtttcctcttagcttcttcgagttcttcagagcgagcaactccttcagattcgtatttctggcgccagagttgagattcagcgttggctttgctgagttgtctttggatatcagccttggcttcggcttcttcttcaacttgttcacggatgttgtccaagtcgtgttccaagtttctgaatttgccgaggagggtagcgcgttctctgctctcttcatcggccaatctcttggtatcttccaattgagtggtaagggataccttgatcttgctgagttgagatacttgagattcggcttcctcgagttgtctgaggaggtcggagttttcaatagacaacttcttcttggcggcatcgaagtcgttaagagtgcggttggtttcgtcaagtttgccttggacgtcgttgagttgttgtcccaattgtttggataccttttctatagcggccttttcgttggctaagtggtcgactgaagcacggaggtcattgagttcaccgaagtattgagacttttctttctcagccttggctttgagtttgttgagttggtcaatttgttcacccatttcagaaacagcgtcgttgtgcttcttgcggaggttagcaagagttccttcatgttggatgttggattcttcgaggtcacgacggagtttggcgagttcggcttcacgtttcttgttgagttcgatttgggctgaggtagcaccaccggcttcttcaagacgttcgccgagttcttccaattcgcgggccaaatcagcgcgttgtttctcagctttagcacgggcttgacgttcagcttcaacttcctcttcgagttcctcaatgcgagcctggagttccttaacttgtttttgttgtttaccaacaacggattgttcgtcttcgagtttggcagtgagtgatgagatttccttgtctttgcgttggatggtttgttcgagttccttcttgttgcgttccaagtcagctacagcctcttgggtgagtttcaagtcgccttcaaccttacgtttagatttttctacgtcaccacggagtttcttttcgcgttccaaagagtcttcgagttcgtccaaggtttgttccaacttagccttaactttgttgaggtggttgaccttgtcctcggcggcctggagttcttcagaaaccttctggttgttttcaccagacattttcttttccttgttgagcttgttgatgagttcgtcttggtgggcgatctcatcgttcaagttcctgatttggtgatccttggtggctttgtcttgttcagacttttggaggttgagttccaaatcttcgatgtctttcttgaaaccggacatttcttgttcgagtttcttcttttgttgcatcaactggttgcgagcatcttcctcttggctcaaacgatcttgggtttcagaaagttgagactcgaggtcgttcttttgggcttggagtttgttggccctttcttgagtttcggaaagggatcccttttctccttccaagttagataacaactcggtcttctcagctaagagcttggcatagagagcttctaattccttcttggccttttcttcacgctcgaaggcttcttgggctttttgggctttctcttcaagtttggcaatctcatcctcgatacgggtgacgttgaggagaggtctgaccttctgccacaatttgtaccatggccatgtgcgcaatttgaggtatttgcgcaagttgcgttggcacacttggagggccaaacgttgttcttgcagtttcttgaattcctttcttgagagataaccacggacccaagattgcatccaggtgacgatcttgccaagacggtcgtcacgaagttcttccatctgacccaagacaccagcacggaagaagaccttagtgtgacctagacggtataattcagcatccaaaccggaagcatcaagaatgtgttctgcgcatttctttggatcagattctttggaaactgcggctgggttgaggattttgtaacgaagtttgaagtcagggtagaccatcctgttggggaaacctttacggcaaatacggataccttcaagtacaccgttacatgtcagctggtgcattaccaagtgagagtcaatgacaccgggttgtttcaattcgttggggatgatacaacgtacgaagtgaggttgggtagatctcaaggtggtcatcaagttgttcaattgttccttgtatgcagaagatactgtggcaaaaccaccacccttcttaccacgacctttttcggcagcaccaccagattgacctggatggtcggcgaagatttcgacaacgagggcattggaacccttcttgtacaagtcaacaacggtgtcgttcaagggatccttgttcttttccaaccaaccggttatattgtatggtacattaccggcataatggcccaaggtgaagtgagcagcttgctgacctggttttggtggttttggtttttggaagttgggtgatttgcccaagtggttggtgttcaatttttcctcaaaggtcttgtcggtagctttggggaacatagattcttcttcaaggatggacaagatacccataggcttttcgataagttcgatacaggcagctaagtccataccgaaatcaataaaagcccattcaataccctctctttggtattcttcttgttcaagtacaaacatgtggtggttaaagaactgttgcaacttttcattggtaaagttgatacaaagctgctcaaagccgttgaagtcgaagatttcaaaaccagcaatatccagtacaccaatgaagtgctgtctcttttgtttggtgtccaaagtttcgttacactttttgaccaagaacttgaagaccctgtcaaacatggcctttgacatggcaccgacggagtaggatacttggttgacattacgaccttgggtgacgaattcgttaccgaccttaattcttggtttgacaagagcttggtagagagctggggcttcaacacccaagagtttactaacacgttcaccttcttcggtaccgtctggttcagcctgttcttcacgacctctttgtttgaacttcatgcaacccatgtgcattacagcggcggtgatcttgtatacgttgtccttttcttcttgtgtgaaaccaaggatatcgaaggcttcatctgtaagtctacattcctcagcatcatctacgccaggaattgtagtttttccttgggcgacgaagttgtactcgttgatattgttagacaacaaacacttttctttaactccaggtacagatccagacatgatctggtagaagatgtggtaagatctttccaatggctgttgggaaatgacacgggccttttctagcagataagtttcaatatcagcaccagcaagtttaccagttgggccgaagtggatacggatgaatttaccgaaacgggaagagttatcgttacgcacggtcttggcgttaccgaaggcttcaagtacagggttagtttgtacaacttgatcttccaagttacctttcttttggttgggatcagcatctttcttagttgaggcaccgacggtggcgaagtaggcaattaccttcttcgtgttttcagttttaccggcaccagattcaccagtaatcaacatagattgattttcgtgattggtcaacatgttgacgtaggcaccgtcagaaatggcgaaaatgtggggtggtacttcattacgcctcttaccacggtacaacttggcacaacggttggtatatacagggaaacgtttgtaggggttaatggcgacacagaacaaacctgagtatgtgtagattagcttagcgtagtagcgttgtttcaaattatgtaagacagatgcgtcgtttaggtaggttaaatctgccatatcttcgactttttcgtatttgggaggattcacttggtgaacgttgtcttttttgaattgcttttcctctcctccaggaagaccaacggtgacaagatcacccttggttcctttgatttcaccaagcaagaaaccctccttgtcgtccggtacccagcaagattttttggcatcatagggcttagtttggtcgatacgtttctgttcgagagatacgaacaagtatggggtgggatctgggtcatccccctcttgtttttgtggtttaggcatggtgtacggacttagtcggggctatcgagacacgtaatgcagccctagagccttcgttcgaaagg

SEQ ID NO: 1360 - DNA, 6283 bp, Diabrotica virgifera
  SmartBlast Evalue=0; Info=Muscle myosin heavy chain n=1 Tax= Papilio xuthus RepID=B2DBI1_9NEOP
aacaatataacttttatgtttattggtgccttatatcatacaacattatcatacatacaatatcattatacaacctacatattttcataacaaaataattggcattttgagaaatgaagagatcaaagggctgtcttggtggtaaatacgtgtctctgaatactcccttcgttctcctttttctcgaacatttacggaatcatacaactctaatattcaaaaacgaaaataaaaaattaataaaagtaaaatcgcatagagttggttttgatgcgacctaaacagttcgtttgtttattaagattctaacacagcgcgcatgttcactcgaaatcaggtgctaagtcgaaccttggggggaatggaccacctagagcgtctcccattcccaaggtggggcgctgtctttggggcgctggactggctcctctagctgcagatcctgaacgtcccttggcacggaatttggcgatggcctgttcggcgaggtcggctctttcttcggcttcttcgagctcttgttgggctttacggaatttggccaagttcaaagcggcgatttcttcggcttcttctatctgtctcttgtaggtcttgatcttttgttggagtttgtcgacgaggtcttgcatcctctcgtggttcttgcggtcttcttcagcttggaagctaagttccttgatacgacgttcagactttctcaagttcttttgggcatccgcgtgccgcctttgttcaccgtctaattcattttctaattctctaacacgttgttccaatttggcaatagccttctttcctcctttaagggcattggcttcagcttcgtccaagcgtacttggaggtccttgatttgagcttcgagagctttacggagtttctcttgtgtttgggcatggtcttgttcagcgcggagttcatcagcgagacgagcggcatctaccatagccttcttggccttctcttcggagttcttggcttcgttgagaagttcgtcaaggtctgagtggagggtttgcaattcggtttccaatttcctcttggcggcagacaaggaagcgttttgggctccaagatcgttcaattgttcgtgagcatctcccaattcttgttcagcttggcgacgagcacggtcggcttgttcgagaagagtgcgagattcttcaagttcattttgaagagcgttagcacgacgttctgaaattccaagttgttcacgggcttcatcgcgagctctttgttcttcttcaagggcggtttgggtgtccttaagttgttgttggtagcgtttgatggtcttttgggcttcagcgttggccttgttagcgtggtccaaagcgatttccaattcattgatatcagcttccaacttcttcttcatgcgaagggcctcagccttacctttggcttcagcttcaagggaggcttgcatggagtcgagggcacgttggtgattcttgcgggtgttttcgaattcttcttctttctcttggatacgtctgtcgatttcttgacggacttgagaaagttcaagttggctacgaagtactttgttttcttcttgttcaagagcagcttcagcttcttcaagagcagcttggagttcatctttttcagcttccaagcgcttgcgggccttttcgatttcgtggatgttgcggccaccttctccaatttggtcaaggagatccttaacttcatcagcgaggttcttgttttcacggcggacagcttcaagttgttcttgtccttcttcgtaggcgcccttaagtctgaacaattcggtggagtagtttctgcattctttctgactggcatcgagttcagcagccaagtcatcaaccttgagtttccattctccaatgattttgtcgaaggccttttgtttcttctcagcagcattggcaatggcgttagcacggtcgacttcgagttgcaagtcttcgacttcagtggccaaacgttgtttggtcttttcaagagctacaaccttctggttgagagattcgatggtttcttcagcctcagcaagacgagcttggagtttcctcttagcttcttcgagttcttcagagcgagcaactccttcagattcgtatttctggcgccagagttgagattcagcgttggctttgctgagttgtctttggatatcagccttggcttcggcttcttcttcaacttgttcacggatgttgtccaagtcgtgttccaagtttctgaatttgccgaggagggtagcgcgttctctgctctcttcatcggccaatctcttggtatcttccaattgagtggtaagggataccttgatcttgctgagttgagatacttgagattcggcttcctcgagttgtctgaggaggtcggagttttcaatagacaacttcttcttggcggcatcgaagtcgttaagagtgcggttggtttcgtcaagtttgccttggacgtcgttgagttgttgtcccaattgtttggataccttttctatagcggccttttcgttggctaagtggtcgactgaagcacggaggtcattgagttcaccgaagtattgagacttttctttctcagccttggctttgagtttgttgagttggtcaatttgttcacccatttcagaaacagcgtcgttgtgcttcttgcggaggttagcaagagttccttcatgttggatgttggattcttcgaggtcacgacggagtttggcgagttcggcttcacgtttcttgttgagttcgatttgggctgaggtagcaccaccggcttcttcaagacgttcgccgagttcttccaattcgcgggccaaatcagcgcgttgtttctcagctttagcacgggcttgacgttcagcttcaacttcctcttcgagttcctcaatgcgagcctggagttccttaacttgtttttgttgtttaccaacaacggattgttcgtcttcgagtttggcagtgagtgatgagatttccttgtctttgcgttggatggtttgttcgagttccttcttgttgcgttccaagtcagctacagcctcttgggtgagtttcaagtcgccttcaaccttacgtttagatttttctacgtcaccacggagtttcttttcgcgttccaaagagtcttcgagttcgtccaaggtttgttccaacttagccttaactttgttgaggtggttgaccttgtcctcggcggcctggagttcttcagaaaccttctggttgttttcaccagacattttcttttccttgttgagcttgttgatgagttcgtcttggtgggcgatctcatcgttcaagttcctgatttggtgatccttggtggctttgtcttgttcagacttttggaggttgagttccaaatcttcgatgtctttcttgaaaccggacatttcttgttcgagtttcttcttttgttgcatcaactggttgcgagcatcttcctcttggctcaaacgatcttgggtttcagaaagttgagactcgaggtcgttcttttgggcttggagtttgttggccctttcttgagtttcggaaagggatcccttttctccttccaagttagataacaactcggtcttctcagctaagagcttggcatagagagcttctaattccttcttggccttttcttcacgctcgaaggcttcttgggctttttgggctttctcttcaagtttggcaatctcatcctcgatacgggtgacgttgaggagaggtctgaccttctgccacaatttgtaccatggccatgtgcgcaatttgaggtatttgcgcaagttgcgttggcacacttggagggccaaacgttgttcttgcagtttcttgaattcctttcttgagagataaccacggacccaagattgcatccaggtgacgatcttgccaagacggtcgtcacgaagttcttccatctgacccaagacaccagcacggaagaagaccttagtgtgacctagacggtataattcagcatccaaaccggaagcatcaagaatgtgttctgcgcatttctttggatcagattctttggaaactgcggctgggttgaggattttgtaacgaagtttgaagtcagggtagaccatcctgttggggaaacctttacggcaaatacggataccttcaagtacaccgttacatgtcagctggtgcattaccaagtgagagtcaatgacaccgggttgtttcaattcgttggggatgatacaacgtacgaagtgaggttgggtagatctcaaggtggtcatcaagttgttcaattgttccttgtatgcagaagatactgtggcaaaaccaccacccttcttaccacgacctttttcggcagcaccaccagattgacctggatggtcggcgaagatttcgacaacgagggcattggaacccttcttgtacaagtcaacaacggtgtcgttcaagggatccttgttcttttccaaccaaccggttatattgtatggtacattaccggcataatggcccaaggtgaagtgagcagcttgctgacctggttttggtggttttggtttttggaagttgggtgatttgcccaagtggttggtgttcaatttttcctcaaaggtcttgtcggtagctttggggaacatagattcttcttcaaggatggacaagatacccataggcttttcaataagttcaatacaagcagccaagtccattccaaaatcaatgaaggtccattggataccttcagttttgtattcttcttgttcgagaacgaacatgtgatggttaaagaattgttgcaatttttcgttggtaaagttaatacacagttgttcaaaaccgttgtagtcgaagatttcaaaaccagcaatatccagtacaccaatgaagtgctgtctcttttgtttggtgtccaaagtttcgttacactttttgaccaagaacttgaagaccctgtcaaacatggcctttgacatggcaccgacggagtaggatacttggttgacattacgaccttgggtgacgaattcgttaccgaccttaattcttggtttgacaagagcttggtagagagctggggcttcaacacccaagagtttactaacacgttcaccttcttcggtaccgtctggttcagcctgttcttcacgacctctttgtttgaacttcatgcaacccatgtgcattacagcggcggtgatcttgtatacgttgtccttttcttcttgtgtgaaaccaaggatatcgaaggcttcatctgtaagtctacattcctcagcatcatctacgccaggaattgtagtttttccttgggcgacgaagttgtactcgttgatattgttagacaacaaacacttttctttaactccaggtacagatccagacatgatctggtagaagatgtggtaagatctttccaatggctgttgggaaatgacacgggccttttctagcagataagtttcaatatcagcaccagcaagtttaccagttgggccgaagtggatacggatgaatttaccgaaacgggaagagttatcgttacgcacggtcttggcgttaccgaaggcttcaagtacagggttagtttgtacaacttgatcttccaagttacctttcttttggttgggatcagcatctttcttagttgaggcaccgacggtggcgaagtaggcaattaccttcttcgtgttttcagttttaccggcaccagattcaccagtaatcaacatagattgattttcgtgattggtcaacatgttgacgtaggcaccgtcagaaatggcgaaaatgtggggtggtacttcattacgcctcttaccacggtacaacttggcacaacggttggtatatacagggaaacgtttgtaggggttaatggcgacacagaacaaacctgagtatgtgtagataagcttatggtaataacgttgttttaaattgtgcaatactgaagcgtcgttgaggtatgtcaaatttgacatatcctcggccttttcgtactttggaggattgacctgagttacttggtccttcttgaagttcttttcctctcctccaggaagaccaacggtgacaagatcacccttggttcctttgatttcaccaagcaagaaaccctccttgtcgtccggtacccagcaagattttttggcatcatagggcttagtttggtcgatacgtttctgttcgagagatacgaacaagtatggggtgggatctgggtcatccccctcttgtttttgtggtttaggcatggtgtacggacttagtcggggctatcgagacacgtaatgcagccctagagccttcgttcgaaagg

SEQ ID NO: 1361 - DNA, 6283 bp, Diabrotica virgifera
  SmartBlast Evalue=0; Info=Muscle myosin heavy chain n=1 Tax= Papilio xuthus RepID=B2DBI1_9NEOP
aacaatataacttttatgtttattggtgccttatatcatacaacattatcatacatacaatatcattatacaacctacatattttcataacaaaataattggcattttgagaaatgaagagatcaaagggctgtcttggtggtaaatacgtgtctctgaatactcccttcgttctcctttttctcgaacatttacggaatcatacaactctaatattcaaaaacgaaaataaaaaattaataaaagtaaaatcgcatagagttggttttgatgcgacctaaacagttcgtttgtttattaagattctaacacagcgcgcatgttcactcgaaatcaggtgctaagtcgaaccttggggggaatggaccacctagagcgtctcccattcccaaggtggggcgctgtctttggggcgctggactggctcctctagctgcagatcctgaacgtcccttggcacggaatttggcgatggcctgttcggcgaggtcggctctttcttcggcttcttcgagctcttgttgggctttacggaatttggccaagttcaaagcggcgatttcttcggcttcttctatctgtctcttgtaggtcttgatcttttgttggagtttgtcgacgaggtcttgcatcctctcgtggttcttgcggtcttcttcagcttggaagctaagttccttgatacgacgttcagactttctcaagttcttttgggcatccgcgtgccgcctttgttcaccgtctaattcattttctaattctctaacacgttgttccaatttggcaatagccttctttcctcctttaagggcattggcttcagcttcgtccaagcgtacttggaggtccttgatttgagcttcgagagctttacggagtttctcttgtgtttgggcatggtcttgttcagcgcggagttcatcagcgagacgagcggcatctaccatagccttcttggccttctcttcggagttcttggcttcgttgagaagttcgtcaaggtctgagtggagggtttgcaattcggtttccaatttcctcttggcggcagacaaggaagcgttttgggctccaagatcgttcaattgttcgtgagcatctcccaattcttgttcagcttggcgacgagcacggtcggcttgttcgagaagagtgcgagattcttcaagttcattttgaagagcgttagcacgacgttctgaaattccaagttgttcacgggcttcatcgcgagctctttgttcttcttcaagggcggtttgggtgtccttaagttgttgttggtagcgtttgatggtcttttgggcttcagcgttggccttgttagcgtggtccaaagcgatttccaattcattgatatcagcttccaacttcttcttcatgcgaagggcctcagccttacctttggcttcagcttcaagggaggcttgcatggagtcgagggcacgttggtgattcttgcgggtgttttcgaattcttcttctttctcttggatacgtctgtcgatttcttgacggacttgagaaagttcaagttggctacgaagtactttgttttcttcttgttcaagagcagcttcagcttcttcaagagcagcttggagttcatctttttcagcttccaagcgcttgcgggccttttcgatttcgtggatgttgcggccaccttctccaatttggtcaaggagatccttaacttcatcagcgaggttcttgttttcacggcggacagcttcaagttgttcttgtccttcttcgtaggcgcccttaagtctgaacaattcggtggagtagtttctgcattctttctgactggcatcgagttcagcagccaagtcatcaaccttgagtttccattctccaatgattttgtcgaaggccttttgtttcttctcagcagcattggcaatggcgttagcacggtcgacttcgagttgcaagtcttcgacttcagtggccaaacgttgtttggtcttttcaagagctacaaccttctggttgagagattcgatggtttcttcagcctcagcaagacgagcttggagtttcctcttagcttcttcgagttcttcagagcgagcaactccttcagattcgtatttctggcgccagagttgagattcagcgttggctttgctgagttgtctttggatatcagccttggcttcggcttcttcttcaacttgttcacggatgttgtccaagtcgtgttccaagtttctgaatttgccgaggagggtagcgcgttctctgctctcttcatcggccaatctcttggtatcttccaattgagtggtaagggataccttgatcttgctgagttgagatacttgagattcggcttcctcgagttgtctgaggaggtcggagttttcaatagacaacttcttcttggcggcatcgaagtcgttaagagtgcggttggtttcgtcaagtttgccttggacgtcgttgagttgttgtcccaattgtttggataccttttctatagcggccttttcgttggctaagtggtcgactgaagcacggaggtcattgagttcaccgaagtattgagacttttctttctcagccttggctttgagtttgttgagttggtcaatttgttcacccatttcagaaacagcgtcgttgtgcttcttgcggaggttagcaagagttccttcatgttggatgttggattcttcgaggtcacgacggagtttggcgagttcggcttcacgtttcttgttgagttcgatttgggctgaggtagcaccaccggcttcttcaagacgttcgccgagttcttccaattcgcgggccaaatcagcgcgttgtttctcagctttagcacgggcttgacgttcagcttcaacttcctcttcgagttcctcaatgcgagcctggagttccttaacttgtttttgttgtttaccaacaacggattgttcgtcttcgagtttggcagtgagtgatgagatttccttgtctttgcgttggatggtttgttcgagttccttcttgttgcgttccaagtcagctacagcctcttgggtgagtttcaagtcgccttcaaccttacgtttagatttttctacgtcaccacggagtttcttttcgcgttccaaagagtcttcgagttcgtccaaggtttgttccaacttagccttaactttgttgaggtggttgaccttgtcctcggcggcctggagttcttcagaaaccttctggttgttttcaccagacattttcttttccttgttgagcttgttgatgagttcgtcttggtgggcgatctcatcgttcaagttcctgatttggtgatccttggtggctttgtcttgttcagacttttggaggttgagttccaaatcttcgatgtctttcttgaaaccggacatttcttgttcgagtttcttcttttgttgcatcaactggttgcgagcatcttcctcttggctcaaacgatcttgggtttcagaaagttgagactcgaggtcgttcttttgggcttggagtttgttggccctttcttgagtttcggaaagggatcccttttctccttccaagttagataacaactcggtcttctcagctaagagcttggcatagagagcttctaattccttcttggccttttcttcacgctcgaaggcttcttgggctttttgggctttctcttcaagtttggcaatctcatcctcgatacgggtgacgttgaggagaggtctgaccttctgccacaatttgtaccatggccatgtgcgcaatttgaggtatttgcgcaagttgcgttggcacacttggagggccaaacgttgttcttgcagtttcttgaattcctttcttgagagataaccacggacccaagattgcatccaggtgacgatcttgccaagacggtcgtcacgaagttcttccatctgacccaagacaccagcacggaagaagaccttagtgtgacctagacggtataattcagcatccaaaccggaagcatcaagaatgtgttctgcgcatttctttggatcagattctttggaaactgcggctgggttgaggattttgtaacgaagtttgaagtcagggtagaccatcctgttggggaaacctttacggcaaatacggataccttcaagtacaccgttacatgtcagctggtgcattaccaagtgagagtcaatgacaccgggttgtttcaattcgttggggatgatacaacgtacgaagtgaggttgggtagatctcaaggtggtcatcaagttgttcaattgttccttgtatgcagaagatactgtggcaaaaccaccacccttcttaccacgacctttttcggcagcaccaccagattgacctggatggtcggcgaagatttcgacaacgagggcattggaacccttcttgtacaagtcaacaacggtgtcgttcaagggatccttgttcttttccaaccaaccggttatattgtatggtacattaccggcataatggcccaaggtgaagtgagcagcttgctgacctggttttggtggttttggtttttggaagttgggtgatttgcccaagtggttggtgttcaatttttcctcaaaggtcttgtcggtagctttggggaacatagattcttcttcaaggatggacaagatacccataggcttttcgataagttcgatacaggcagctaagtccataccgaaatcaataaaagcccattcaataccctctctttggtattcttcttgttcaagtacaaacatgtggtggttaaagaactgttgcaacttttcattggtaaagttgatacaaagctgctcaaagccgttgaagtcgaagatttcaaaaccagcaatatccagtacaccaatgaagtgctgtctcttttgtttggtgtccaaagtttcgttacactttttgaccaagaacttgaagaccctgtcaaacatggcctttgacatggcaccgacggagtaggatacttggttgacattacgaccttgggtgacgaattcgttaccgaccttaattcttggtttgacaagagcttggtagagagctggggcttcaacacccaagagtttactaacacgttcaccttcttcggtaccgtctggttcagcctgttcttcacgacctctttgtttgaacttcatgcaacccatgtgcattacagcggcggtgatcttgtatacgttgtccttttcttcttgtgtgaaaccaaggatatcgaaggcttcatctgtaagtctacattcctcagcatcatctacgccaggaattgtagtttttccttgggcgacgaagttgtactcgttgatattgttagacaacaaacacttttctttaactccaggtacagatccagacatgatctggtagaagatgtggtaagatctttccaatggctgttgggaaatgacacgggccttttctagcagataagtttcaatatcagcaccagcaagtttaccagttgggccgaagtggatacggatgaatttaccgaaacgggaagagttatcgttacgcacggtcttggcgttaccgaaggcttcaagtacagggttagtttgtacaacttgatcttccaagttacctttcttttggttgggatcagcatctttcttagttgaggcaccgacggtggcgaagtaggcaattaccttcttcgtgttttcagttttaccggcaccagattcaccagtaatcaacatagattgattttcgtgattggtcaacatgttgacgtaggcaccgtcagaaatggcgaaaatgtggggtggtacttcattacgcctcttaccacggtacaacttggcacaacggttggtatatacagggaaacgtttgtaggggttaatggcgacacagaacaaacctgagtatgtgtagataagcttatggtaataacgttgttttaaattgtgcaatactgaagcgtcgttgaggtatgtcaaatttgacatatcctcggccttttcgtactttggaggattgacctgagttacttggtccttcttgaagttcttttcctctcctccaggaagaccaacggtgacaagatcacccttggttcctttgatttcaccaagcaagaaaccctccttgtcgtccggtacccagcaagattttttggcatcatagggcttagtttggtcgatacgtttctgttcgagagatacgaacaagtatggggtgggatctgggtcatccccctcttgtttttgtggtttaggcatggtgtacggacttagtcggggctatcgagacacgtaatgcagccctagagccttcgttcgaaagg

SEQ ID NO: 1362 - DNA, 3820 bp, Diabrotica virgifera
  SmartBlast Evalue=0; Info=Muscle myosin heavy chain n=1 Tax= Papilio xuthus RepID=B2DBI1_9NEOP
aacaatataacttttatgtttattggtgccttatatcatacaacattatcatacatacaatatcattatacaacctacatattttcataacaaaataattggcattttgagaaatgaagagatcaaagggctgtcttggtggtaaatacgtgtctctgaatactcccttcgttctcctttttctcgaacatttacggaatcatacaactctaatattcaaaaacgaaaataaaaaattaataaaagtaaaatcgcatagagttggttttgatgcgacctaaacagttcgtttgtttattaagattctaacacagcgcgcatgttcactcgaaatcaggtgctaagtcgaaccttggggggaatggaccacctagagcgtctcccattcccaaggtggggcgctgtctttggggcgctggactggctcctctagctgcagatcctgaacgtcccttggcacggaatttggcgatggcctgttcggcgaggtcggctctttcttcggcttcttcgagctcttgttgggctttacggaatttggccaagttcaaagcggcgatttcttcggcttcttctatctgtctcttgtaggtcttgatcttttgttggagtttgtcgacgaggtcttgcatcctctcgtggttcttgcggtcttcttcagcttggaagctaagttccttgatacgacgttcagactttctcaagttcttttgggcatccgcgtgccgcctttgttcaccgtctaattcattttctaattctctaacacgttgttccaatttggcaatagccttctttcctcctttaagggcattggcttcagcttcgtccaagcgtacttggaggtccttgatttgagcttcgagagctttacggagtttctcttgtgtttgggcatggtcttgttcagcgcggagttcatcagcgagacgagcggcatctaccatagccttcttggccttctcttcggagttcttggcttcgttgagaagttcgtcaaggtctgagtggagggtttgcaattcggtttccaatttcctcttggcggcagacaaggaagcgttttgggctccaagatcgttcaattgttcgtgagcatctcccaattcttgttcagcttggcgacgagcacggtcggcttgttcgagaagagtgcgagattcttcaagttcattttgaagagcgttagcacgacgttctgaaattccaagttgttcacgggcttcatcgcgagctctttgttcttcttcaagggcggtttgggtgtccttaagttgttgttggtagcgtttgatggtcttttgggcttcagcgttggccttgttagcgtggtccaaagcgatttccaattcattgatatcagcttccaacttcttcttcatgcgaagggcctcagccttacctttggcttcagcttcaagggaggcttgcatggagtcgagggcacgttggtgattcttgcgggtgttttcgaattcttcttctttctcttggatacgtctgtcgatttcttgacggacttgagaaagttcaagttggctacgaagtactttgttttcttcttgttcaagagcagcttcagcttcttcaagagcagcttggagttcatctttttcagcttccaagcgcttgcgggccttttcgatttcgtggatgttgcggccaccttctccaatttggtcaaggagatccttaacttcatcagcgaggttcttgttttcacggcggacagcttcaagttgttcttgtccttcttcgtaggcgcccttaagtctgaacaattcggtggagtagtttctgcattctttctgactggcatcgagttcagcagccaagtcatcaaccttgagtttccattctccaatgattttgtcgaaggccttttgtttcttctcagcagcattggcaatggcgttagcacggtcgacttcgagttgcaagtcttcgacttcagtggccaaacgttgtttggtcttttcaagagctacaaccttctggttgagagattcgatggtttcttcagcctcagcaagacgagcttggagtttcctcttagcttcttcgagttcttcagagcgagcaactccttcagattcgtatttctggcgccagagttgagattcagcgttggctttgctgagttgtctttggatatcagccttggcttcggcttcttcttcaacttgttcacggatgttgtccaagtcgtgttccaagtttctgaatttgccgaggagggtagcgcgttctctgctctcttcatcggccaatctcttggtatcttccaattgagtggtaagggataccttgatcttgctgagttgagatacttgagattcggcttcctcgagttgtctgaggaggtcggagttttcaatagacaacttcttcttggcggcatcgaagtcgttaagagtgcggttggtttcgtcaagtttgccttggacgtcgttgagttgttgtcccaattgtttggataccttttctatagcggccttttcgttggctaagtggtcgactgaagcacggaggtcattgagttcaccgaagtattgagacttttctttctcagccttggctttgagtttgttgagttggtcaatttgttcacccatttcagaaacagcgtcgttgtgcttcttgcggaggttagcaagagttccttcatgttggatgttggattcttcgaggtcacgacggagtttggcgagttcggcttcacgtttcttgttgagttcgatttgggctgaggtagcaccaccggcttcttcaagacgttcgccgagttcttccaattcgcgggccaaatcagcgcgttgtttctcagctttagcacgggcttgacgttcagcttcaacttcctcttcgagttcctcaatgcgagcctggagttccttaacttgtttttgttgtttaccaacaacggattgttcgtcttcgagtttggcagtgagtgatgagatttccttgtctttgcgttggatggtttgttcgagttccttcttgttgcgttccaagtcagctacagcctcttgggtgagtttcaagtcgccttcaaccttacgtttagatttttctacgtcaccacggagtttcttttcgcgttccaaagagtcttcgagttcgtccaaggtttgttccaacttagccttaactttgttgaggtggttgaccttgtcctcggcggcctggagttcttcagaaaccttctggttgttttcaccagacattttcttttccttgttgagcttgttgatgagttcgtcttggtgggcgatctcatcgttcaagttcctgatttggtgatccttggtggctttgtcttgttcagacttttggaggttgagttccaaatcttcgatgtctttcttgaaaccggacatttcttgttcgagtttcttcttttgttgcatcaactggttgcgagcatcttcctcttggctcaaacgatcttgggtttcagaaagttgagactcgaggtcgttcttttgggcttggagtttgttggccctttcttgagtttcggaaagggatcccttttctccttccaagttagataacaactcggtcttctcagctaagagcttggcatagagagcttctaattccttcttggccttttcttcacgctcgaaggcttcttgggctttttgggctttctcttcaagtttctgtaaagtattgtcatctttagttatttcaattgacggttcggtctctgccattgcaagttaaattcgattgagagtgaaaggcagtcgataaattcgagtaagtcgtatcgtaagtctaagacgctgaaggaggctgagtattgcgg

SEQ ID NO: 1363 - DNA, 6286 bp, Diabrotica virgifera
  SmartBlast Evalue=0; Info=Muscle myosin heavy chain n=1 Tax= Papilio xuthus RepID=B2DBI1_9NEOP
aacaatataacttttatgtttattggtgccttatatcatacaacattatcatacatacaatatcattatacaacctacatattttcataacaaaataattggcattttgagaaatgaagagatcaaagggctgtcttggtggtaaatacgtgtctctgaatactcccttcgttctcctttttctcgaacatttacggaatcatacaactctaatattcaaaaacgaaaataaaaaattaataaaagtaaaatcgcatagagttggttttgatgcgacctaaacagttcgtttgtttattaagattctaacacagcgcgcatgttcactcgaaatcaggtgctaagtcgaaccttggggggaatggaccacctagagcgtctcccattcccaaggtggggcgctgtctttggggcgctggactggctcctctagctgcagatcctgaacgtcccttggcacggaatttggcgatggcctgttcggcgaggtcggctctttcttcggcttcttcgagctcttgttgggctttacggaatttggccaagttcaaagcggcgatttcttcggcttcttctatctgtctcttgtaggtcttgatcttttgttggagtttgtcgacgaggtcttgcatcctctcgtggttcttgcggtcttcttcagcttggaagctaagttccttgatacgacgttcagactttctcaagttcttttgggcatccgcgtgccgcctttgttcaccgtctaattcattttctaattctctaacacgttgttccaatttggcaatagccttctttcctcctttaagggcattggcttcagcttcgtccaagcgtacttggaggtccttgatttgagcttcgagagctttacggagtttctcttgtgtttgggcatggtcttgttcagcgcggagttcatcagcgagacgagcggcatctaccatagccttcttggccttctcttcggagttcttggcttcgttgagaagttcgtcaaggtctgagtggagggtttgcaattcggtttccaatttcctcttggcggcagacaaggaagcgttttgggctccaagatcgttcaattgttcgtgagcatctcccaattcttgttcagcttggcgacgagcacggtcggcttgttcgagaagagtgcgagattcttcaagttcattttgaagagcgttagcacgacgttctgaaattccaagttgttcacgggcttcatcgcgagctctttgttcttcttcaagggcggtttgggtgtccttaagttgttgttggtagcgtttgatggtcttttgggcttcagcgttggccttgttagcgtggtccaaagcgatttccaattcattgatatcagcttccaacttcttcttcatgcgaagggcctcagccttacctttggcttcagcttcaagggaggcttgcatggagtcgagggcacgttggtgattcttgcgggtgttttcgaattcttcttctttctcttggatacgtctgtcgatttcttgacggacttgagaaagttcaagttggctacgaagtactttgttttcttcttgttcaagagcagcttcagcttcttcaagagcagcttggagttcatctttttcagcttccaagcgcttgcgggccttttcgatttcgtggatgttgcggccaccttctccaatttggtcaaggagatccttaacttcatcagcgaggttcttgttttcacggcggacagcttcaagttgttcttgtccttcttcgtaggcgcccttaagtctgaacaattcggtggagtagtttctgcattctttctgactggcatcgagttcagcagccaagtcatcaaccttgagtttccattctccaatgattttgtcgaaggccttttgtttcttctcagcagcattggcaatggcgttagcacggtcgacttcgagttgcaagtcttcgacttcagtggccaaacgttgtttggtcttttcaagagctacaaccttctggttgagagattcgatggtttcttcagcctcagcaagacgagcttggagtttcctcttagcttcttcgagttcttcagagcgagcaactccttcagattcgtatttctggcgccagagttgagattcagcgttggctttgctgagttgtctttggatatcagccttggcttcggcttcttcttcaacttgttcacggatgttgtccaagtcgtgttccaagtttctgaatttgccgaggagggtagcgcgttctctgctctcttcatcggccaatctcttggtatcttccaattgagtggtaagggataccttgatcttgctgagttgagatacttgagattcggcttcctcgagttgtctgaggaggtcggagttttcaatagacaacttcttcttggcggcatcgaagtcgttaagagtgcggttggtttcgtcaagtttgccttggacgtcgttgagttgttgtcccaattgtttggataccttttctatagcggccttttcgttggctaagtggtcgactgaagcacggaggtcattgagttcaccgaagtattgagacttttctttctcagccttggctttgagtttgttgagttggtcaatttgttcacccatttcagaaacagcgtcgttgtgcttcttgcggaggttagcaagagttccttcatgttggatgttggattcttcgaggtcacgacggagtttggcgagttcggcttcacgtttcttgttgagttcgatttgggctgaggtagcaccaccggcttcttcaagacgttcgccgagttcttccaattcgcgggccaaatcagcgcgttgtttctcagctttagcacgggcttgacgttcagcttcaacttcctcttcgagttcctcaatgcgagcctggagttccttaacttgtttttgttgtttaccaacaacggattgttcgtcttcgagtttggcagtgagtgatgagatttccttgtctttgcgttggatggtttgttcgagttccttcttgttgcgttccaagtcagctacagcctcttgggtgagtttcaagtcgccttcaaccttacgtttagatttttctacgtcaccacggagtttcttttcgcgttccaaagagtcttcgagttcgtccaaggtttgttccaacttagccttaactttgttgaggtggttgaccttgtcctcggcggcctggagttcttcagaaaccttctggttgttttcaccagacattttcttttccttgttgagcttgttgatgagttcgtcttggtgggcgatctcatcgttcaagttcctgatttggtgatccttggtggctttgtcttgttcagacttttggaggttgagttccaaatcttcgatgtctttcttgaaaccggacatttcttgttcgagtttcttcttttgttgcatcaactggttgcgagcatcttcctcttggctcaaacgatcttgggtttcagaaagttgagactcgaggtcgttcttttgggcttggagtttgttggccctttcttgagtttcggaaagggatcccttttctccttccaagttagataacaactcggtcttctcagctaagagcttggcatagagagcttctaattccttcttggccttttcttcacgctcgaaggcttcttgggctttttgggctttctcttcaagtttggcaatctcatcctcgatacgggtgacgttgaggagaggtctgaccttctgccacaatttgtaccatggccatgtgcgcaatttgaggtatttgcgcaagttgcgttggcacacttggagggccaaacgttgttcttgcagtttcttgaattcctttcttgagagataaccacggacccaagattgcatccaggtgacgatcttgccaagacggtcgtcacgaagttcttccatctgacccaagacaccagcacggaagaagaccttcgttttacccaatcggtattgctcagcatcaagttgaacgttctccaatataatttgtgctgctttttcaggtgtcatagtatctttgatttgacttgcggccagaattttgtatcgaagtttgaagtcagggtagaccatcctgttggggaaacctttacggcaaatacggataccttcaagtacaccgttacatgtcagctggtgcattaccaagtgagagtcaatgacaccgggttgtttcaattcgttggggatgatacaacgtacgaagtgaggttgggtagatctcaaggtggtcatcaagttgttcaattgttccctgtataaactggaaacggtttggaaagcggaacccttggttctcttaccacctttttcggcagcaccaccagattgacctggatggtcggcgaagatttcgacaacgagggcattggaacccttcttgtacaagtcaacaacggtgtcgttcaagggatccttgttcttttccaaccaaccggttatattgtatggtacattaccggcataatggcccaaggtgaagtgagcagcttgctgacctggttttggtggttttggtttttggaagttgggtgatttgcccaagtggttggtgttcaatttttcctcaaaggtcttgtcggtagctttggggaacatagattcttcttcaaggatggacaagatacccataggcttttcaataagttcaatacaagcagccaagtccattccaaaatcaatgaaggtccattggataccttcagttttgtattcttcttgttcgagaacgaacatgtgatggttaaagaattgttgcaatttttcgttggtaaagttaatacacagttgttcaaaaccgttgtagtcgaagatttcaaaaccagcaatatccagtacaccaatgaagtgctgtctcttttgtttggtgtccaaagtttcgttacactttttgaccaagaacttgaagaccctgtcaaacatggcctttgacatggcaccgacggagtaggatacttggttgacattacgaccttgggtgacgaattcgttaccgaccttaattcttggtttgacaagagcttggtagagagctggggcttcaacacccaagagtttactaacacgttcaccttcttcggtaccgtctggttcagcctgttcttcacgacctctttgtttgaacttcatgcaacccatgtgcattacagcggcggtgatcttgtatacgttgtccttttcttcttgtgtgaaaccaaggatatcgaaggcttcatctgtaagtctacattcctcagcatcatctacgccaggaattgtagtttttccttgggcgacgaagttgtactcgttgatattgttagacaacaaacacttttctttaactccaggtacagatccagacatgatctggtagaagatgtggtaagatctttccaatggctgttgggaaatgacacgggccttttctagcagataagtttcaatatcagcaccagcaagtttaccagttgggccgaagtggatacggatgaatttaccgaaacgggaagagttatcgttacgcacggtcttggcgttaccgaaggcttcaagtacagggttagtttgtacaacttgatcttccaagttacctttcttttggttgggatcagcatctttcttagttgaggcaccgacggtggcgaagtaggcaattaccttcttcgtgttttcagttttaccggcaccagattcaccagtaatcaacatagattgattttcgtgattggtcaacatgttgacgtaggcaccgtcagaaatggcgaaaatgtggggtggtacttcattacgcctcttaccacggtacaacttggcacaacggttggtatatacagggaaacgtttgtaggggttaatggcgacacagaacaaacctgagtatgtgtagattagcttagcgtagtagcgttgtttcaaattatgtaagacagatgcgtcgtttaggtaggttaaatctgccatatcttcgactttttcgtatttgggaggattcacttggtgaacgttgtcttttttgaattgcttttcctctcctccaggaagaccaacggtgacaagatcacccttggttcctttgatttcaccaagcaagaaaccctccttgtcgtccggtacccagcaagattttttggcatcatagggcttagtttggtcgatacgtttctgttcgagagatacgaacaagtatggggtgggatctgggtcatccccctcttgtttttgtggtttaggcatggtgtacggacttagtcggggctatcgagacacgtaatgcagccctagagccttcgttcgaaagg

SEQ ID NO: 1364 - DNA, 6286 bp, Diabrotica virgifera
  SmartBlast Evalue=0; Info=Muscle myosin heavy chain n=1 Tax= Papilio xuthus RepID=B2DBI1_9NEOP
aacaatataacttttatgtttattggtgccttatatcatacaacattatcatacatacaatatcattatacaacctacatattttcataacaaaataattggcattttgagaaatgaagagatcaaagggctgtcttggtggtaaatacgtgtctctgaatactcccttcgttctcctttttctcgaacatttacggaatcatacaactctaatattcaaaaacgaaaataaaaaattaataaaagtaaaatcgcatagagttggttttgatgcgacctaaacagttcgtttgtttattaagattctaacacagcgcgcatgttcactcgaaatcaggtgctaagtcgaaccttggggggaatggaccacctagagcgtctcccattcccaaggtggggcgctgtctttggggcgctggactggctcctctagctgcagatcctgaacgtcccttggcacggaatttggcgatggcctgttcggcgaggtcggctctttcttcggcttcttcgagctcttgttgggctttacggaatttggccaagttcaaagcggcgatttcttcggcttcttctatctgtctcttgtaggtcttgatcttttgttggagtttgtcgacgaggtcttgcatcctctcgtggttcttgcggtcttcttcagcttggaagctaagttccttgatacgacgttcagactttctcaagttcttttgggcatccgcgtgccgcctttgttcaccgtctaattcattttctaattctctaacacgttgttccaatttggcaatagccttctttcctcctttaagggcattggcttcagcttcgtccaagcgtacttggaggtccttgatttgagcttcgagagctttacggagtttctcttgtgtttgggcatggtcttgttcagcgcggagttcatcagcgagacgagcggcatctaccatagccttcttggccttctcttcggagttcttggcttcgttgagaagttcgtcaaggtctgagtggagggtttgcaattcggtttccaatttcctcttggcggcagacaaggaagcgttttgggctccaagatcgttcaattgttcgtgagcatctcccaattcttgttcagcttggcgacgagcacggtcggcttgttcgagaagagtgcgagattcttcaagttcattttgaagagcgttagcacgacgttctgaaattccaagttgttcacgggcttcatcgcgagctctttgttcttcttcaagggcggtttgggtgtccttaagttgttgttggtagcgtttgatggtcttttgggcttcagcgttggccttgttagcgtggtccaaagcgatttccaattcattgatatcagcttccaacttcttcttcatgcgaagggcctcagccttacctttggcttcagcttcaagggaggcttgcatggagtcgagggcacgttggtgattcttgcgggtgttttcgaattcttcttctttctcttggatacgtctgtcgatttcttgacggacttgagaaagttcaagttggctacgaagtactttgttttcttcttgttcaagagcagcttcagcttcttcaagagcagcttggagttcatctttttcagcttccaagcgcttgcgggccttttcgatttcgtggatgttgcggccaccttctccaatttggtcaaggagatccttaacttcatcagcgaggttcttgttttcacggcggacagcttcaagttgttcttgtccttcttcgtaggcgcccttaagtctgaacaattcggtggagtagtttctgcattctttctgactggcatcgagttcagcagccaagtcatcaaccttgagtttccattctccaatgattttgtcgaaggccttttgtttcttctcagcagcattggcaatggcgttagcacggtcgacttcgagttgcaagtcttcgacttcagtggccaaacgttgtttggtcttttcaagagctacaaccttctggttgagagattcgatggtttcttcagcctcagcaagacgagcttggagtttcctcttagcttcttcgagttcttcagagcgagcaactccttcagattcgtatttctggcgccagagttgagattcagcgttggctttgctgagttgtctttggatatcagccttggcttcggcttcttcttcaacttgttcacggatgttgtccaagtcgtgttccaagtttctgaatttgccgaggagggtagcgcgttctctgctctcttcatcggccaatctcttggtatcttccaattgagtggtaagggataccttgatcttgctgagttgagatacttgagattcggcttcctcgagttgtctgaggaggtcggagttttcaatagacaacttcttcttggcggcatcgaagtcgttaagagtgcggttggtttcgtcaagtttgccttggacgtcgttgagttgttgtcccaattgtttggataccttttctatagcggccttttcgttggctaagtggtcgactgaagcacggaggtcattgagttcaccgaagtattgagacttttctttctcagccttggctttgagtttgttgagttggtcaatttgttcacccatttcagaaacagcgtcgttgtgcttcttgcggaggttagcaagagttccttcatgttggatgttggattcttcgaggtcacgacggagtttggcgagttcggcttcacgtttcttgttgagttcgatttgggctgaggtagcaccaccggcttcttcaagacgttcgccgagttcttccaattcgcgggccaaatcagcgcgttgtttctcagctttagcacgggcttgacgttcagcttcaacttcctcttcgagttcctcaatgcgagcctggagttccttaacttgtttttgttgtttaccaacaacggattgttcgtcttcgagtttggcagtgagtgatgagatttccttgtctttgcgttggatggtttgttcgagttccttcttgttgcgttccaagtcagctacagcctcttgggtgagtttcaagtcgccttcaaccttacgtttagatttttctacgtcaccacggagtttcttttcgcgttccaaagagtcttcgagttcgtccaaggtttgttccaacttagccttaactttgttgaggtggttgaccttgtcctcggcggcctggagttcttcagaaaccttctggttgttttcaccagacattttcttttccttgttgagcttgttgatgagttcgtcttggtgggcgatctcatcgttcaagttcctgatttggtgatccttggtggctttgtcttgttcagacttttggaggttgagttccaaatcttcgatgtctttcttgaaaccggacatttcttgttcgagtttcttcttttgttgcatcaactggttgcgagcatcttcctcttggctcaaacgatcttgggtttcagaaagttgagactcgaggtcgttcttttgggcttggagtttgttggccctttcttgagtttcggaaagggatcccttttctccttccaagttagataacaactcggtcttctcagctaagagcttggcatagagagcttctaattccttcttggccttttcttcacgctcgaaggcttcttgggctttttgggctttctcttcaagtttggcaatctcatcctcgatacgggtgacgttgaggagaggtctgaccttctgccacaatttgtaccatggccatgtgcgcaatttgaggtatttgcgcaagttgcgttggcacacttggagggccaaacgttgttcttgcagtttcttgaattcctttcttgagagataaccacggacccaagattgcatccaggtgacgatcttgccaagacggtcgtcacgaagttcttccatctgacccaagacaccagcacggaagaagaccttcgttttacccaatcggtattgctcagcatcaagttgaacgttctccaatataatttgtgctgctttttcaggtgtcatagtatctttgatttgacttgcggccagaattttgtatcgaagtttgaagtcagggtagaccatcctgttggggaaacctttacggcaaatacggataccttcaagtacaccgttacatgtcagctggtgcattaccaagtgagagtcaatgacaccgggttgtttcaattcgttggggatgatacaacgtacgaagtgaggttgggtagatctcaaggtggtcatcaagttgttcaattgttccctgtataaactggaaacggtttggaaagcggaacccttggttctcttaccacctttttcggcagcaccaccagattgacctggatggtcggcgaagatttcgacaacgagggcattggaacccttcttgtacaagtcaacaacggtgtcgttcaagggatccttgttcttttccaaccaaccggttatattgtatggtacattaccggcataatggcccaaggtgaagtgagcagcttgctgacctggttttggtggttttggtttttggaagttgggtgatttgcccaagtggttggtgttcaatttttcctcaaaggtcttgtcggtagctttggggaacatagattcttcttcaaggatggacaagatacccataggcttttcgataagttcgatacaggcagctaagtccataccgaaatcaataaaagcccattcaataccctctctttggtattcttcttgttcaagtacaaacatgtggtggttaaagaactgttgcaacttttcattggtaaagttgatacaaagctgctcaaagccgttgaagtcgaagatttcaaaaccagcaatatccagtacaccaatgaagtgctgtctcttttgtttggtgtccaaagtttcgttacactttttgaccaagaacttgaagaccctgtcaaacatggcctttgacatggcaccgacggagtaggatacttggttgacattacgaccttgggtgacgaattcgttaccgaccttaattcttggtttgacaagagcttggtagagagctggggcttcaacacccaagagtttactaacacgttcaccttcttcggtaccgtctggttcagcctgttcttcacgacctctttgtttgaacttcatgcaacccatgtgcattacagcggcggtgatcttgtatacgttgtccttttcttcttgtgtgaaaccaaggatatcgaaggcttcatctgtaagtctacattcctcagcatcatctacgccaggaattgtagtttttccttgggcgacgaagttgtactcgttgatattgttagacaacaaacacttttctttaactccaggtacagatccagacatgatctggtagaagatgtggtaagatctttccaatggctgttgggaaatgacacgggccttttctagcagataagtttcaatatcagcaccagcaagtttaccagttgggccgaagtggatacggatgaatttaccgaaacgggaagagttatcgttacgcacggtcttggcgttaccgaaggcttcaagtacagggttagtttgtacaacttgatcttccaagttacctttcttttggttgggatcagcatctttcttagttgaggcaccgacggtggcgaagtaggcaattaccttcttcgtgttttcagttttaccggcaccagattcaccagtaatcaacatagattgattttcgtgattggtcaacatgttgacgtaggcaccgtcagaaatggcgaaaatgtggggtggtacttcattacgcctcttaccacggtacaacttggcacaacggttggtatatacagggaaacgtttgtaggggttaatggcgacacagaacaaacctgagtatgtgtagattagcttagcgtagtagcgttgtttcaaattatgtaagacagatgcgtcgtttaggtaggttaaatctgccatatcttcgactttttcgtatttgggaggattcacttggtgaacgttgtcttttttgaattgcttttcctctcctccaggaagaccaacggtgacaagatcacccttggttcctttgatttcaccaagcaagaaaccctccttgtcgtccggtacccagcaagattttttggcatcatagggcttagtttggtcgatacgtttctgttcgagagatacgaacaagtatggggtgggatctgggtcatccccctcttgtttttgtggtttaggcatggtgtacggacttagtcggggctatcgagacacgtaatgcagccctagagccttcgttcgaaagg

SEQ ID NO: 1365 - DNA, 6286 bp, Diabrotica virgifera
  SmartBlast Evalue=0; Info=Muscle myosin heavy chain n=1 Tax= Papilio xuthus RepID=B2DBI1_9NEOP
aacaatataacttttatgtttattggtgccttatatcatacaacattatcatacatacaatatcattatacaacctacatattttcataacaaaataattggcattttgagaaatgaagagatcaaagggctgtcttggtggtaaatacgtgtctctgaatactcccttcgttctcctttttctcgaacatttacggaatcatacaactctaatattcaaaaacgaaaataaaaaattaataaaagtaaaatcgcatagagttggttttgatgcgacctaaacagttcgtttgtttattaagattctaacacagcgcgcatgttcactcgaaatcaggtgctaagtcgaaccttggggggaatggaccacctagagcgtctcccattcccaaggtggggcgctgtctttggggcgctggactggctcctctagctgcagatcctgaacgtcccttggcacggaatttggcgatggcctgttcggcgaggtcggctctttcttcggcttcttcgagctcttgttgggctttacggaatttggccaagttcaaagcggcgatttcttcggcttcttctatctgtctcttgtaggtcttgatcttttgttggagtttgtcgacgaggtcttgcatcctctcgtggttcttgcggtcttcttcagcttggaagctaagttccttgatacgacgttcagactttctcaagttcttttgggcatccgcgtgccgcctttgttcaccgtctaattcattttctaattctctaacacgttgttccaatttggcaatagccttctttcctcctttaagggcattggcttcagcttcgtccaagcgtacttggaggtccttgatttgagcttcgagagctttacggagtttctcttgtgtttgggcatggtcttgttcagcgcggagttcatcagcgagacgagcggcatctaccatagccttcttggccttctcttcggagttcttggcttcgttgagaagttcgtcaaggtctgagtggagggtttgcaattcggtttccaatttcctcttggcggcagacaaggaagcgttttgggctccaagatcgttcaattgttcgtgagcatctcccaattcttgttcagcttggcgacgagcacggtcggcttgttcgagaagagtgcgagattcttcaagttcattttgaagagcgttagcacgacgttctgaaattccaagttgttcacgggcttcatcgcgagctctttgttcttcttcaagggcggtttgggtgtccttaagttgttgttggtagcgtttgatggtcttttgggcttcagcgttggccttgttagcgtggtccaaagcgatttccaattcattgatatcagcttccaacttcttcttcatgcgaagggcctcagccttacctttggcttcagcttcaagggaggcttgcatggagtcgagggcacgttggtgattcttgcgggtgttttcgaattcttcttctttctcttggatacgtctgtcgatttcttgacggacttgagaaagttcaagttggctacgaagtactttgttttcttcttgttcaagagcagcttcagcttcttcaagagcagcttggagttcatctttttcagcttccaagcgcttgcgggccttttcgatttcgtggatgttgcggccaccttctccaatttggtcaaggagatccttaacttcatcagcgaggttcttgttttcacggcggacagcttcaagttgttcttgtccttcttcgtaggcgcccttaagtctgaacaattcggtggagtagtttctgcattctttctgactggcatcgagttcagcagccaagtcatcaaccttgagtttccattctccaatgattttgtcgaaggccttttgtttcttctcagcagcattggcaatggcgttagcacggtcgacttcgagttgcaagtcttcgacttcagtggccaaacgttgtttggtcttttcaagagctacaaccttctggttgagagattcgatggtttcttcagcctcagcaagacgagcttggagtttcctcttagcttcttcgagttcttcagagcgagcaactccttcagattcgtatttctggcgccagagttgagattcagcgttggctttgctgagttgtctttggatatcagccttggcttcggcttcttcttcaacttgttcacggatgttgtccaagtcgtgttccaagtttctgaatttgccgaggagggtagcgcgttctctgctctcttcatcggccaatctcttggtatcttccaattgagtggtaagggataccttgatcttgctgagttgagatacttgagattcggcttcctcgagttgtctgaggaggtcggagttttcaatagacaacttcttcttggcggcatcgaagtcgttaagagtgcggttggtttcgtcaagtttgccttggacgtcgttgagttgttgtcccaattgtttggataccttttctatagcggccttttcgttggctaagtggtcgactgaagcacggaggtcattgagttcaccgaagtattgagacttttctttctcagccttggctttgagtttgttgagttggtcaatttgttcacccatttcagaaacagcgtcgttgtgcttcttgcggaggttagcaagagttccttcatgttggatgttggattcttcgaggtcacgacggagtttggcgagttcggcttcacgtttcttgttgagttcgatttgggctgaggtagcaccaccggcttcttcaagacgttcgccgagttcttccaattcgcgggccaaatcagcgcgttgtttctcagctttagcacgggcttgacgttcagcttcaacttcctcttcgagttcctcaatgcgagcctggagttccttaacttgtttttgttgtttaccaacaacggattgttcgtcttcgagtttggcagtgagtgatgagatttccttgtctttgcgttggatggtttgttcgagttccttcttgttgcgttccaagtcagctacagcctcttgggtgagtttcaagtcgccttcaaccttacgtttagatttttctacgtcaccacggagtttcttttcgcgttccaaagagtcttcgagttcgtccaaggtttgttccaacttagccttaactttgttgaggtggttgaccttgtcctcggcggcctggagttcttcagaaaccttctggttgttttcaccagacattttcttttccttgttgagcttgttgatgagttcgtcttggtgggcgatctcatcgttcaagttcctgatttggtgatccttggtggctttgtcttgttcagacttttggaggttgagttccaaatcttcgatgtctttcttgaaaccggacatttcttgttcgagtttcttcttttgttgcatcaactggttgcgagcatcttcctcttggctcaaacgatcttgggtttcagaaagttgagactcgaggtcgttcttttgggcttggagtttgttggccctttcttgagtttcggaaagggatcccttttctccttccaagttagataacaactcggtcttctcagctaagagcttggcatagagagcttctaattccttcttggccttttcttcacgctcgaaggcttcttgggctttttgggctttctcttcaagtttggcaatctcatcctcgatacgggtgacgttgaggagaggtctgaccttctgccacaatttgtaccatggccatgtgcgcaatttgaggtatttgcgcaagttgcgttggcacacttggagggccaaacgttgttcttgcagtttcttgaattcctttcttgagagataaccacggacccaagattgcatccaggtgacgatcttgccaagacggtcgtcacgaagttcttccatctgacccaagacaccagcacggaagaagaccttcgttttacccaatcggtattgctcagcatcaagttgaacgttctccaatataatttgtgctgctttttcaggtgtcatagtatctttgatttgacttgcggccagaattttgtatcgaagtttgaagtcagggtagaccatcctgttggggaaacctttacggcaaatacggataccttcaagtacaccgttacatgtcagctggtgcattaccaagtgagagtcaatgacaccgggttgtttcaattcgttggggatgatacaacgtacgaagtgaggttgggtagatctcaaggtggtcatcaagttgttcaattgttccctgtataaactggaaacggtttggaaagcggaacccttggttctcttaccacctttttcggcagcaccaccagattgacctggatggtcggcgaagatttcgacaacgagggcattggaacccttcttgtacaagtcaacaacggtgtcgttcaagggatccttgttcttttccaaccaaccggttatattgtatggtacattaccggcataatggcccaaggtgaagtgagcagcttgctgacctggttttggtggttttggtttttggaagttgggtgatttgcccaagtggttggtgttcaatttttcctcaaaggtcttgtcggtagctttggggaacatagattcttcttcaaggatggacaagatacccataggcttttcaataagttcaatacaagcagccaagtccattccaaaatcaatgaaggtccattggataccttcagttttgtattcttcttgttcgagaacgaacatgtgatggttaaagaattgttgcaatttttcgttggtaaagttaatacacagttgttcaaaaccgttgtagtcgaagatttcaaaaccagcaatatccagtacaccaatgaagtgctgtctcttttgtttggtgtccaaagtttcgttacactttttgaccaagaacttgaagaccctgtcaaacatggcctttgacatggcaccgacggagtaggatacttggttgacattacgaccttgggtgacgaattcgttaccgaccttaattcttggtttgacaagagcttggtagagagctggggcttcaacacccaagagtttactaacacgttcaccttcttcggtaccgtctggttcagcctgttcttcacgacctctttgtttgaacttcatgcaacccatgtgcattacagcggcggtgatcttgtatacgttgtccttttcttcttgtgtgaaaccaaggatatcgaaggcttcatctgtaagtctacattcctcagcatcatctacgccaggaattgtagtttttccttgggcgacgaagttgtactcgttgatattgttagacaacaaacacttttctttaactccaggtacagatccagacatgatctggtagaagatgtggtaagatctttccaatggctgttgggaaatgacacgggccttttctagcagataagtttcaatatcagcaccagcaagtttaccagttgggccgaagtggatacggatgaatttaccgaaacgggaagagttatcgttacgcacggtcttggcgttaccgaaggcttcaagtacagggttagtttgtacaacttgatcttccaagttacctttcttttggttgggatcagcatctttcttagttgaggcaccgacggtggcgaagtaggcaattaccttcttcgtgttttcagttttaccggcaccagattcaccagtaatcaacatagattgattttcgtgattggtcaacatgttgacgtaggcaccgtcagaaatggcgaaaatgtggggtggtacttcattacgcctcttaccacggtacaacttggcacaacggttggtatatacagggaaacgtttgtaggggttaatggcgacacagaacaaacctgagtatgtgtagataagcttatggtaataacgttgttttaaattgtgcaatactgaagcgtcgttgaggtatgtcaaatttgacatatcctcggccttttcgtactttggaggattgacctgagttacttggtccttcttgaagttcttttcctctcctccaggaagaccaacggtgacaagatcacccttggttcctttgatttcaccaagcaagaaaccctccttgtcgtccggtacccagcaagattttttggcatcatagggcttagtttggtcgatacgtttctgttcgagagatacgaacaagtatggggtgggatctgggtcatccccctcttgtttttgtggtttaggcatggtgtacggacttagtcggggctatcgagacacgtaatgcagccctagagccttcgttcgaaagg

SEQ ID NO: 1366 - DNA, 6286 bp, Diabrotica virgifera
  SmartBlast Evalue=0; Info=Muscle myosin heavy chain n=1 Tax= Papilio xuthus RepID=B2DBI1_9NEOP
aacaatataacttttatgtttattggtgccttatatcatacaacattatcatacatacaatatcattatacaacctacatattttcataacaaaataattggcattttgagaaatgaagagatcaaagggctgtcttggtggtaaatacgtgtctctgaatactcccttcgttctcctttttctcgaacatttacggaatcatacaactctaatattcaaaaacgaaaataaaaaattaataaaagtaaaatcgcatagagttggttttgatgcgacctaaacagttcgtttgtttattaagattctaacacagcgcgcatgttcactcgaaatcaggtgctaagtcgaaccttggggggaatggaccacctagagcgtctcccattcccaaggtggggcgctgtctttggggcgctggactggctcctctagctgcagatcctgaacgtcccttggcacggaatttggcgatggcctgttcggcgaggtcggctctttcttcggcttcttcgagctcttgttgggctttacggaatttggccaagttcaaagcggcgatttcttcggcttcttctatctgtctcttgtaggtcttgatcttttgttggagtttgtcgacgaggtcttgcatcctctcgtggttcttgcggtcttcttcagcttggaagctaagttccttgatacgacgttcagactttctcaagttcttttgggcatccgcgtgccgcctttgttcaccgtctaattcattttctaattctctaacacgttgttccaatttggcaatagccttctttcctcctttaagggcattggcttcagcttcgtccaagcgtacttggaggtccttgatttgagcttcgagagctttacggagtttctcttgtgtttgggcatggtcttgttcagcgcggagttcatcagcgagacgagcggcatctaccatagccttcttggccttctcttcggagttcttggcttcgttgagaagttcgtcaaggtctgagtggagggtttgcaattcggtttccaatttcctcttggcggcagacaaggaagcgttttgggctccaagatcgttcaattgttcgtgagcatctcccaattcttgttcagcttggcgacgagcacggtcggcttgttcgagaagagtgcgagattcttcaagttcattttgaagagcgttagcacgacgttctgaaattccaagttgttcacgggcttcatcgcgagctctttgttcttcttcaagggcggtttgggtgtccttaagttgttgttggtagcgtttgatggtcttttgggcttcagcgttggccttgttagcgtggtccaaagcgatttccaattcattgatatcagcttccaacttcttcttcatgcgaagggcctcagccttacctttggcttcagcttcaagggaggcttgcatggagtcgagggcacgttggtgattcttgcgggtgttttcgaattcttcttctttctcttggatacgtctgtcgatttcttgacggacttgagaaagttcaagttggctacgaagtactttgttttcttcttgttcaagagcagcttcagcttcttcaagagcagcttggagttcatctttttcagcttccaagcgcttgcgggccttttcgatttcgtggatgttgcggccaccttctccaatttggtcaaggagatccttaacttcatcagcgaggttcttgttttcacggcggacagcttcaagttgttcttgtccttcttcgtaggcgcccttaagtctgaacaattcggtggagtagtttctgcattctttctgactggcatcgagttcagcagccaagtcatcaaccttgagtttccattctccaatgattttgtcgaaggccttttgtttcttctcagcagcattggcaatggcgttagcacggtcgacttcgagttgcaagtcttcgacttcagtggccaaacgttgtttggtcttttcaagagctacaaccttctggttgagagattcgatggtttcttcagcctcagcaagacgagcttggagtttcctcttagcttcttcgagttcttcagagcgagcaactccttcagattcgtatttctggcgccagagttgagattcagcgttggctttgctgagttgtctttggatatcagccttggcttcggcttcttcttcaacttgttcacggatgttgtccaagtcgtgttccaagtttctgaatttgccgaggagggtagcgcgttctctgctctcttcatcggccaatctcttggtatcttccaattgagtggtaagggataccttgatcttgctgagttgagatacttgagattcggcttcctcgagttgtctgaggaggtcggagttttcaatagacaacttcttcttggcggcatcgaagtcgttaagagtgcggttggtttcgtcaagtttgccttggacgtcgttgagttgttgtcccaattgtttggataccttttctatagcggccttttcgttggctaagtggtcgactgaagcacggaggtcattgagttcaccgaagtattgagacttttctttctcagccttggctttgagtttgttgagttggtcaatttgttcacccatttcagaaacagcgtcgttgtgcttcttgcggaggttagcaagagttccttcatgttggatgttggattcttcgaggtcacgacggagtttggcgagttcggcttcacgtttcttgttgagttcgatttgggctgaggtagcaccaccggcttcttcaagacgttcgccgagttcttccaattcgcgggccaaatcagcgcgttgtttctcagctttagcacgggcttgacgttcagcttcaacttcctcttcgagttcctcaatgcgagcctggagttccttaacttgtttttgttgtttaccaacaacggattgttcgtcttcgagtttggcagtgagtgatgagatttccttgtctttgcgttggatggtttgttcgagttccttcttgttgcgttccaagtcagctacagcctcttgggtgagtttcaagtcgccttcaaccttacgtttagatttttctacgtcaccacggagtttcttttcgcgttccaaagagtcttcgagttcgtccaaggtttgttccaacttagccttaactttgttgaggtggttgaccttgtcctcggcggcctggagttcttcagaaaccttctggttgttttcaccagacattttcttttccttgttgagcttgttgatgagttcgtcttggtgggcgatctcatcgttcaagttcctgatttggtgatccttggtggctttgtcttgttcagacttttggaggttgagttccaaatcttcgatgtctttcttgaaaccggacatttcttgttcgagtttcttcttttgttgcatcaactggttgcgagcatcttcctcttggctcaaacgatcttgggtttcagaaagttgagactcgaggtcgttcttttgggcttggagtttgttggccctttcttgagtttcggaaagggatcccttttctccttccaagttagataacaactcggtcttctcagctaagagcttggcatagagagcttctaattccttcttggccttttcttcacgctcgaaggcttcttgggctttttgggctttctcttcaagtttggcaatctcatcctcgatacgggtgacgttgaggagaggtctgaccttctgccacaatttgtaccatggccatgtgcgcaatttgaggtatttgcgcaagttgcgttggcacacttggagggccaaacgttgttcttgcagtttcttgaattcctttcttgagagataaccacggacccaagattgcatccaggtgacgatcttgccaagacggtcgtcacgaagttcttccatctgacccaagacaccagcacggaagaagaccttagtgtgacctagacggtataattcagcatccaaaccggaagcatcaagaatgtgttctgcgcatttctttggatcagattctttggaaactgcggctgggttgaggattttgtaacgaagtttgaagtcagggtagaccatcctgttggggaaacctttacggcaaatacggataccttcaagtacaccgttacatgtcagctggtgcattaccaagtgagagtcaatgacaccgggttgtttcaattcgttggggatgatacaacgtacgaagtgaggttgggtagatctcaaggtggtcatcaagttgttcaattgttccctgtataaactggaaacggtttggaaagcggaacccttggttctcttaccacctttttcggcagcaccaccagattgacctggatggtcggcgaagatttcgacaacgagggcattggaacccttcttgtacaagtcaacaacggtgtcgttcaagggatccttgttcttttccaaccaaccggttatattgtatggtacattaccggcataatggcccaaggtgaagtgagcagcttgctgacctggttttggtggttttggtttttggaagttgggtgatttgcccaagtggttggtgttcaatttttcctcaaaggtcttgtcggtagctttggggaacatagattcttcttcaaggatggacaagatacccataggcttttcaataagttcaatacaagcagccaagtccattccaaaatcaatgaaggtccattggataccttcagttttgtattcttcttgttcgagaacgaacatgtgatggttaaagaattgttgcaatttttcgttggtaaagttaatacacagttgttcaaaaccgttgtagtcgaagatttcaaaaccagcaatatccagtacaccaatgaagtgctgtctcttttgtttggtgtccaaagtttcgttacactttttgaccaagaacttgaagaccctgtcaaacatggcctttgacatggcaccgacggagtaggatacttggttgacattacgaccttgggtgacgaattcgttaccgaccttaattcttggtttgacaagagcttggtagagagctggggcttcaacacccaagagtttactaacacgttcaccttcttcggtaccgtctggttcagcctgttcttcacgacctctttgtttgaacttcatgcaacccatgtgcattacagcggcggtgatcttgtatacgttgtccttttcttcttgtgtgaaaccaaggatatcgaaggcttcatctgtaagtctacattcctcagcatcatctacgccaggaattgtagtttttccttgggcgacgaagttgtactcgttgatattgttagacaacaaacacttttctttaactccaggtacagatccagacatgatctggtagaagatgtggtaagatctttccaatggctgttgggaaatgacacgggccttttctagcagataagtttcaatatcagcaccagcaagtttaccagttgggccgaagtggatacggatgaatttaccgaaacgggaagagttatcgttacgcacggtcttggcgttaccgaaggcttcaagtacagggttagtttgtacaacttgatcttccaagttacctttcttttggttgggatcagcatctttcttagttgaggcaccgacggtggcgaagtaggcaattaccttcttcgtgttttcagttttaccggcaccagattcaccagtaatcaacatagattgattttcgtgattggtcaacatgttgacgtaggcaccgtcagaaatggcgaaaatgtggggtggtacttcattacgcctcttaccacggtacaacttggcacaacggttggtatatacagggaaacgtttgtaggggttaatggcgacacagaacaaacctgagtatgtgtagattagcttagcgtagtagcgttgtttcaaattatgtaagacagatgcgtcgtttaggtaggttaaatctgccatatcttcgactttttcgtatttgggaggattcacttggtgaacgttgtcttttttgaattgcttttcctctcctccaggaagaccaacggtgacaagatcacccttggttcctttgatttcaccaagcaagaaaccctccttgtcgtccggtacccagcaagattttttggcatcatagggcttagtttggtcgatacgtttctgttcgagagatacgaacaagtatggggtgggatctgggtcatccccctcttgtttttgtggtttaggcatggtgtacggacttagtcggggctatcgagacacgtaatgcagccctagagccttcgttcgaaagg

SEQ ID NO: 1367 - DNA, 6283 bp, Diabrotica virgifera
  SmartBlast Evalue=0; Info=Muscle myosin heavy chain n=1 Tax= Papilio xuthus RepID=B2DBI1_9NEOP
aacaatataacttttatgtttattggtgccttatatcatacaacattatcatacatacaatatcattatacaacctacatattttcataacaaaataattggcattttgagaaatgaagagatcaaagggctgtcttggtggtaaatacgtgtctctgaatactcccttcgttctcctttttctcgaacatttacggaatcatacaactctaatattcaaaaacgaaaataaaaaattaataaaagtaaaatcgcatagagttggttttgatgcgacctaaacagttcgtttgtttattaagattctaacacagcgcgcatgttcactcgaaatcaggtgctaagtcgaaccttggggggaatggaccacctagagcgtctcccattcccaaggtggggcgctgtctttggggcgctggactggctcctctagctgcagatcctgaacgtcccttggcacggaatttggcgatggcctgttcggcgaggtcggctctttcttcggcttcttcgagctcttgttgggctttacggaatttggccaagttcaaagcggcgatttcttcggcttcttctatctgtctcttgtaggtcttgatcttttgttggagtttgtcgacgaggtcttgcatcctctcgtggttcttgcggtcttcttcagcttggaagctaagttccttgatacgacgttcagactttctcaagttcttttgggcatccgcgtgccgcctttgttcaccgtctaattcattttctaattctctaacacgttgttccaatttggcaatagccttctttcctcctttaagggcattggcttcagcttcgtccaagcgtacttggaggtccttgatttgagcttcgagagctttacggagtttctcttgtgtttgggcatggtcttgttcagcgcggagttcatcagcgagacgagcggcatctaccatagccttcttggccttctcttcggagttcttggcttcgttgagaagttcgtcaaggtctgagtggagggtttgcaattcggtttccaatttcctcttggcggcagacaaggaagcgttttgggctccaagatcgttcaattgttcgtgagcatctcccaattcttgttcagcttggcgacgagcacggtcggcttgttcgagaagagtgcgagattcttcaagttcattttgaagagcgttagcacgacgttctgaaattccaagttgttcacgggcttcatcgcgagctctttgttcttcttcaagggcggtttgggtgtccttaagttgttgttggtagcgtttgatggtcttttgggcttcagcgttggccttgttagcgtggtccaaagcgatttccaattcattgatatcagcttccaacttcttcttcatgcgaagggcctcagccttacctttggcttcagcttcaagggaggcttgcatggagtcgagggcacgttggtgattcttgcgggtgttttcgaattcttcttctttctcttggatacgtctgtcgatttcttgacggacttgagaaagttcaagttggctacgaagtactttgttttcttcttgttcaagagcagcttcagcttcttcaagagcagcttggagttcatctttttcagcttccaagcgcttgcgggccttttcgatttcgtggatgttgcggccaccttctccaatttggtcaaggagatccttaacttcatcagcgaggttcttgttttcacggcggacagcttcaagttgttcttgtccttcttcgtaggcgcccttaagtctgaacaattcggtggagtagtttctgcattctttctgactggcatcgagttcagcagccaagtcatcaaccttgagtttccattctccaatgattttgtcgaaggccttttgtttcttctcagcagcattggcaatggcgttagcacggtcgacttcgagttgcaagtcttcgacttcagtggccaaacgttgtttggtcttttcaagagctacaaccttctggttgagagattcgatggtttcttcagcctcagcaagacgagcttggagtttcctcttagcttcttcgagttcttcagagcgagcaactccttcagattcgtatttctggcgccagagttgagattcagcgttggctttgctgagttgtctttggatatcagccttggcttcggcttcttcttcaacttgttcacggatgttgtccaagtcgtgttccaagtttctgaatttgccgaggagggtagcgcgttctctgctctcttcatcggccaatctcttggtatcttccaattgagtggtaagggataccttgatcttgctgagttgagatacttgagattcggcttcctcgagttgtctgaggaggtcggagttttcaatagacaacttcttcttggcggcatcgaagtcgttaagagtgcggttggtttcgtcaagtttgccttggacgtcgttgagttgttgtcccaattgtttggataccttttctatagcggccttttcgttggctaagtggtcgactgaagcacggaggtcattgagttcaccgaagtattgagacttttctttctcagccttggctttgagtttgttgagttggtcaatttgttcacccatttcagaaacagcgtcgttgtgcttcttgcggaggttagcaagagttccttcatgttggatgttggattcttcgaggtcacgacggagtttggcgagttcggcttcacgtttcttgttgagttcgatttgggctgaggtagcaccaccggcttcttcaagacgttcgccgagttcttccaattcgcgggccaaatcagcgcgttgtttctcagctttagcacgggcttgacgttcagcttcaacttcctcttcgagttcctcaatgcgagcctggagttccttaacttgtttttgttgtttaccaacaacggattgttcgtcttcgagtttggcagtgagtgatgagatttccttgtctttgcgttggatggtttgttcgagttccttcttgttgcgttccaagtcagctacagcctcttgggtgagtttcaagtcgccttcaaccttacgtttagatttttctacgtcaccacggagtttcttttcgcgttccaaagagtcttcgagttcgtccaaggtttgttccaacttagccttaactttgttgaggtggttgaccttgtcctcggcggcctggagttcttcagaaaccttctggttgttttcaccagacattttcttttccttgttgagcttgttgatgagttcgtcttggtgggcgatctcatcgttcaagttcctgatttggtgatccttggtggctttgtcttgttcagacttttggaggttgagttccaaatcttcgatgtctttcttgaaaccggacatttcttgttcgagtttcttcttttgttgcatcaactggttgcgagcatcttcctcttggctcaaacgatcttgggtttcagaaagttgagactcgaggtcgttcttttgggcttggagtttgttggccctttcttgagtttcggaaagggatcccttttctccttccaagttagataacaactcggtcttctcagctaagagcttggcatagagagcttctaattccttcttggccttttcttcacgctcgaaggcttcttgggctttttgggctttctcttcaagtttggcaatctcatcctcgatacgggtgacgttgaggagaggtctgaccttctgccacaatttgtaccatggccatgtgcgcaatttgaggtatttgcgcaagttgcgttggcacacttggagggccaaacgttgttcttgcagtttcttgaattcctttcttgagagataaccacggacccaagattgcatccaggtgacgatcttgccaagacggtcgtcacgaagttcttccatctgacccaagacaccagcacggaagaagaccttcgttttacccaatcggtattgctcagcatcaagttgaacgttctccaatataatttgtgctgctttttcaggtgtcatagtatctttgatttgacttgcggccagaattttgtatcgaagtttgaagtcagggtagaccatcctgttggggaaacctttacggcaaatacggataccttcaagtacaccgttacatgtcagctggtgcattaccaagtgagagtcaatgacaccgggttgtttcaattcgttggggatgatacaacgtacgaagtgaggttgggtagatctcaaggtggtcatcaagttgttcaattgttccttgtatgcagaagatactgtggcaaaaccaccacccttcttaccacgacctttttcggcagcaccaccagattgacctggatggtcggcgaagatttcgacaacgagggcattggaacccttcttgtacaagtcaacaacggtgtcgttcaagggatccttgttcttttccaaccaaccggttatattgtatggtacattaccggcataatggcccaaggtgaagtgagcagcttgctgacctggttttggtggttttggtttttggaagttgggtgatttgcccaagtggttggtgttcaatttttcctcaaaggtcttgtcggtagctttggggaacatagattcttcttcaaggatggacaagatacccataggcttttcaataagttcaatacaagcagccaagtccattccaaaatcaatgaaggtccattggataccttcagttttgtattcttcttgttcgagaacgaacatgtgatggttaaagaattgttgcaatttttcgttggtaaagttaatacacagttgttcaaaaccgttgtagtcgaagatttcaaaaccagcaatatccagtacaccaatgaagtgctgtctcttttgtttggtgtccaaagtttcgttacactttttgaccaagaacttgaagaccctgtcaaacatggcctttgacatggcaccgacggagtaggatacttggttgacattacgaccttgggtgacgaattcgttaccgaccttaattcttggtttgacaagagcttggtagagagctggggcttcaacacccaagagtttactaacacgttcaccttcttcggtaccgtctggttcagcctgttcttcacgacctctttgtttgaacttcatgcaacccatgtgcattacagcggcggtgatcttgtatacgttgtccttttcttcttgtgtgaaaccaaggatatcgaaggcttcatctgtaagtctacattcctcagcatcatctacgccaggaattgtagtttttccttgggcgacgaagttgtactcgttgatattgttagacaacaaacacttttctttaactccaggtacagatccagacatgatctggtagaagatgtggtaagatctttccaatggctgttgggaaatgacacgggccttttctagcagataagtttcaatatcagcaccagcaagtttaccagttgggccgaagtggatacggatgaatttaccgaaacgggaagagttatcgttacgcacggtcttggcgttaccgaaggcttcaagtacagggttagtttgtacaacttgatcttccaagttacctttcttttggttgggatcagcatctttcttagttgaggcaccgacggtggcgaagtaggcaattaccttcttcgtgttttcagttttaccggcaccagattcaccagtaatcaacatagattgattttcgtgattggtcaacatgttgacgtaggcaccgtcagaaatggcgaaaatgtggggtggtacttcattacgcctcttaccacggtacaacttggcacaacggttggtatatacagggaaacgtttgtaggggttaatggcgacacagaacaaacctgagtatgtgtagattagcttagcgtagtagcgttgtttcaaattatgtaagacagatgcgtcgtttaggtaggttaaatctgccatatcttcgactttttcgtatttgggaggattcacttggtgaacgttgtcttttttgaattgcttttcctctcctccaggaagaccaacggtgacaagatcacccttggttcctttgatttcaccaagcaagaaaccctccttgtcgtccggtacccagcaagattttttggcatcatagggcttagtttggtcgatacgtttctgttcgagagatacgaacaagtatggggtgggatctgggtcatccccctcttgtttttgtggtttaggcatggtgtacggacttagtcggggctatcgagacacgtaatgcagccctagagccttcgttcgaaagg

SEQ ID NO: 1368 - DNA, 6286 bp, Diabrotica virgifera
  SmartBlast Evalue=0; Info=Muscle myosin heavy chain n=1 Tax= Papilio xuthus RepID=B2DBI1_9NEOP
aacaatataacttttatgtttattggtgccttatatcatacaacattatcatacatacaatatcattatacaacctacatattttcataacaaaataattggcattttgagaaatgaagagatcaaagggctgtcttggtggtaaatacgtgtctctgaatactcccttcgttctcctttttctcgaacatttacggaatcatacaactctaatattcaaaaacgaaaataaaaaattaataaaagtaaaatcgcatagagttggttttgatgcgacctaaacagttcgtttgtttattaagattctaacacagcgcgcatgttcactcgaaatcaggtgctaagtcgaaccttggggggaatggaccacctagagcgtctcccattcccaaggtggggcgctgtctttggggcgctggactggctcctctagctgcagatcctgaacgtcccttggcacggaatttggcgatggcctgttcggcgaggtcggctctttcttcggcttcttcgagctcttgttgggctttacggaatttggccaagttcaaagcggcgatttcttcggcttcttctatctgtctcttgtaggtcttgatcttttgttggagtttgtcgacgaggtcttgcatcctctcgtggttcttgcggtcttcttcagcttggaagctaagttccttgatacgacgttcagactttctcaagttcttttgggcatccgcgtgccgcctttgttcaccgtctaattcattttctaattctctaacacgttgttccaatttggcaatagccttctttcctcctttaagggcattggcttcagcttcgtccaagcgtacttggaggtccttgatttgagcttcgagagctttacggagtttctcttgtgtttgggcatggtcttgttcagcgcggagttcatcagcgagacgagcggcatctaccatagccttcttggccttctcttcggagttcttggcttcgttgagaagttcgtcaaggtctgagtggagggtttgcaattcggtttccaatttcctcttggcggcagacaaggaagcgttttgggctccaagatcgttcaattgttcgtgagcatctcccaattcttgttcagcttggcgacgagcacggtcggcttgttcgagaagagtgcgagattcttcaagttcattttgaagagcgttagcacgacgttctgaaattccaagttgttcacgggcttcatcgcgagctctttgttcttcttcaagggcggtttgggtgtccttaagttgttgttggtagcgtttgatggtcttttgggcttcagcgttggccttgttagcgtggtccaaagcgatttccaattcattgatatcagcttccaacttcttcttcatgcgaagggcctcagccttacctttggcttcagcttcaagggaggcttgcatggagtcgagggcacgttggtgattcttgcgggtgttttcgaattcttcttctttctcttggatacgtctgtcgatttcttgacggacttgagaaagttcaagttggctacgaagtactttgttttcttcttgttcaagagcagcttcagcttcttcaagagcagcttggagttcatctttttcagcttccaagcgcttgcgggccttttcgatttcgtggatgttgcggccaccttctccaatttggtcaaggagatccttaacttcatcagcgaggttcttgttttcacggcggacagcttcaagttgttcttgtccttcttcgtaggcgcccttaagtctgaacaattcggtggagtagtttctgcattctttctgactggcatcgagttcagcagccaagtcatcaaccttgagtttccattctccaatgattttgtcgaaggccttttgtttcttctcagcagcattggcaatggcgttagcacggtcgacttcgagttgcaagtcttcgacttcagtggccaaacgttgtttggtcttttcaagagctacaaccttctggttgagagattcgatggtttcttcagcctcagcaagacgagcttggagtttcctcttagcttcttcgagttcttcagagcgagcaactccttcagattcgtatttctggcgccagagttgagattcagcgttggctttgctgagttgtctttggatatcagccttggcttcggcttcttcttcaacttgttcacggatgttgtccaagtcgtgttccaagtttctgaatttgccgaggagggtagcgcgttctctgctctcttcatcggccaatctcttggtatcttccaattgagtggtaagggataccttgatcttgctgagttgagatacttgagattcggcttcctcgagttgtctgaggaggtcggagttttcaatagacaacttcttcttggcggcatcgaagtcgttaagagtgcggttggtttcgtcaagtttgccttggacgtcgttgagttgttgtcccaattgtttggataccttttctatagcggccttttcgttggctaagtggtcgactgaagcacggaggtcattgagttcaccgaagtattgagacttttctttctcagccttggctttgagtttgttgagttggtcaatttgttcacccatttcagaaacagcgtcgttgtgcttcttgcggaggttagcaagagttccttcatgttggatgttggattcttcgaggtcacgacggagtttggcgagttcggcttcacgtttcttgttgagttcgatttgggctgaggtagcaccaccggcttcttcaagacgttcgccgagttcttccaattcgcgggccaaatcagcgcgttgtttctcagctttagcacgggcttgacgttcagcttcaacttcctcttcgagttcctcaatgcgagcctggagttccttaacttgtttttgttgtttaccaacaacggattgttcgtcttcgagtttggcagtgagtgatgagatttccttgtctttgcgttggatggtttgttcgagttccttcttgttgcgttccaagtcagctacagcctcttgggtgagtttcaagtcgccttcaaccttacgtttagatttttctacgtcaccacggagtttcttttcgcgttccaaagagtcttcgagttcgtccaaggtttgttccaacttagccttaactttgttgaggtggttgaccttgtcctcggcggcctggagttcttcagaaaccttctggttgttttcaccagacattttcttttccttgttgagcttgttgatgagttcgtcttggtgggcgatctcatcgttcaagttcctgatttggtgatccttggtggctttgtcttgttcagacttttggaggttgagttccaaatcttcgatgtctttcttgaaaccggacatttcttgttcgagtttcttcttttgttgcatcaactggttgcgagcatcttcctcttggctcaaacgatcttgggtttcagaaagttgagactcgaggtcgttcttttgggcttggagtttgttggccctttcttgagtttcggaaagggatcccttttctccttccaagttagataacaactcggtcttctcagctaagagcttggcatagagagcttctaattccttcttggccttttcttcacgctcgaaggcttcttgggctttttgggctttctcttcaagtttggcaatctcatcctcgatacgggtgacgttgaggagaggtctgaccttctgccacaatttgtaccatggccatgtgcgcaatttgaggtatttgcgcaagttgcgttggcacacttggagggccaaacgttgttcttgcagtttcttgaattcctttcttgagagataaccacggacccaagattgcatccaggtgacgatcttgccaagacggtcgtcacgaagttcttccatctgacccaagacaccagcacggaagaagaccttcgttttacccaatcggtattgctcagcatcaagttgaacgttctccaatataatttgtgctgctttttcaggtgtcatagtatctttgatttgacttgcggccagaattttgtatcgaagtttgaagtcagggtagaccatcctgttggggaaacctttacggcaaatacggataccttcaagtacaccgttacatgtcagctggtgcattaccaagtgagagtcaatgacaccgggttgtttcaattcgttggggatgatacaacgtacgaagtgaggttgggtagatctcaaggtggtcatcaagttgttcaattgttccctgtataaactggaaacggtttggaaagcggaacccttggttctcttaccacctttttcggcagcaccaccagattgacctggatggtcggcgaagatttcgacaacgagggcattggaacccttcttgtacaagtcaacaacggtgtcgttcaagggatccttgttcttttccaaccaaccggttatattgtatggtacattaccggcataatggcccaaggtgaagtgagcagcttgctgacctggttttggtggttttggtttttggaagttgggtgatttgcccaagtggttggtgttcaatttttcctcaaaggtcttgtcggtagctttggggaacatagattcttcttcaaggatggacaagatacccataggcttttcgataagttcgatacaggcagctaagtccataccgaaatcaataaaagcccattcaataccctctctttggtattcttcttgttcaagtacaaacatgtggtggttaaagaactgttgcaacttttcattggtaaagttgatacaaagctgctcaaagccgttgaagtcgaagatttcaaaaccagcaatatccagtacaccaatgaagtgctgtctcttttgtttggtgtccaaagtttcgttacactttttgaccaagaacttgaagaccctgtcaaacatggcctttgacatggcaccgacggagtaggatacttggttgacattacgaccttgggtgacgaattcgttaccgaccttaattcttggtttgacaagagcttggtagagagctggggcttcaacacccaagagtttactaacacgttcaccttcttcggtaccgtctggttcagcctgttcttcacgacctctttgtttgaacttcatgcaacccatgtgcattacagcggcggtgatcttgtatacgttgtccttttcttcttgtgtgaaaccaaggatatcgaaggcttcatctgtaagtctacattcctcagcatcatctacgccaggaattgtagtttttccttgggcgacgaagttgtactcgttgatattgttagacaacaaacacttttctttaactccaggtacagatccagacatgatctggtagaagatgtggtaagatctttccaatggctgttgggaaatgacacgggccttttctagcagataagtttcaatatcagcaccagcaagtttaccagttgggccgaagtggatacggatgaatttaccgaaacgggaagagttatcgttacgcacggtcttggcgttaccgaaggcttcaagtacagggttagtttgtacaacttgatcttccaagttacctttcttttggttgggatcagcatctttcttagttgaggcaccgacggtggcgaagtaggcaattaccttcttcgtgttttcagttttaccggcaccagattcaccagtaatcaacatagattgattttcgtgattggtcaacatgttgacgtaggcaccgtcagaaatggcgaaaatgtggggtggtacttcattacgcctcttaccacggtacaacttggcacaacggttggtatatacagggaaacgtttgtaggggttaatggcgacacagaacaaacctgagtatgtgtagataagcttatggtaataacgttgttttaaattgtgcaatactgaagcgtcgttgaggtatgtcaaatttgacatatcctcggccttttcgtactttggaggattgacctgagttacttggtccttcttgaagttcttttcctctcctccaggaagaccaacggtgacaagatcacccttggttcctttgatttcaccaagcaagaaaccctccttgtcgtccggtacccagcaagattttttggcatcatagggcttagtttggtcgatacgtttctgttcgagagatacgaacaagtatggggtgggatctgggtcatccccctcttgtttttgtggtttaggcatggtgtacggacttagtcggggctatcgagacacgtaatgcagccctagagccttcgttcgaaagg

SEQ ID NO: 1369 - DNA, 6286 bp, Diabrotica virgifera
  SmartBlast Evalue=0; Info=Muscle myosin heavy chain n=1 Tax= Papilio xuthus RepID=B2DBI1_9NEOP
aacaatataacttttatgtttattggtgccttatatcatacaacattatcatacatacaatatcattatacaacctacatattttcataacaaaataattggcattttgagaaatgaagagatcaaagggctgtcttggtggtaaatacgtgtctctgaatactcccttcgttctcctttttctcgaacatttacggaatcatacaactctaatattcaaaaacgaaaataaaaaattaataaaagtaaaatcgcatagagttggttttgatgcgacctaaacagttcgtttgtttattaagattctaacacagcgcgcatgttcactcgaaatcaggtgctaagtcgaaccttggggggaatggaccacctagagcgtctcccattcccaaggtggggcgctgtctttggggcgctggactggctcctctagctgcagatcctgaacgtcccttggcacggaatttggcgatggcctgttcggcgaggtcggctctttcttcggcttcttcgagctcttgttgggctttacggaatttggccaagttcaaagcggcgatttcttcggcttcttctatctgtctcttgtaggtcttgatcttttgttggagtttgtcgacgaggtcttgcatcctctcgtggttcttgcggtcttcttcagcttggaagctaagttccttgatacgacgttcagactttctcaagttcttttgggcatccgcgtgccgcctttgttcaccgtctaattcattttctaattctctaacacgttgttccaatttggcaatagccttctttcctcctttaagggcattggcttcagcttcgtccaagcgtacttggaggtccttgatttgagcttcgagagctttacggagtttctcttgtgtttgggcatggtcttgttcagcgcggagttcatcagcgagacgagcggcatctaccatagccttcttggccttctcttcggagttcttggcttcgttgagaagttcgtcaaggtctgagtggagggtttgcaattcggtttccaatttcctcttggcggcagacaaggaagcgttttgggctccaagatcgttcaattgttcgtgagcatctcccaattcttgttcagcttggcgacgagcacggtcggcttgttcgagaagagtgcgagattcttcaagttcattttgaagagcgttagcacgacgttctgaaattccaagttgttcacgggcttcatcgcgagctctttgttcttcttcaagggcggtttgggtgtccttaagttgttgttggtagcgtttgatggtcttttgggcttcagcgttggccttgttagcgtggtccaaagcgatttccaattcattgatatcagcttccaacttcttcttcatgcgaagggcctcagccttacctttggcttcagcttcaagggaggcttgcatggagtcgagggcacgttggtgattcttgcgggtgttttcgaattcttcttctttctcttggatacgtctgtcgatttcttgacggacttgagaaagttcaagttggctacgaagtactttgttttcttcttgttcaagagcagcttcagcttcttcaagagcagcttggagttcatctttttcagcttccaagcgcttgcgggccttttcgatttcgtggatgttgcggccaccttctccaatttggtcaaggagatccttaacttcatcagcgaggttcttgttttcacggcggacagcttcaagttgttcttgtccttcttcgtaggcgcccttaagtctgaacaattcggtggagtagtttctgcattctttctgactggcatcgagttcagcagccaagtcatcaaccttgagtttccattctccaatgattttgtcgaaggccttttgtttcttctcagcagcattggcaatggcgttagcacggtcgacttcgagttgcaagtcttcgacttcagtggccaaacgttgtttggtcttttcaagagctacaaccttctggttgagagattcgatggtttcttcagcctcagcaagacgagcttggagtttcctcttagcttcttcgagttcttcagagcgagcaactccttcagattcgtatttctggcgccagagttgagattcagcgttggctttgctgagttgtctttggatatcagccttggcttcggcttcttcttcaacttgttcacggatgttgtccaagtcgtgttccaagtttctgaatttgccgaggagggtagcgcgttctctgctctcttcatcggccaatctcttggtatcttccaattgagtggtaagggataccttgatcttgctgagttgagatacttgagattcggcttcctcgagttgtctgaggaggtcggagttttcaatagacaacttcttcttggcggcatcgaagtcgttaagagtgcggttggtttcgtcaagtttgccttggacgtcgttgagttgttgtcccaattgtttggataccttttctatagcggccttttcgttggctaagtggtcgactgaagcacggaggtcattgagttcaccgaagtattgagacttttctttctcagccttggctttgagtttgttgagttggtcaatttgttcacccatttcagaaacagcgtcgttgtgcttcttgcggaggttagcaagagttccttcatgttggatgttggattcttcgaggtcacgacggagtttggcgagttcggcttcacgtttcttgttgagttcgatttgggctgaggtagcaccaccggcttcttcaagacgttcgccgagttcttccaattcgcgggccaaatcagcgcgttgtttctcagctttagcacgggcttgacgttcagcttcaacttcctcttcgagttcctcaatgcgagcctggagttccttaacttgtttttgttgtttaccaacaacggattgttcgtcttcgagtttggcagtgagtgatgagatttccttgtctttgcgttggatggtttgttcgagttccttcttgttgcgttccaagtcagctacagcctcttgggtgagtttcaagtcgccttcaaccttacgtttagatttttctacgtcaccacggagtttcttttcgcgttccaaagagtcttcgagttcgtccaaggtttgttccaacttagccttaactttgttgaggtggttgaccttgtcctcggcggcctggagttcttcagaaaccttctggttgttttcaccagacattttcttttccttgttgagcttgttgatgagttcgtcttggtgggcgatctcatcgttcaagttcctgatttggtgatccttggtggctttgtcttgttcagacttttggaggttgagttccaaatcttcgatgtctttcttgaaaccggacatttcttgttcgagtttcttcttttgttgcatcaactggttgcgagcatcttcctcttggctcaaacgatcttgggtttcagaaagttgagactcgaggtcgttcttttgggcttggagtttgttggccctttcttgagtttcggaaagggatcccttttctccttccaagttagataacaactcggtcttctcagctaagagcttggcatagagagcttctaattccttcttggccttttcttcacgctcgaaggcttcttgggctttttgggctttctcttcaagtttggcaatctcatcctcgatacgggtgacgttgaggagaggtctgaccttctgccacaatttgtaccatggccatgtgcgcaatttgaggtatttgcgcaagttgcgttggcacacttggagggccaaacgttgttcttgcagtttcttgaattcctttcttgagagataaccacggacccaagattgcatccaggtgacgatcttgccaagacggtcgtcacgaagttcttccatctgacccaagacaccagcacggaagaagaccttagtgtgacctagacggtataattcagcatccaaaccggaagcatcaagaatgtgttctgcgcatttctttggatcagattctttggaaactgcggctgggttgaggattttgtaacgaagtttgaagtcagggtagaccatcctgttggggaaacctttacggcaaatacggataccttcaagtacaccgttacatgtcagctggtgcattaccaagtgagagtcaatgacaccgggttgtttcaattcgttggggatgatacaacgtacgaagtgaggttgggtagatctcaaggtggtcatcaagttgttcaattgttccctgtataaactggaaacggtttggaaagcggaacccttggttctcttaccacctttttcggcagcaccaccagattgacctggatggtcggcgaagatttcgacaacgagggcattggaacccttcttgtacaagtcaacaacggtgtcgttcaagggatccttgttcttttccaaccaaccggttatattgtatggtacattaccggcataatggcccaaggtgaagtgagcagcttgctgacctggttttggtggttttggtttttggaagttgggtgatttgcccaagtggttggtgttcaatttttcctcaaaggtcttgtcggtagctttggggaacatagattcttcttcaaggatggacaagatacccataggcttttcgataagttcgatacaggcagctaagtccataccgaaatcaataaaagcccattcaataccctctctttggtattcttcttgttcaagtacaaacatgtggtggttaaagaactgttgcaacttttcattggtaaagttgatacaaagctgctcaaagccgttgaagtcgaagatttcaaaaccagcaatatccagtacaccaatgaagtgctgtctcttttgtttggtgtccaaagtttcgttacactttttgaccaagaacttgaagaccctgtcaaacatggcctttgacatggcaccgacggagtaggatacttggttgacattacgaccttgggtgacgaattcgttaccgaccttaattcttggtttgacaagagcttggtagagagctggggcttcaacacccaagagtttactaacacgttcaccttcttcggtaccgtctggttcagcctgttcttcacgacctctttgtttgaacttcatgcaacccatgtgcattacagcggcggtgatcttgtatacgttgtccttttcttcttgtgtgaaaccaaggatatcgaaggcttcatctgtaagtctacattcctcagcatcatctacgccaggaattgtagtttttccttgggcgacgaagttgtactcgttgatattgttagacaacaaacacttttctttaactccaggtacagatccagacatgatctggtagaagatgtggtaagatctttccaatggctgttgggaaatgacacgggccttttctagcagataagtttcaatatcagcaccagcaagtttaccagttgggccgaagtggatacggatgaatttaccgaaacgggaagagttatcgttacgcacggtcttggcgttaccgaaggcttcaagtacagggttagtttgtacaacttgatcttccaagttacctttcttttggttgggatcagcatctttcttagttgaggcaccgacggtggcgaagtaggcaattaccttcttcgtgttttcagttttaccggcaccagattcaccagtaatcaacatagattgattttcgtgattggtcaacatgttgacgtaggcaccgtcagaaatggcgaaaatgtggggtggtacttcattacgcctcttaccacggtacaacttggcacaacggttggtatatacagggaaacgtttgtaggggttaatggcgacacagaacaaacctgagtatgtgtagattagcttagcgtagtagcgttgtttcaaattatgtaagacagatgcgtcgtttaggtaggttaaatctgccatatcttcgactttttcgtatttgggaggattcacttggtgaacgttgtcttttttgaattgcttttcctctcctccaggaagaccaacggtgacaagatcacccttggttcctttgatttcaccaagcaagaaaccctccttgtcgtccggtacccagcaagattttttggcatcatagggcttagtttggtcgatacgtttctgttcgagagatacgaacaagtatggggtgggatctgggtcatccccctcttgtttttgtggtttaggcatggtgtacggacttagtcggggctatcgagacacgtaatgcagccctagagccttcgttcgaaagg

SEQ ID NO: 1370 - DNA, 6286 bp, Diabrotica virgifera
  SmartBlast Evalue=0; Info=Muscle myosin heavy chain n=1 Tax= Papilio xuthus RepID=B2DBI1_9NEOP
aacaatataacttttatgtttattggtgccttatatcatacaacattatcatacatacaatatcattatacaacctacatattttcataacaaaataattggcattttgagaaatgaagagatcaaagggctgtcttggtggtaaatacgtgtctctgaatactcccttcgttctcctttttctcgaacatttacggaatcatacaactctaatattcaaaaacgaaaataaaaaattaataaaagtaaaatcgcatagagttggttttgatgcgacctaaacagttcgtttgtttattaagattctaacacagcgcgcatgttcactcgaaatcaggtgctaagtcgaaccttggggggaatggaccacctagagcgtctcccattcccaaggtggggcgctgtctttggggcgctggactggctcctctagctgcagatcctgaacgtcccttggcacggaatttggcgatggcctgttcggcgaggtcggctctttcttcggcttcttcgagctcttgttgggctttacggaatttggccaagttcaaagcggcgatttcttcggcttcttctatctgtctcttgtaggtcttgatcttttgttggagtttgtcgacgaggtcttgcatcctctcgtggttcttgcggtcttcttcagcttggaagctaagttccttgatacgacgttcagactttctcaagttcttttgggcatccgcgtgccgcctttgttcaccgtctaattcattttctaattctctaacacgttgttccaatttggcaatagccttctttcctcctttaagggcattggcttcagcttcgtccaagcgtacttggaggtccttgatttgagcttcgagagctttacggagtttctcttgtgtttgggcatggtcttgttcagcgcggagttcatcagcgagacgagcggcatctaccatagccttcttggccttctcttcggagttcttggcttcgttgagaagttcgtcaaggtctgagtggagggtttgcaattcggtttccaatttcctcttggcggcagacaaggaagcgttttgggctccaagatcgttcaattgttcgtgagcatctcccaattcttgttcagcttggcgacgagcacggtcggcttgttcgagaagagtgcgagattcttcaagttcattttgaagagcgttagcacgacgttctgaaattccaagttgttcacgggcttcatcgcgagctctttgttcttcttcaagggcggtttgggtgtccttaagttgttgttggtagcgtttgatggtcttttgggcttcagcgttggccttgttagcgtggtccaaagcgatttccaattcattgatatcagcttccaacttcttcttcatgcgaagggcctcagccttacctttggcttcagcttcaagggaggcttgcatggagtcgagggcacgttggtgattcttgcgggtgttttcgaattcttcttctttctcttggatacgtctgtcgatttcttgacggacttgagaaagttcaagttggctacgaagtactttgttttcttcttgttcaagagcagcttcagcttcttcaagagcagcttggagttcatctttttcagcttccaagcgcttgcgggccttttcgatttcgtggatgttgcggccaccttctccaatttggtcaaggagatccttaacttcatcagcgaggttcttgttttcacggcggacagcttcaagttgttcttgtccttcttcgtaggcgcccttaagtctgaacaattcggtggagtagtttctgcattctttctgactggcatcgagttcagcagccaagtcatcaaccttgagtttccattctccaatgattttgtcgaaggccttttgtttcttctcagcagcattggcaatggcgttagcacggtcgacttcgagttgcaagtcttcgacttcagtggccaaacgttgtttggtcttttcaagagctacaaccttctggttgagagattcgatggtttcttcagcctcagcaagacgagcttggagtttcctcttagcttcttcgagttcttcagagcgagcaactccttcagattcgtatttctggcgccagagttgagattcagcgttggctttgctgagttgtctttggatatcagccttggcttcggcttcttcttcaacttgttcacggatgttgtccaagtcgtgttccaagtttctgaatttgccgaggagggtagcgcgttctctgctctcttcatcggccaatctcttggtatcttccaattgagtggtaagggataccttgatcttgctgagttgagatacttgagattcggcttcctcgagttgtctgaggaggtcggagttttcaatagacaacttcttcttggcggcatcgaagtcgttaagagtgcggttggtttcgtcaagtttgccttggacgtcgttgagttgttgtcccaattgtttggataccttttctatagcggccttttcgttggctaagtggtcgactgaagcacggaggtcattgagttcaccgaagtattgagacttttctttctcagccttggctttgagtttgttgagttggtcaatttgttcacccatttcagaaacagcgtcgttgtgcttcttgcggaggttagcaagagttccttcatgttggatgttggattcttcgaggtcacgacggagtttggcgagttcggcttcacgtttcttgttgagttcgatttgggctgaggtagcaccaccggcttcttcaagacgttcgccgagttcttccaattcgcgggccaaatcagcgcgttgtttctcagctttagcacgggcttgacgttcagcttcaacttcctcttcgagttcctcaatgcgagcctggagttccttaacttgtttttgttgtttaccaacaacggattgttcgtcttcgagtttggcagtgagtgatgagatttccttgtctttgcgttggatggtttgttcgagttccttcttgttgcgttccaagtcagctacagcctcttgggtgagtttcaagtcgccttcaaccttacgtttagatttttctacgtcaccacggagtttcttttcgcgttccaaagagtcttcgagttcgtccaaggtttgttccaacttagccttaactttgttgaggtggttgaccttgtcctcggcggcctggagttcttcagaaaccttctggttgttttcaccagacattttcttttccttgttgagcttgttgatgagttcgtcttggtgggcgatctcatcgttcaagttcctgatttggtgatccttggtggctttgtcttgttcagacttttggaggttgagttccaaatcttcgatgtctttcttgaaaccggacatttcttgttcgagtttcttcttttgttgcatcaactggttgcgagcatcttcctcttggctcaaacgatcttgggtttcagaaagttgagactcgaggtcgttcttttgggcttggagtttgttggccctttcttgagtttcggaaagggatcccttttctccttccaagttagataacaactcggtcttctcagctaagagcttggcatagagagcttctaattccttcttggccttttcttcacgctcgaaggcttcttgggctttttgggctttctcttcaagtttggcaatctcatcctcgatacgggtgacgttgaggagaggtctgaccttctgccacaatttgtaccatggccatgtgcgcaatttgaggtatttgcgcaagttgcgttggcacacttggagggccaaacgttgttcttgcagtttcttgaattcctttcttgagagataaccacggacccaagattgcatccaggtgacgatcttgccaagacggtcgtcacgaagttcttccatctgacccaagacaccagcacggaagaagaccttagtgtgacctagacggtataattcagcatccaaaccggaagcatcaagaatgtgttctgcgcatttctttggatcagattctttggaaactgcggctgggttgaggattttgtaacgaagtttgaagtcagggtagaccatcctgttggggaaacctttacggcaaatacggataccttcaagtacaccgttacatgtcagctggtgcattaccaagtgagagtcaatgacaccgggttgtttcaattcgttggggatgatacaacgtacgaagtgaggttgggtagatctcaaggtggtcatcaagttgttcaattgttccctgtataaactggaaacggtttggaaagcggaacccttggttctcttaccacctttttcggcagcaccaccagattgacctggatggtcggcgaagatttcgacaacgagggcattggaacccttcttgtacaagtcaacaacggtgtcgttcaagggatccttgttcttttccaaccaaccggttatattgtatggtacattaccggcataatggcccaaggtgaagtgagcagcttgctgacctggttttggtggttttggtttttggaagttgggtgatttgcccaagtggttggtgttcaatttttcctcaaaggtcttgtcggtagctttggggaacatagattcttcttcaaggatggacaagatacccataggcttttcaataagttcaatacaagcagccaagtccattccaaaatcaatgaaggtccattggataccttcagttttgtattcttcttgttcgagaacgaacatgtgatggttaaagaattgttgcaatttttcgttggtaaagttaatacacagttgttcaaaaccgttgtagtcgaagatttcaaaaccagcaatatccagtacaccaatgaagtgctgtctcttttgtttggtgtccaaagtttcgttacactttttgaccaagaacttgaagaccctgtcaaacatggcctttgacatggcaccgacggagtaggatacttggttgacattacgaccttgggtgacgaattcgttaccgaccttaattcttggtttgacaagagcttggtagagagctggggcttcaacacccaagagtttactaacacgttcaccttcttcggtaccgtctggttcagcctgttcttcacgacctctttgtttgaacttcatgcaacccatgtgcattacagcggcggtgatcttgtatacgttgtccttttcttcttgtgtgaaaccaaggatatcgaaggcttcatctgtaagtctacattcctcagcatcatctacgccaggaattgtagtttttccttgggcgacgaagttgtactcgttgatattgttagacaacaaacacttttctttaactccaggtacagatccagacatgatctggtagaagatgtggtaagatctttccaatggctgttgggaaatgacacgggccttttctagcagataagtttcaatatcagcaccagcaagtttaccagttgggccgaagtggatacggatgaatttaccgaaacgggaagagttatcgttacgcacggtcttggcgttaccgaaggcttcaagtacagggttagtttgtacaacttgatcttccaagttacctttcttttggttgggatcagcatctttcttagttgaggcaccgacggtggcgaagtaggcaattaccttcttcgtgttttcagttttaccggcaccagattcaccagtaatcaacatagattgattttcgtgattggtcaacatgttgacgtaggcaccgtcagaaatggcgaaaatgtggggtggtacttcattacgcctcttaccacggtacaacttggcacaacggttggtatatacagggaaacgtttgtaggggttaatggcgacacagaacaaacctgagtatgtgtagataagcttatggtaataacgttgttttaaattgtgcaatactgaagcgtcgttgaggtatgtcaaatttgacatatcctcggccttttcgtactttggaggattgacctgagttacttggtccttcttgaagttcttttcctctcctccaggaagaccaacggtgacaagatcacccttggttcctttgatttcaccaagcaagaaaccctccttgtcgtccggtacccagcaagattttttggcatcatagggcttagtttggtcgatacgtttctgttcgagagatacgaacaagtatggggtgggatctgggtcatccccctcttgtttttgtggtttaggcatggtgtacggacttagtcggggctatcgagacacgtaatgcagccctagagccttcgttcgaaagg

SEQ ID NO: 1371 - DNA, 6283 bp, Diabrotica virgifera
  SmartBlast Evalue=0; Info=Muscle myosin heavy chain n=1 Tax= Papilio xuthus RepID=B2DBI1_9NEOP
aacaatataacttttatgtttattggtgccttatatcatacaacattatcatacatacaatatcattatacaacctacatattttcataacaaaataattggcattttgagaaatgaagagatcaaagggctgtcttggtggtaaatacgtgtctctgaatactcccttcgttctcctttttctcgaacatttacggaatcatacaactctaatattcaaaaacgaaaataaaaaattaataaaagtaaaatcgcatagagttggttttgatgcgacctaaacagttcgtttgtttattaagattctaacacagcgcgcatgttcactcgaaatcaggtgctaagtcgaaccttggggggaatggaccacctagagcgtctcccattcccaaggtggggcgctgtctttggggcgctggactggctcctctagctgcagatcctgaacgtcccttggcacggaatttggcgatggcctgttcggcgaggtcggctctttcttcggcttcttcgagctcttgttgggctttacggaatttggccaagttcaaagcggcgatttcttcggcttcttctatctgtctcttgtaggtcttgatcttttgttggagtttgtcgacgaggtcttgcatcctctcgtggttcttgcggtcttcttcagcttggaagctaagttccttgatacgacgttcagactttctcaagttcttttgggcatccgcgtgccgcctttgttcaccgtctaattcattttctaattctctaacacgttgttccaatttggcaatagccttctttcctcctttaagggcattggcttcagcttcgtccaagcgtacttggaggtccttgatttgagcttcgagagctttacggagtttctcttgtgtttgggcatggtcttgttcagcgcggagttcatcagcgagacgagcggcatctaccatagccttcttggccttctcttcggagttcttggcttcgttgagaagttcgtcaaggtctgagtggagggtttgcaattcggtttccaatttcctcttggcggcagacaaggaagcgttttgggctccaagatcgttcaattgttcgtgagcatctcccaattcttgttcagcttggcgacgagcacggtcggcttgttcgagaagagtgcgagattcttcaagttcattttgaagagcgttagcacgacgttctgaaattccaagttgttcacgggcttcatcgcgagctctttgttcttcttcaagggcggtttgggtgtccttaagttgttgttggtagcgtttgatggtcttttgggcttcagcgttggccttgttagcgtggtccaaagcgatttccaattcattgatatcagcttccaacttcttcttcatgcgaagggcctcagccttacctttggcttcagcttcaagggaggcttgcatggagtcgagggcacgttggtgattcttgcgggtgttttcgaattcttcttctttctcttggatacgtctgtcgatttcttgacggacttgagaaagttcaagttggctacgaagtactttgttttcttcttgttcaagagcagcttcagcttcttcaagagcagcttggagttcatctttttcagcttccaagcgcttgcgggccttttcgatttcgtggatgttgcggccaccttctccaatttggtcaaggagatccttaacttcatcagcgaggttcttgttttcacggcggacagcttcaagttgttcttgtccttcttcgtaggcgcccttaagtctgaacaattcggtggagtagtttctgcattctttctgactggcatcgagttcagcagccaagtcatcaaccttgagtttccattctccaatgattttgtcgaaggccttttgtttcttctcagcagcattggcaatggcgttagcacggtcgacttcgagttgcaagtcttcgacttcagtggccaaacgttgtttggtcttttcaagagctacaaccttctggttgagagattcgatggtttcttcagcctcagcaagacgagcttggagtttcctcttagcttcttcgagttcttcagagcgagcaactccttcagattcgtatttctggcgccagagttgagattcagcgttggctttgctgagttgtctttggatatcagccttggcttcggcttcttcttcaacttgttcacggatgttgtccaagtcgtgttccaagtttctgaatttgccgaggagggtagcgcgttctctgctctcttcatcggccaatctcttggtatcttccaattgagtggtaagggataccttgatcttgctgagttgagatacttgagattcggcttcctcgagttgtctgaggaggtcggagttttcaatagacaacttcttcttggcggcatcgaagtcgttaagagtgcggttggtttcgtcaagtttgccttggacgtcgttgagttgttgtcccaattgtttggataccttttctatagcggccttttcgttggctaagtggtcgactgaagcacggaggtcattgagttcaccgaagtattgagacttttctttctcagccttggctttgagtttgttgagttggtcaatttgttcacccatttcagaaacagcgtcgttgtgcttcttgcggaggttagcaagagttccttcatgttggatgttggattcttcgaggtcacgacggagtttggcgagttcggcttcacgtttcttgttgagttcgatttgggctgaggtagcaccaccggcttcttcaagacgttcgccgagttcttccaattcgcgggccaaatcagcgcgttgtttctcagctttagcacgggcttgacgttcagcttcaacttcctcttcgagttcctcaatgcgagcctggagttccttaacttgtttttgttgtttaccaacaacggattgttcgtcttcgagtttggcagtgagtgatgagatttccttgtctttgcgttggatggtttgttcgagttccttcttgttgcgttccaagtcagctacagcctcttgggtgagtttcaagtcgccttcaaccttacgtttagatttttctacgtcaccacggagtttcttttcgcgttccaaagagtcttcgagttcgtccaaggtttgttccaacttagccttaactttgttgaggtggttgaccttgtcctcggcggcctggagttcttcagaaaccttctggttgttttcaccagacattttcttttccttgttgagcttgttgatgagttcgtcttggtgggcgatctcatcgttcaagttcctgatttggtgatccttggtggctttgtcttgttcagacttttggaggttgagttccaaatcttcgatgtctttcttgaaaccggacatttcttgttcgagtttcttcttttgttgcatcaactggttgcgagcatcttcctcttggctcaaacgatcttgggtttcagaaagttgagactcgaggtcgttcttttgggcttggagtttgttggccctttcttgagtttcggaaagggatcccttttctccttccaagttagataacaactcggtcttctcagctaagagcttggcatagagagcttctaattccttcttggccttttcttcacgctcgaaggcttcttgggctttttgggctttctcttcaagtttggcaatctcatcctcgatacgggtgacgttgaggagaggtctgaccttctgccacaatttgtaccatggccatgtgcgcaatttgaggtatttgcgcaagttgcgttggcacacttggagggccaaacgttgttcttgcagtttcttgaattcctttcttgagagataaccacggacccaagattgcatccaggtgacgatcttgccaagacggtcgtcacgaagttcttccatctgacccaagacaccagcacggaagaagaccttcgttttacccaatcggtattgctcagcatcaagttgaacgttctccaatataatttgtgctgctttttcaggtgtcatagtatctttgatttgacttgcggccagaattttgtatcgaagtttgaagtcagggtagaccatcctgttggggaaacctttacggcaaatacggataccttcaagtacaccgttacatgtcagctggtgcattaccaagtgagagtcaatgacaccgggttgtttcaattcgttggggatgatacaacgtacgaagtgaggttgggtagatctcaaggtggtcatcaagttgttcaattgttccttgtatgcagaagatactgtggcaaaaccaccacccttcttaccacgacctttttcggcagcaccaccagattgacctggatggtcggcgaagatttcgacaacgagggcattggaacccttcttgtacaagtcaacaacggtgtcgttcaagggatccttgttcttttccaaccaaccggttatattgtatggtacattaccggcataatggcccaaggtgaagtgagcagcttgctgacctggttttggtggttttggtttttggaagttgggtgatttgcccaagtggttggtgttcaatttttcctcaaaggtcttgtcggtagctttggggaacatagattcttcttcaaggatggacaagatacccataggcttttcgataagttcgatacaggcagctaagtccataccgaaatcaataaaagcccattcaataccctctctttggtattcttcttgttcaagtacaaacatgtggtggttaaagaactgttgcaacttttcattggtaaagttgatacaaagctgctcaaagccgttgaagtcgaagatttcaaaaccagcaatatccagtacaccaatgaagtgctgtctcttttgtttggtgtccaaagtttcgttacactttttgaccaagaacttgaagaccctgtcaaacatggcctttgacatggcaccgacggagtaggatacttggttgacattacgaccttgggtgacgaattcgttaccgaccttaattcttggtttgacaagagcttggtagagagctggggcttcaacacccaagagtttactaacacgttcaccttcttcggtaccgtctggttcagcctgttcttcacgacctctttgtttgaacttcatgcaacccatgtgcattacagcggcggtgatcttgtatacgttgtccttttcttcttgtgtgaaaccaaggatatcgaaggcttcatctgtaagtctacattcctcagcatcatctacgccaggaattgtagtttttccttgggcgacgaagttgtactcgttgatattgttagacaacaaacacttttctttaactccaggtacagatccagacatgatctggtagaagatgtggtaagatctttccaatggctgttgggaaatgacacgggccttttctagcagataagtttcaatatcagcaccagcaagtttaccagttgggccgaagtggatacggatgaatttaccgaaacgggaagagttatcgttacgcacggtcttggcgttaccgaaggcttcaagtacagggttagtttgtacaacttgatcttccaagttacctttcttttggttgggatcagcatctttcttagttgaggcaccgacggtggcgaagtaggcaattaccttcttcgtgttttcagttttaccggcaccagattcaccagtaatcaacatagattgattttcgtgattggtcaacatgttgacgtaggcaccgtcagaaatggcgaaaatgtggggtggtacttcattacgcctcttaccacggtacaacttggcacaacggttggtatatacagggaaacgtttgtaggggttaatggcgacacagaacaaacctgagtatgtgtagattagcttagcgtagtagcgttgtttcaaattatgtaagacagatgcgtcgtttaggtaggttaaatctgccatatcttcgactttttcgtatttgggaggattcacttggtgaacgttgtcttttttgaattgcttttcctctcctccaggaagaccaacggtgacaagatcacccttggttcctttgatttcaccaagcaagaaaccctccttgtcgtccggtacccagcaagattttttggcatcatagggcttagtttggtcgatacgtttctgttcgagagatacgaacaagtatggggtgggatctgggtcatccccctcttgtttttgtggtttaggcatggtgtacggacttagtcggggctatcgagacacgtaatgcagccctagagccttcgttcgaaagg

SEQ ID NO: 1372 - DNA, 1463 bp, Diabrotica virgifera
taatctgtaaataaaatacaaataacctgttaaaagtatatttatttcattgaaatcatatactagaagtacaacttcttacgtgcgtacaaagtacacacacattctttttttttgagattttactaaacagcctgctaaaggtactagtgaccgagatacacttgtagtttctgcaaatatcttttggaccttttttttgtgagttgtagtaatccatgcttctttccaattcttcacaatttcttccccatttaagtatcttgtgaacagcttagatagcttattattagttttggtgttccgttttttagaagttctgctggtatatatgttctccggcccgggtgctttgtttgtgtaccgtataattgtgcaattttgcggtttcccaacttcattgcacaattatacctgttcgtcccaagaaaatagccgcaactattttctccactcgaacgcacactgtccacgctgcactcaaagccacctcctgaccgccgacgagggacgcaggctcgcctgtcgttgtacaatggtttctagggagactggtcgagagcaaagcacggacagtacacgtaaatgtctatggaaccaacaacaatccatcaaactttcttctctgttgtcttcttagccttccggacaccaccgtccggcaccacaggatccaaaaacaccaggacacggcgcttgccccagtgtgttttcgggctgtttgcttttgctgctaacactaaatattcactacaaaccctgaagaggacaaaatcctaaacggggaagcacattgaacgcatttcttcttaacattatcaagacaagcaaatcaaacaatgtagtagtagagttatatattatcatagagagagtgtcattcagagcgaagtgacgacaccatcttttttatttggattagtgctgtttcactcttacgcatagtaaagctgctacagttgtcctcctcttccgtgcctatactcatacttaatgtcatcttagtttctcgatacaatgtgctagaaagagatgccgcaaaccagtccatgagatcttgtcgtcaggaagcgcggagggtaggctcactctatgttaatatttacctctatgattttaacgtacgttgtcagtagcagttatgtcaatattggatgatgagccatagacatattaaggatagacaaggcatattgagcaaaaaagcttaacgcgtgggcagtcgatcggtggtctgtctttctcatttttcaaagtgatcccaagcatgtgacagacaaagatggctagaccactcaaagtgaatattgtccattgatattggcgttacacctcgatgcacagagcggcccataccttgcctggtctaccctttattatgtctatgtgatgagcaaggggtttatttggaaataacttattatgtaattgtttatgtatatggcgtactaaatctccaggcc

SEQ ID NO: 1373 - DNA, 1303 bp, Diabrotica virgifera
cacttacaaggggctcgatagcttggttagtagagcattggaccagagatcgagaggtcccgggttccaatcccagatgattcactatttttttttttaatttttggttgttttaataaaaaatttttgaaagtggtaggtaagaaagttagtttaatatttaaataaaatacaactaacctgttaagtatatatttatttctttgaaatcatataatagaagtataacttcttacgtgcgtacaaagtacacacacattctttttttttgagattttactaaacagcctgctaaaggtactagtgaccgagatacacttgtagtttctgcaaatatcttttggacctttttttgtgagttgtagtaatccatgcttctttccaattcttcacaatttcttccccatttaagtatcttgtgaacagcttagatagcttattattagttttggtgttccgttttttagaagttctgctggtatatatgttctccggcccgggtgctttgtttgtgtaccgtataattgtgcaattttgcggtttcccaacttcattgcacaattatacctgttcgtcccaagaaaatagccgcaactattttctccactcgaacgcacactgtccacgctgcactcaaagccacctcctgaccgccgacgagggacgcaggctcgcctgtcgttgtacaatggtttctagggagactggtcgagagcaaagcacggacagtacacgtaaatgtctatggaaccaacaacaatccatcaaactttcttctctgttgtcttcttagccttccggacaccaccgtccggcaccacaggatccaaaaacaccaggacacggcgcttgccccagtgtgttttcgggctgtttgcttttgctgctaacactaaatattcactacaaaccctgaagaggacaaaatcctaaacggggaagcacattgaacgcatttcttcttaacattatcaagacaagcaaatcaaacaatgtagtagtagagttatatattatcatagagagagtgtcattcagagcgaagtgacgacaccatcttttttatttggattagtgctgtttcactcttacgcatagtaaagctgctacagttgtcctcctcttccgtgcctatattcacactgaatgtatcatagattttcgatacaatgtgttagaaagagatgcagcaaaccagtccatgagatcttgtcgtcaggaagcgcggaaggtaggctccctctatgttaatatatacctctatggtttttacctcgtttaaacgcaccttttacgtcaacgt

SEQ ID NO: 1374 - DNA, 1150 bp, Diabrotica virgifera
taatctgtaaataaaatacaaataacctgttaaaagtatatttatttcattgaaatcatatactagaagtacaacttcttacgtgcgtacaaagtacacacacattctttttttttgagattttactaaacagcctgctaaaggtactagtgaccgagatacacttgtagtttctgcaaatatcttttggaccttttttttgtgagttgtagtaatccatgcttctttccaattcttcacaatttcttccccatttaagtatcttgtgaacagcttagatagcttattattagttttggtgttccgttttttagaagttctgctggtatatatgttctccggcccgggtgctttgtttgtgtaccgtataattgtgcaattttgcggtttcccaacttcattgcacaattatacctgttcgtcccaagaaaatagccgcaactattttctccactcgaacgcacactgtccacgctgcactcaaagccacctcctgaccgccgacgagggacgcaggctcgcctgtcgttgtacaatggtttctagggagactggtcgagagcaaagcacggacagtacacgtaaatgtctatggaaccaacaacaatccatcaaactttcttctctgttgtcttcttagccttccggacaccaccgtccggcaccacaggatccaaaaacaccaggacacggcgcttgccccagtgtgttttcgggctgtttgcttttgctgctaacactaaatattcactacaaaccctgaagaggacaaaatcctaaacggggaagcacattgaacgcatttcttcttaacattatcaagacaagcaaatcaaacaatgtagtagtagagttatatattatcatagagagagtgtcattcagagcgaagtgacgacaccatcttttttatttggattagtgctgtttcactcttacgcatagtaaagctgctacagttgtcctcctcttccgtgcctatattcacactgaatgtatcatagattttcgatacaatgtgttagaaagagatgcagcaaaccagtccatgagatcttgtcgtcaggaagcgcggaaggtaggctccctctatgttaatatatacctctatggtttttacctcgtttaaacgcaccttttacgtcaacgt

SEQ ID NO: 1375 - DNA, 1121 bp, Diabrotica virgifera
aaagtaataattatagcagcaaataagatttttggaaatgcattagttcgactatcaggaaaagataactttatacaacaataattctttataaacattaccacagctgcctgtaattatattttacgcagctacaatactttattattataaataggcggtgacgtcataactacaaaataaacagcactgcccggccctactgaaaaaagcataatctcatcaatcaactgtcaaattgatcaaatcaaattgattttggtcaaactgtgattcaaaggttaataatttttttctaggtcattcgatttttatattatccaccatattgtactcattagcaaatatgtgaatcatgtgtgtccgtttttgggtgataatttctgatttatatccgctgtttgttttgtttttcgattatttcgcctgtttacaagatcttaacattagggattttgtccaaaaacctcctctcagttttatattgaccatttcctttaaaatcatagagttatatattatcatagagagagtgtcattcagagcgaagtgacgacaccatcttttttatttggattagtgctgtttcactcttacgcatagtaaagctgctacagttgtcctcctcttccgtgcctatactcatacttaatgtcatcttagtttctcgatacaatgtgctagaaagagatgccgcaaaccagtccatgagatcttgtcgtcaggaagcgcggagggtaggctcactctatgttaatatttacctctatgattttaacgtacgttgtcagtagcagttatgtcaatattggatgatgagccatagacatattaaggatagacaaggcatattgagcaaaaaagcttaacgcgtgggcagtcgatcggtggtctgtctttctcatttttcaaagtgatcccaagcatgtgacagacaaagatggctagaccactcaaagtgaatattgtccattgatattggcgttacacctcgatgcacagagcggcccataccttgcctggtctaccctttattatgtctatgtgatgagcaaggggtttatttggaaataacttattatgtaattgtttatgtatatggcgtactaaatctccaggcc

SEQ ID NO: 1376 - DNA, 835 bp, Diabrotica virgifera
ctacatttgccacagtaggtatgtgtgtaaaagttaggcccacgttattatttacctgattgttcgcacactattgattgaataaaacatctttattattaatactatctcctcaactgaggctatcttatcaattttattattttttaaacaagaaatgataaataaaaattttgacagttcaaattgtcaatatttataataacttcactgtgacccatagagttatatattatcatagagagagtgtcattcagagcgaagtgacgacaccatcttttttatttggattagtgctgtttcactcttacgcatagtaaagctgctacagttgtcctcctcttccgtgcctatactcatacttaatgtcatcttagtttctcgatacaatgtgctagaaagagatgccgcaaaccagtccatgagatcttgtcgtcaggaagcgcggagggtaggctcactctatgttaatatttacctctatgattttaacgtacgttgtcagtagcagttatgtcaatattggatgatgagccatagacatattaaggatagacaaggcatattgagcaaaaaagcttaacgcgtgggcagtcgatcggtggtctgtctttctcatttttcaaagtgatcccaagcatgtgacagacaaagatggctagaccactcaaagtgaatattgtccattgatattggcgttacacctcgatgcacagagcggcccataccttgcctggtctaccctttattatgtctatgtgatgagcaaggggtttatttggaaataacttattatgtaattgtttatgtatatggcgtactaaatctccaggcc

SEQ ID NO: 1377 - DNA, 808 bp, Diabrotica virgifera
aaagtaataattatagcagcaaataagatttttggaaatgcattagttcgactatcaggaaaagataactttatacaacaataattctttataaacattaccacagctgcctgtaattatattttacgcagctacaatactttattattataaataggcggtgacgtcataactacaaaataaacagcactgcccggccctactgaaaaaagcataatctcatcaatcaactgtcaaattgatcaaatcaaattgattttggtcaaactgtgattcaaaggttaataatttttttctaggtcattcgatttttatattatccaccatattgtactcattagcaaatatgtgaatcatgtgtgtccgtttttgggtgataatttctgatttatatccgctgtttgttttgtttttcgattatttcgcctgtttacaagatcttaacattagggattttgtccaaaaacctcctctcagttttatattgaccatttcctttaaaatcatagagttatatattatcatagagagagtgtcattcagagcgaagtgacgacaccatcttttttatttggattagtgctgtttcactcttacgcatagtaaagctgctacagttgtcctcctcttccgtgcctatattcacactgaatgtatcatagattttcgatacaatgtgttagaaagagatgcagcaaaccagtccatgagatcttgtcgtcaggaagcgcggaaggtaggctccctctatgttaatatatacctctatggtttttacctcgtttaaacgcaccttttacgtcaacgt

SEQ ID NO: 1378 - DNA, 522 bp, Diabrotica virgifera
ctacatttgccacagtaggtatgtgtgtaaaagttaggcccacgttattatttacctgattgttcgcacactattgattgaataaaacatctttattattaatactatctcctcaactgaggctatcttatcaattttattattttttaaacaagaaatgataaataaaaattttgacagttcaaattgtcaatatttataataacttcactgtgacccatagagttatatattatcatagagagagtgtcattcagagcgaagtgacgacaccatcttttttatttggattagtgctgtttcactcttacgcatagtaaagctgctacagttgtcctcctcttccgtgcctatattcacactgaatgtatcatagattttcgatacaatgtgttagaaagagatgcagcaaaccagtccatgagatcttgtcgtcaggaagcgcggaaggtaggctccctctatgttaatatatacctctatggtttttacctcgtttaaacgcaccttttacgtcaacgt

SEQ ID NO: 1379 - DNA, 434 bp, Diabrotica virgifera
cacttacaaggggctcgatagcttggttagtagagcattggaccagagatcgagaggtcccgggttccaatcccagatgattcactatttttttttttaatttttggttgttttaataaaaaatttttgaaagtggtaggtaagaaagttagtttaatatttaaataaaatacaactaacctgttaagtatatatttatttctttgaaatcatataatagaagtataacttcttacgtgcgtacaaagtacacacacacattattttttttattatacaaataataggtatctatacttacctaattatttatactaattaatgatctcaatcggttttcatttcttgccgaaatatattaataatacgccgaaatatatttgtaatgttaatttaacgaaaataaacatcaactttagaataattaacatttc

SEQ ID NO: 1380 - DNA, 5451 bp, Diabrotica virgifera
  SmartBlast Evalue=7E-67; Info=AP-like endonuclease/reverse transcriptase n=8 Tax=Adineta vaga RepID=D2K2T4_ADIVA
cctccctttatggatttcaccctaggcacagtcgaactgtcagggtctctccaaaaagagacccctcatcaagaatatcctgtcgaagcataacatccagatcctcgcactcacagatactctgtcgaaaaacgatccacacttcgcaggatattcgatcatccatcgaagccgctgtcaggtttcacgtgggaatggtattctcgtgaaacacggaataccgcacaacacacacacattcccacaaaattttcgtccacctgatgtggacttcctggcaattgacgtgcacatccccaacaacgaaaccctcacgatagtctcttactacaaacacccgggtcaaccactcaacaggcatttgctagagtacttttcgaggctcggcaaggctgtgttgatgggtgacctaaattgtagacatacacagtttggtgatcaccatcaaaacccagaaggcatccgcctcacggattatctactagaccttcccatttcaagaatcaccaacactgaattcacgtttttgaacgccaatggggcctctattatcgaccacatcctagttactagtaacattctggatcggttcggggatagatgccacataggcgattcgataacgtcagaccacgtacctcttcttgtcgacaccgacattctcactccaaaacaaccaaaccctccaagatctataagagactatcgtcacgctaactggactgaattccaaaacttcatcacacaaaatctcccaatgttaggcgaactcgatactaacgatagtatcgacaccagtgcaaccaatatcgagaacctcatcactgaggcgatcacgcacgcaattccactcaaacaaataacttatacatcaccggcacttccacaatacatcattgccaaaattcaacaaaaacgacgtcttctacgtcaatacaaggccaacagaaacccactaatcaaaacagagtacaaccgaatctgtgccaggataaagagggagatatctgtcctaacggctcgccggtgggaagagactacctcaaaactggactacagagacggaggtaaattctggcaaaaattcaaagtcctaacaaaacaaaaattatctcaaccatctcatctgttggtcaacaatcacatagtcaattccccagaagggaaagccgaagcattcaaaaattcgcttcaaaacaattttcaaacgccagataacccgaactttgatcgcatatttaaattcaacacagaatacattgtaaatgttactctcaaccactacattccagtctatgatcctatcatggaccccctcacagacagggaaacggagagcttttgccaaatcggcaaaaacagcgctcccggtcctgatggcatcaaccgaaggtgcctcaaaaaacttccagagagtatcatccctcttctaactaaaatattcaatgcatgtctcaaaaacagccactttcctactccttggaaagtggccaacaccatcatgcttttgaaaaaaggcaaacccccaaccgacgtggaatcctacagaccaatttcattaatcaatactctgggtaaagttcttgagctaatcctaagggagaggctcaataactttctcgaaaaccacaatatcataccaaaattccaatatggattccagtcaggtaaatctaccaaacatgcattaatagatttcactaccaaagtcactcaaaccatcaacgatggttctatcgccatagccacatttctggatgtgcagaaggctttcgaccaggtctggcacgacgggcttgttcggaaacttctggacatcgggcttccattgcaatttaccaaaattgtacactcctacctccacaaccgtactgtcagagtgaaaatatgcgatcaaaagtccacccccttcactccacaagctggagttccccagggttcagtcctagcgccgctgttgtacatcatctacaacagcgacatcactaaccaaaatatcccaggtactcggctgtttctctatgcagacgacacgactctgctctcaactacctctcgatacaacccaagactcctcttcagaagagcacaggctctgttggacggtgtcggcgaatggtgttgtaagtggagagtcacgctcaagcgaacaaaacaacaacaattgtgtttcgcgccccttctgtgtcaaatagaatcattcgcaatgaagacgaccaatatcctctgagtttgttgggagaaaggcttgttgttagcccgactgtgaactatttggagttctgtttaccaggactctcaactgggacgcagatctaaaggcaactttagatagggtaaggaacagggccagacttctcaacgctctctctggacgaattggcaagacacacaagaacactctcattcacacttacaagacctttattcgacccgtcatggagtacaagtcatgtatctactctctttgctctaaacaaaaacaagagaggttgttgaggacagagcgcagagtcttgcgtagatgtaactatgagcactggcgatatccctcaaacgaaatccataacatctcgaacacccccaaaatcaccgagagaataaactctctgaacaggaacttcacaatcaaagtaatcaacggccccccttccgacacacaagaatctctcaaatgttcctgttcatcttccggccacgtactccaccgaaagcccaaacgcaaaaagattcatgtaccgtccgctctaatgcaaacatgcattgacgaactcccggtagagtacgaaaacatccttgaggctaccccgttagccttccgtacccacctctaacatttcctcttccctaccccgaacagggagaagttgtttttttgcggtttcccaacttcattgcacaattatacctgttcgtcccaagaaaatagccgcaactattttctccactcgaacgcacactgtccacgctgcactcaaagccacctcctgaccgccgacgagggacgcaggctcgcctgtcgttgtacaatggtttctagggagactggtcgagagcaaagcacggacagtacacgtaaatgtctatggaaccaacaacaatccatcaaactttcttctctgttgtcttcttagccttccggacaccaccgtccggcaccacaggatccaaaaacaccaggacacggcgcttgccccagtgtgttttcgggctgtttgcttttgctgctaacactaaatattcactacaaaccctgaagaggacaaaatcctaaacggggaaaatcattgaacgcatttccacatagcactttatctatacacgcaaatcaaacaatggtagtagtgctttgttgttcttcatggatttaagtgcctgttgtatttgatcgtcttcctagacaacgaatgaaattattaaatttccctaaaactactgttgggttatcttagactgtgacgaagttgaattcagtatgtcaatgaaaagagaagacttgctaacacgctcattcactatttattaaacaatcaattaagcttaactaggacactttttgtcattattaaattgtaaaaagaatttcttctgcattcgcaataataaaatagtccaagtgaaaatagagacttaacaattttgtattcaatgttaatgttgagtttaaaaatttttataaaaatttgcttgttttatatgctttttggtgggcatatcaccacaattccaacagtattatatatttaggcaaaacatattgagtaaaatattattcattatcatttgatgatcagtaggttttggatttaaaagcaaaaagcgcttaaaaagcataacgattttatgaaaaataaaagtatgcatataagcatataaatgttgacaaaccattttttgacgaaaattggcatattaaataataacatattatatgatagtttctagtcttagcttaagaactcgtaggtacctattataaatttaaaaataaattacaataaacaaaaaactagataactgaaacaaaaatgtgctttgttttctggccttgataaaacaaaaaaatgctttaacctaatttttatcgacataccttagataaaggaaaataaatataatttttgataaagcaccaaataagcacacatttaagaaaaatacgaaattaaaaaaaaatcatgaaaaatcagtcaaatgatttatttttgcatatttcgttcgtatttaaaaaaagtctcctggttttattatttaccataagaattctgcttagagattcggactatattcattattatttgatggccagtctcataaaactgatcctattaaattggtttcatagtgaaacaatatattattaccgaaagtatttccagtacaatttttaagaatattgtggattgttcatatttcagcttaaaattggaattaactatgttgtatttaaaatattccaaatcaatttagttaaatattagatatagggcttttcattcacagtcatttgtttcgagcttctgtcatgtgtcacatagattaatatatctacgtcatacgttattggtatccaccatgatacaaaccgaagacgtatgacgaagatatattaatgttgtgtgacacatgacaggggctcgaaacaaatgacaatcgatgaaaagccctattagttcagtcgcagtttaatgctaaaaaatcagttaatttactctcgaattttgacggttccaatagggcttttcatccgttgtcgtttgtttcgagcttctgtcatgtgtcacataatattaatctatctacgtcattgtaaaataccaataacgtatgacgtagatatattaatattatgtgacacatgacaggggctcgagcaatgactgcgaatgaaaagccctattttggtatcaaactctgagacaaagttttgaatgcgtgacgataatgaccaatcatggcaaatgcgcaatgataatgaccaatcacggcaaacgtagagtagttaactgtcattcatctgcgcaaacgctgacatttttgatacgccgtcaccaattatggaacatagagaacaaagtattttcgctgagtgatcctacagattcgttaacattatgctgtggttcactgacgtattaactttactgttgtatgaacaaaccccagaaaaacttgtaaatattgtaacaaagcataaaaaatgtgcctcaacattttcgacagtgttttattatttattaagtacgggttatttactgaaataaagaaagatataatgaagtattatgtattttatataatattgattagtgacgagattagaaataggttaagtttaatacctttaggtatcccgaaaacgttgttttttgcatgtttaaataacaacgttttctggtacaaggaatatttgttgtacattaccttatctgagaataaaatttttctaaa

SEQ ID NO: 1381 - DNA, 4490 bp, Diabrotica virgifera
  SmartBlast Evalue=1E-51; Info=AP-like endonuclease/reverse transcriptase n=8 Tax=Adineta vaga RepID=D2K2T4_ADIVA
ctccttagtgactttttacattatttgtttgcaattctactatacgatattaacacaacaaatgtctaactattaaacaccaaatagctttgtaatgcgcaatgtctgaacgtaaaaatacgattaagttattgttggcatatacttatatatttaagtatatatacgattaagttattgttggcatatacttccccagaagggaaagccgaagcattcaaaaattcgcttcaaaacaattttcaaacgccagataacccgaactttgatcgcatatttaaattcaacacagaatacattgtaaatgttactctcaaccactacattccagtctatgatcctatcatggaccccctcacagacagggaaacggagagcttttgccaaatcggcaaaaacagcgctcccggtcctgatggcatcaaccgaaggtgcctcaaaaaacttccagagagtatcatccctcttctaactaaaatattcaatgcatgtctcaaaaacagccactttcctactccttggaaagtggccaacaccatcatgcttttgaaaaaaggcaaacccccaaccgacgtggaatcctacagaccaatttcattaatcaatactctgggtaaagttcttgagctaatcctaagggagaggctcaataactttctcgaaaaccacaatatcataccaaaattccaatatggattccagtcaggtaaatctaccaaacatgcattaatagatttcactaccaaagtcactcaaaccatcaacgatggttctatcgccatagccacatttctggatgtgcagaaggctttcgaccaggtctggcacgacgggcttgttcggaaacttctggacatcgggcttccattgcaatttaccaaaattgtacactcctacctccacaaccgtactgtcagagtgaaaatatgcgatcaaaagtccacccccttcactccacaagctggagttccccagggttcagtcctagcgccgctgttgtacatcatctacaacagcgacatcactaaccaaaatatcccaggtactcggctgtttctctatgcagacgacacgactctgctctcaactacctctcgatacaacccaagactcctcttcagaagagcacaggctctgttggacggtgtcggcgaatggtgttgtaagtggagagtcacgctcaagcgaacaaaacaacaacaattgtgtttcgcgccccttctgtgtcaaatagaatcattcgcaatgaagacgaccaatatcctctgagtttgttgggagaaaggcttgttgttagcccgactgtgaactatttggagttctgtttaccaggactctcaactgggacgcagatctaaaggcaactttagatagggtaaggaacagggccagacttctcaacgctctctctggacgaattggcaagacacacaagaacactctcattcacacttacaagacctttattcgacccgtcatggagtacaagtcatgtatctactctctttgctctaaacaaaaacaagagaggttgttgaggacagagcgcagagtcttgcgtagatgtaactatgagcactggcgatatccctcaaacgaaatccataacatctcgaacacccccaaaatcaccgagagaataaactctctgaacaggaacttcacaatcaaagtaatcaacggccccccttccgacacacaagaatctctcaaatgttcctgttcatcttccggccacgtactccaccgaaagcccaaacgcaaaaagattcatgtaccgtccgctctaatgcaaacatgcattgacgaactcccggtagagtacgaaaacatccttgaggctaccccgttagccttccgtacccacctctaacatttcctcttccctaccccgaacagggagaagttgtttttttgcggtttcccaacttcattgcacaattatacctgttcgtcccaagaaaatagccgcaactattttctccactcgaacgcacactgtccacgctgcactcaaagccacctcctgaccgccgacgagggacgcaggctcgcctgtcgttgtacaatggtttctagggagactggtcgagagcaaagcacggacagtacacgtaaatgtctatggaaccaacaacaatccatcaaactttcttctctgttgtcttcttagccttccggacaccaccgtccggcaccacaggatccaaaaacaccaggacacggcgcttgccccagtgtgttttcgggctgtttgcttttgctgctaacactaaatattcactacaaaccctgaagaggacaaaatcctaaacggggaaaatcattgaacgcatttccacatagcactttatctatacacgcaaatcaaacaatggtagtagtgctttgttgttcttcatggatttaagtgcctgttgtatttgatcgtcttcctagacaacgaatgaaattattaaatttccctaaaactactgttgggttatcttagactgtgacgaagttgaattcagtatgtcaatgaaaagagaagacttgctaacacgctcattcactatttattaaacaatcaattaagcttaactaggacactttttgtcattattaaattgtaaaaagaatttcttctgcattcgcaataataaaatagtccaagtgaaaatagagacttaacaattttgtattcaatgttaatgttgagtttaaaaatttttataaaaatttgcttgttttatatgctttttggtgggcatatcaccacaattccaacagtattatatatttaggcaaaacatattgagtaaaatattattcattatcatttgatgatcagtaggttttggatttaaaagcaaaaagcgcttaaaaagcataacgattttatgaaaaataaaagtatgcatataagcatataaatgttgacaaaccattttttgacgaaaattggcatattaaataataacatattatatgatagtttctagtcttagcttaagaactcgtaggtacctattataaatttaaaaataaattacaataaacaaaaaactagataactgaaacaaaaatgtgctttgttttctggccttgataaaacaaaaaaatgctttaacctaatttttatcgacataccttagataaaggaaaataaatataatttttgataaagcaccaaataagcacacatttaagaaaaatacgaaattaaaaaaaaatcatgaaaaatcagtcaaatgatttatttttgcatatttcgttcgtatttaaaaaaagtctcctggttttattatttaccataagaattctgcttagagattcggactatattcattattatttgatggccagtctcataaaactgatcctattaaattggtttcatagtgaaacaatatattattaccgaaagtatttccagtacaatttttaagaatattgtggattgttcatatttcagcttaaaattggaattaactatgttgtatttaaaatattccaaatcaatttagttaaatattagatatagggcttttcattcacagtcatttgtttcgagcttctgtcatgtgtcacatagattaatatatctacgtcatacgttattggtatccaccatgatacaaaccgaagacgtatgacgaagatatattaatgttgtgtgacacatgacaggggctcgaaacaaatgacaatcgatgaaaagccctattagttcagtcgcagtttaatgctaaaaaatcagttaatttactctcgaattttgacggttccaatagggcttttcatccgttgtcgtttgtttcgagcttctgtcatgtgtcacataatattaatctatctacgtcattgtaaaataccaataacgtatgacgtagatatattaatattatgtgacacatgacaggggctcgagcaatgactgcgaatgaaaagccctattttggtatcaaactctgagacaaagttttgaatgcgtgacgataatgaccaatcatggcaaatgcgcaatgataatgaccaatcacggcaaacgtagagtagttaactgtcattcatctgcgcaaacgctgacatttttgatacgccgtcaccaattatggaacatagagaacaaagtattttcgctgagtgatcctacagattcgttaacattatgctgtggttcactgacgtattaactttactgttgtatgaacaaaccccagaaaaacttgtaaatattgtaacaaagcataaaaaatgtgcctcaacattttcgacagtgttttattatttattaagtacgggttatttactgaaataaagaaagatataatgaagtattatgtattttatataatattgattagtgacgagattagaaataggttaagtttaatacctttaggtatcccgaaaacgttgttttttgcatgtttaaataacaacgttttctggtacaaggaatatttgttgtacattaccttatctgagaataaaatttttctaaa

SEQ ID NO: 1382 - DNA, 3957 bp, Diabrotica virgifera
  SmartBlast Evalue=5E-67; Info=AP-like endonuclease/reverse transcriptase n=8 Tax=Adineta vaga RepID=D2K2T4_ADIVA
cctccctttatggatttcaccctaggcacagtcgaactgtcagggtctctccaaaaagagacccctcatcaagaatatcctgtcgaagcataacatccagatcctcgcactcacagatactctgtcgaaaaacgatccacacttcgcaggatattcgatcatccatcgaagccgctgtcaggtttcacgtgggaatggtattctcgtgaaacacggaataccgcacaacacacacacattcccacaaaattttcgtccacctgatgtggacttcctggcaattgacgtgcacatccccaacaacgaaaccctcacgatagtctcttactacaaacacccgggtcaaccactcaacaggcatttgctagagtacttttcgaggctcggcaaggctgtgttgatgggtgacctaaattgtagacatacacagtttggtgatcaccatcaaaacccagaaggcatccgcctcacggattatctactagaccttcccatttcaagaatcaccaacactgaattcacgtttttgaacgccaatggggcctctattatcgaccacatcctagttactagtaacattctggatcggttcggggatagatgccacataggcgattcgataacgtcagaccacgtacctcttcttgtcgacaccgacattctcactccaaaacaaccaaaccctccaagatctataagagactatcgtcacgctaactggactgaattccaaaacttcatcacacaaaatctcccaatgttaggcgaactcgatactaacgatagtatcgacaccagtgcaaccaatatcgagaacctcatcactgaggcgatcacgcacgcaattccactcaaacaaataacttatacatcaccggcacttccacaatacatcattgccaaaattcaacaaaaacgacgtcttctacgtcaatacaaggccaacagaaacccactaatcaaaacagagtacaaccgaatctgtgccaggataaagagggagatatctgtcctaacggctcgccggtgggaagagactacctcaaaactggactacagagacggaggtaaattctggcaaaaattcaaagtcctaacaaaacaaaaattatctcaaccatctcatctgttggtcaacaatcacatagtcaattccccagaagggaaagccgaagcattcaaaaattcgcttcaaaacaattttcaaacgccagataacccgaactttgatcgcatatttaaattcaacacagaatacattgtaaatgttactctcaaccactacattccagtctatgatcctatcatggaccccctcacagacagggaaacggagagcttttgccaaatcggcaaaaacagcgctcccggtcctgatggcatcaaccgaaggtgcctcaaaaaacttccagagagtatcatccctcttctaactaaaatattcaatgcatgtctcaaaaacagccactttcctactccttggaaagtggccaacaccatcatgcttttgaaaaaaggcaaacccccaaccgacgtggaatcctacagaccaatttcattaatcaatactctgggtaaagttcttgagctaatcctaagggagaggctcaataactttctcgaaaaccacaatatcataccaaaattccaatatggattccagtcaggtaaatctaccaaacatgcattaatagatttcactaccaaagtcactcaaaccatcaacgatggttctatcgccatagccacatttctggatgtgcagaaggctttcgaccaggtctggcacgacgggcttgttcggaaacttctggacatcgggcttccattgcaatttaccaaaattgtacactcctacctccacaaccgtactgtcagagtgaaaatatgcgatcaaaagtccacccccttcactccacaagctggagttccccagggttcagtcctagcgccgctgttgtacatcatctacaacagcgacatcactaaccaaaatatcccaggtactcggctgtttctctatgcagacgacacgactctgctctcaactacctctcgatacaacccaagactcctcttcagaagagcacaggctctgttggacggtgtcggcgaatggtgttgtaagtggagagtcacgctcaagcgaacaaaacaacaacaattgtgtttcgcgccccttctgtgtcaaatagaatcattcgcaatgaagacgaccaatatcctctgagtttgttgggagaaaggcttgttgttagcccgactgtgaactatttggagttctgtttaccaggactctcaactgggacgcagatctaaaggcaactttagatagggtaaggaacagggccagacttctcaacgctctctctggacgaattggcaagacacacaagaacactctcattcacacttacaagacctttattcgacccgtcatggagtacaagtcatgtatctactctctttgctctaaacaaaaacaagagaggttgttgaggacagagcgcagagtcttgcgtagatgtaactatgagcactggcgatatccctcaaacgaaatccataacatctcgaacacccccaaaatcaccgagagaataaactctctgaacaggaacttcacaatcaaagtaatcaacggccccccttccgacacacaagaatctctcaaatgttcctgttcatcttccggccacgtactccaccgaaagcccaaacgcaaaaagattcatgtaccgtccgctctaatgcaaacatgcattgacgaactcccggtagagtacgaaaacatccttgaggctaccccgttagccttccgtacccacctctaacatttcctcttccctaccccgaacagggagaagttgtttttttgcggtttcccaacttcattgcacaattatacctgttcgtcccaagaaaatagccgcaactattttctccactcgaacgcacactgtccacgctgcactcaaagccacctcctgaccgccgacgagggacgcaggctcgcctgtcgttgtacaatggtttctagggagactggtcgagagcaaagcacggacagtacacgtaaatgtctatggaaccaacaacaatccatcaaactttcttctctgttgtcttcttagccttccggacaccaccgtccggcaccacaggatccaaaaacaccaggacacggcgcttgccccagtgtgttttcgggctgtttgcttttgctgctaacactaaatattcactacaaaccctgaagaggacaaaatcctaaacggggaagcacattgaacgcatttcttcttaacattatcaagacaagcaaatcaaacaatgtagtagtagagttatatattatcatagagagagtgtcattcagagcgaagtgacgacaccatcttttttatttggattagtgctgtttcactcttacgcatagtaaagctgctacagttgtcctcctcttccgtgcctatactcatacttaatgtcatcttagtttctcgatacaatgtgctagaaagagatgccgcaaaccagtccatgagatcttgtcgtcaggaagcgcggagggtaggctcactctatgttaatatttacctctatgattttaacgtacgttgtcagtagcagttatgtcaatattggatgatgagccatagacatattaaggatagacaaggcatattgagcaaaaaagcttaacgcgtgggcagtcgatcggtggtctgtctttctcatttttcaaagtgatcccaagcatgtgacagacaaagatggctagaccactcaaagtgaatattgtccattgatattggcgttacacctcgatgcacagagcggcccataccttgcctggtctaccctttattatgtctatgtgatgagcaaggggtttatttggaaataacttattatgtaattgtttatgtatatggcgtactaaatctccaggcc

SEQ ID NO: 1383 - DNA, 3644 bp, Diabrotica virgifera
  SmartBlast Evalue=5E-67; Info=AP-like endonuclease/reverse transcriptase n=8 Tax=Adineta vaga RepID=D2K2T4_ADIVA
cctccctttatggatttcaccctaggcacagtcgaactgtcagggtctctccaaaaagagacccctcatcaagaatatcctgtcgaagcataacatccagatcctcgcactcacagatactctgtcgaaaaacgatccacacttcgcaggatattcgatcatccatcgaagccgctgtcaggtttcacgtgggaatggtattctcgtgaaacacggaataccgcacaacacacacacattcccacaaaattttcgtccacctgatgtggacttcctggcaattgacgtgcacatccccaacaacgaaaccctcacgatagtctcttactacaaacacccgggtcaaccactcaacaggcatttgctagagtacttttcgaggctcggcaaggctgtgttgatgggtgacctaaattgtagacatacacagtttggtgatcaccatcaaaacccagaaggcatccgcctcacggattatctactagaccttcccatttcaagaatcaccaacactgaattcacgtttttgaacgccaatggggcctctattatcgaccacatcctagttactagtaacattctggatcggttcggggatagatgccacataggcgattcgataacgtcagaccacgtacctcttcttgtcgacaccgacattctcactccaaaacaaccaaaccctccaagatctataagagactatcgtcacgctaactggactgaattccaaaacttcatcacacaaaatctcccaatgttaggcgaactcgatactaacgatagtatcgacaccagtgcaaccaatatcgagaacctcatcactgaggcgatcacgcacgcaattccactcaaacaaataacttatacatcaccggcacttccacaatacatcattgccaaaattcaacaaaaacgacgtcttctacgtcaatacaaggccaacagaaacccactaatcaaaacagagtacaaccgaatctgtgccaggataaagagggagatatctgtcctaacggctcgccggtgggaagagactacctcaaaactggactacagagacggaggtaaattctggcaaaaattcaaagtcctaacaaaacaaaaattatctcaaccatctcatctgttggtcaacaatcacatagtcaattccccagaagggaaagccgaagcattcaaaaattcgcttcaaaacaattttcaaacgccagataacccgaactttgatcgcatatttaaattcaacacagaatacattgtaaatgttactctcaaccactacattccagtctatgatcctatcatggaccccctcacagacagggaaacggagagcttttgccaaatcggcaaaaacagcgctcccggtcctgatggcatcaaccgaaggtgcctcaaaaaacttccagagagtatcatccctcttctaactaaaatattcaatgcatgtctcaaaaacagccactttcctactccttggaaagtggccaacaccatcatgcttttgaaaaaaggcaaacccccaaccgacgtggaatcctacagaccaatttcattaatcaatactctgggtaaagttcttgagctaatcctaagggagaggctcaataactttctcgaaaaccacaatatcataccaaaattccaatatggattccagtcaggtaaatctaccaaacatgcattaatagatttcactaccaaagtcactcaaaccatcaacgatggttctatcgccatagccacatttctggatgtgcagaaggctttcgaccaggtctggcacgacgggcttgttcggaaacttctggacatcgggcttccattgcaatttaccaaaattgtacactcctacctccacaaccgtactgtcagagtgaaaatatgcgatcaaaagtccacccccttcactccacaagctggagttccccagggttcagtcctagcgccgctgttgtacatcatctacaacagcgacatcactaaccaaaatatcccaggtactcggctgtttctctatgcagacgacacgactctgctctcaactacctctcgatacaacccaagactcctcttcagaagagcacaggctctgttggacggtgtcggcgaatggtgttgtaagtggagagtcacgctcaagcgaacaaaacaacaacaattgtgtttcgcgccccttctgtgtcaaatagaatcattcgcaatgaagacgaccaatatcctctgagtttgttgggagaaaggcttgttgttagcccgactgtgaactatttggagttctgtttaccaggactctcaactgggacgcagatctaaaggcaactttagatagggtaaggaacagggccagacttctcaacgctctctctggacgaattggcaagacacacaagaacactctcattcacacttacaagacctttattcgacccgtcatggagtacaagtcatgtatctactctctttgctctaaacaaaaacaagagaggttgttgaggacagagcgcagagtcttgcgtagatgtaactatgagcactggcgatatccctcaaacgaaatccataacatctcgaacacccccaaaatcaccgagagaataaactctctgaacaggaacttcacaatcaaagtaatcaacggccccccttccgacacacaagaatctctcaaatgttcctgttcatcttccggccacgtactccaccgaaagcccaaacgcaaaaagattcatgtaccgtccgctctaatgcaaacatgcattgacgaactcccggtagagtacgaaaacatccttgaggctaccccgttagccttccgtacccacctctaacatttcctcttccctaccccgaacagggagaagttgtttttttgcggtttcccaacttcattgcacaattatacctgttcgtcccaagaaaatagccgcaactattttctccactcgaacgcacactgtccacgctgcactcaaagccacctcctgaccgccgacgagggacgcaggctcgcctgtcgttgtacaatggtttctagggagactggtcgagagcaaagcacggacagtacacgtaaatgtctatggaaccaacaacaatccatcaaactttcttctctgttgtcttcttagccttccggacaccaccgtccggcaccacaggatccaaaaacaccaggacacggcgcttgccccagtgtgttttcgggctgtttgcttttgctgctaacactaaatattcactacaaaccctgaagaggacaaaatcctaaacggggaagcacattgaacgcatttcttcttaacattatcaagacaagcaaatcaaacaatgtagtagtagagttatatattatcatagagagagtgtcattcagagcgaagtgacgacaccatcttttttatttggattagtgctgtttcactcttacgcatagtaaagctgctacagttgtcctcctcttccgtgcctatattcacactgaatgtatcatagattttcgatacaatgtgttagaaagagatgcagcaaaccagtccatgagatcttgtcgtcaggaagcgcggaaggtaggctccctctatgttaatatatacctctatggtttttacctcgtttaaacgcaccttttacgtcaacgt

SEQ ID NO: 1384 - DNA, 3110 bp, Diabrotica virgifera
cacttacaaggggctcgatagcttggttagtagagcattggaccagagatcgagaggtcccgggttccaatcccagatgattcactatttttttttttaatttttggttgttttaataaaaaatttttgaaagtggtaggtaagaaagttagtttaatatttaaataaaatacaactaacctgttaagtatatatttatttctttgaaatcatataatagaagtataacttcttacgtgcgtacaaagtacacacacattctttttttttgagattttactaaacagcctgctaaaggtactagtgaccgagatacacttgtagtttctgcaaatatcttttggacctttttttgtgagttgtagtaatccatgcttctttccaattcttcacaatttcttccccatttaagtatcttgtgaacagcttagatagcttattattagttttggtgttccgttttttagaagttctgctggtatatatgttctccggcccgggtgctttgtttgtgtaccgtataattgtgcaattttgcggtttcccaacttcattgcacaattatacctgttcgtcccaagaaaatagccgcaactattttctccactcgaacgcacactgtccacgctgcactcaaagccacctcctgaccgccgacgagggacgcaggctcgcctgtcgttgtacaatggtttctagggagactggtcgagagcaaagcacggacagtacacgtaaatgtctatggaaccaacaacaatccatcaaactttcttctctgttgtcttcttagccttccggacaccaccgtccggcaccacaggatccaaaaacaccaggacacggcgcttgccccagtgtgttttcgggctgtttgcttttgctgctaacactaaatattcactacaaaccctgaagaggacaaaatcctaaacggggaaaatcattgaacgcatttccacatagcactttatctatacacgcaaatcaaacaatggtagtagtgctttgttgttcttcatggatttaagtgcctgttgtatttgatcgtcttcctagacaacgaatgaaattattaaatttccctaaaactactgttgggttatcttagactgtgacgaagttgaattcagtatgtcaatgaaaagagaagacttgctaacacgctcattcactatttattaaacaatcaattaagcttaactaggacactttttgtcattattaaattgtaaaaagaatttcttctgcattcgcaataataaaatagtccaagtgaaaatagagacttaacaattttgtattcaatgttaatgttgagtttaaaaatttttataaaaatttgcttgttttatatgctttttggtgggcatatcaccacaattccaacagtattatatatttaggcaaaacatattgagtaaaatattattcattatcatttgatgatcagtaggttttggatttaaaagcaaaaagcgcttaaaaagcataacgattttatgaaaaataaaagtatgcatataagcatataaatgttgacaaaccattttttgacgaaaattggcatattaaataataacatattatatgatagtttctagtcttagcttaagaactcgtaggtacctattataaatttaaaaataaattacaataaacaaaaaactagataactgaaacaaaaatgtgctttgttttctggccttgataaaacaaaaaaatgctttaacctaatttttatcgacataccttagataaaggaaaataaatataatttttgataaagcaccaaataagcacacatttaagaaaaatacgaaattaaaaaaaaatcatgaaaaatcagtcaaatgatttatttttgcatatttcgttcgtatttaaaaaaagtctcctggttttattatttaccataagaattctgcttagagattcggactatattcattattatttgatggccagtctcataaaactgatcctattaaattggtttcatagtgaaacaatatattattaccgaaagtatttccagtacaatttttaagaatattgtggattgttcatatttcagcttaaaattggaattaactatgttgtatttaaaatattccaaatcaatttagttaaatattagatatagggcttttcattcacagtcatttgtttcgagcttctgtcatgtgtcacatagattaatatatctacgtcatacgttattggtatccaccatgatacaaaccgaagacgtatgacgaagatatattaatgttgtgtgacacatgacaggggctcgaaacaaatgacaatcgatgaaaagccctattagttcagtcgcagtttaatgctaaaaaatcagttaatttactctcgaattttgacggttccaatagggcttttcatccgttgtcgtttgtttcgagcttctgtcatgtgtcacataatattaatctatctacgtcattgtaaaataccaataacgtatgacgtagatatattaatattatgtgacacatgacaggggctcgagcaatgactgcgaatgaaaagccctattttggtatcaaactctgagacaaagttttgaatgcgtgacgataatgaccaatcatggcaaatgcgcaatgataatgaccaatcacggcaaacgtagagtagttaactgtcattcatctgcgcaaacgctgacatttttgatacgccgtcaccaattatggaacatagagaacaaagtattttcgctgagtgatcctacagattcgttaacattatgctgtggttcactgacgtattaactttactgttgtatgaacaaaccccagaaaaacttgtaaatattgtaacaaagcataaaaaatgtgcctcaacattttcgacagtgttttattatttattaagtacgggttatttactgaaataaagaaagatataatgaagtattatgtattttatataatattgattagtgacgagattagaaataggttaagtttaatacctttaggtatcccgaaaacgttgttttttgcatgtttaaataacaacgttttctggtacaaggaatatttgttgtacattaccttatctgagaataaaatttttctaaa

SEQ ID NO: 1385 - DNA, 2996 bp, Diabrotica virgifera
  SmartBlast Evalue=8E-52; Info=AP-like endonuclease/reverse transcriptase n=8 Tax=Adineta vaga RepID=D2K2T4_ADIVA
ctccttagtgactttttacattatttgtttgcaattctactatacgatattaacacaacaaatgtctaactattaaacaccaaatagctttgtaatgcgcaatgtctgaacgtaaaaatacgattaagttattgttggcatatacttatatatttaagtatatatacgattaagttattgttggcatatacttccccagaagggaaagccgaagcattcaaaaattcgcttcaaaacaattttcaaacgccagataacccgaactttgatcgcatatttaaattcaacacagaatacattgtaaatgttactctcaaccactacattccagtctatgatcctatcatggaccccctcacagacagggaaacggagagcttttgccaaatcggcaaaaacagcgctcccggtcctgatggcatcaaccgaaggtgcctcaaaaaacttccagagagtatcatccctcttctaactaaaatattcaatgcatgtctcaaaaacagccactttcctactccttggaaagtggccaacaccatcatgcttttgaaaaaaggcaaacccccaaccgacgtggaatcctacagaccaatttcattaatcaatactctgggtaaagttcttgagctaatcctaagggagaggctcaataactttctcgaaaaccacaatatcataccaaaattccaatatggattccagtcaggtaaatctaccaaacatgcattaatagatttcactaccaaagtcactcaaaccatcaacgatggttctatcgccatagccacatttctggatgtgcagaaggctttcgaccaggtctggcacgacgggcttgttcggaaacttctggacatcgggcttccattgcaatttaccaaaattgtacactcctacctccacaaccgtactgtcagagtgaaaatatgcgatcaaaagtccacccccttcactccacaagctggagttccccagggttcagtcctagcgccgctgttgtacatcatctacaacagcgacatcactaaccaaaatatcccaggtactcggctgtttctctatgcagacgacacgactctgctctcaactacctctcgatacaacccaagactcctcttcagaagagcacaggctctgttggacggtgtcggcgaatggtgttgtaagtggagagtcacgctcaagcgaacaaaacaacaacaattgtgtttcgcgccccttctgtgtcaaatagaatcattcgcaatgaagacgaccaatatcctctgagtttgttgggagaaaggcttgttgttagcccgactgtgaactatttggagttctgtttaccaggactctcaactgggacgcagatctaaaggcaactttagatagggtaaggaacagggccagacttctcaacgctctctctggacgaattggcaagacacacaagaacactctcattcacacttacaagacctttattcgacccgtcatggagtacaagtcatgtatctactctctttgctctaaacaaaaacaagagaggttgttgaggacagagcgcagagtcttgcgtagatgtaactatgagcactggcgatatccctcaaacgaaatccataacatctcgaacacccccaaaatcaccgagagaataaactctctgaacaggaacttcacaatcaaagtaatcaacggccccccttccgacacacaagaatctctcaaatgttcctgttcatcttccggccacgtactccaccgaaagcccaaacgcaaaaagattcatgtaccgtccgctctaatgcaaacatgcattgacgaactcccggtagagtacgaaaacatccttgaggctaccccgttagccttccgtacccacctctaacatttcctcttccctaccccgaacagggagaagttgtttttttgcggtttcccaacttcattgcacaattatacctgttcgtcccaagaaaatagccgcaactattttctccactcgaacgcacactgtccacgctgcactcaaagccacctcctgaccgccgacgagggacgcaggctcgcctgtcgttgtacaatggtttctagggagactggtcgagagcaaagcacggacagtacacgtaaatgtctatggaaccaacaacaatccatcaaactttcttctctgttgtcttcttagccttccggacaccaccgtccggcaccacaggatccaaaaacaccaggacacggcgcttgccccagtgtgttttcgggctgtttgcttttgctgctaacactaaatattcactacaaaccctgaagaggacaaaatcctaaacggggaagcacattgaacgcatttcttcttaacattatcaagacaagcaaatcaaacaatgtagtagtagagttatatattatcatagagagagtgtcattcagagcgaagtgacgacaccatcttttttatttggattagtgctgtttcactcttacgcatagtaaagctgctacagttgtcctcctcttccgtgcctatactcatacttaatgtcatcttagtttctcgatacaatgtgctagaaagagatgccgcaaaccagtccatgagatcttgtcgtcaggaagcgcggagggtaggctcactctatgttaatatttacctctatgattttaacgtacgttgtcagtagcagttatgtcaatattggatgatgagccatagacatattaaggatagacaaggcatattgagcaaaaaagcttaacgcgtgggcagtcgatcggtggtctgtctttctcatttttcaaagtgatcccaagcatgtgacagacaaagatggctagaccactcaaagtgaatattgtccattgatattggcgttacacctcgatgcacagagcggcccataccttgcctggtctaccctttattatgtctatgtgatgagcaaggggtttatttggaaataacttattatgtaattgtttatgtatatggcgtactaaatctccaggcc

SEQ ID NO: 1386 - DNA, 2957 bp, Diabrotica virgifera
taatctgtaaataaaatacaaataacctgttaaaagtatatttatttcattgaaatcatatactagaagtacaacttcttacgtgcgtacaaagtacacacacattctttttttttgagattttactaaacagcctgctaaaggtactagtgaccgagatacacttgtagtttctgcaaatatcttttggaccttttttttgtgagttgtagtaatccatgcttctttccaattcttcacaatttcttccccatttaagtatcttgtgaacagcttagatagcttattattagttttggtgttccgttttttagaagttctgctggtatatatgttctccggcccgggtgctttgtttgtgtaccgtataattgtgcaattttgcggtttcccaacttcattgcacaattatacctgttcgtcccaagaaaatagccgcaactattttctccactcgaacgcacactgtccacgctgcactcaaagccacctcctgaccgccgacgagggacgcaggctcgcctgtcgttgtacaatggtttctagggagactggtcgagagcaaagcacggacagtacacgtaaatgtctatggaaccaacaacaatccatcaaactttcttctctgttgtcttcttagccttccggacaccaccgtccggcaccacaggatccaaaaacaccaggacacggcgcttgccccagtgtgttttcgggctgtttgcttttgctgctaacactaaatattcactacaaaccctgaagaggacaaaatcctaaacggggaaaatcattgaacgcatttccacatagcactttatctatacacgcaaatcaaacaatggtagtagtgctttgttgttcttcatggatttaagtgcctgttgtatttgatcgtcttcctagacaacgaatgaaattattaaatttccctaaaactactgttgggttatcttagactgtgacgaagttgaattcagtatgtcaatgaaaagagaagacttgctaacacgctcattcactatttattaaacaatcaattaagcttaactaggacactttttgtcattattaaattgtaaaaagaatttcttctgcattcgcaataataaaatagtccaagtgaaaatagagacttaacaattttgtattcaatgttaatgttgagtttaaaaatttttataaaaatttgcttgttttatatgctttttggtgggcatatcaccacaattccaacagtattatatatttaggcaaaacatattgagtaaaatattattcattatcatttgatgatcagtaggttttggatttaaaagcaaaaagcgcttaaaaagcataacgattttatgaaaaataaaagtatgcatataagcatataaatgttgacaaaccattttttgacgaaaattggcatattaaataataacatattatatgatagtttctagtcttagcttaagaactcgtaggtacctattataaatttaaaaataaattacaataaacaaaaaactagataactgaaacaaaaatgtgctttgttttctggccttgataaaacaaaaaaatgctttaacctaatttttatcgacataccttagataaaggaaaataaatataatttttgataaagcaccaaataagcacacatttaagaaaaatacgaaattaaaaaaaaatcatgaaaaatcagtcaaatgatttatttttgcatatttcgttcgtatttaaaaaaagtctcctggttttattatttaccataagaattctgcttagagattcggactatattcattattatttgatggccagtctcataaaactgatcctattaaattggtttcatagtgaaacaatatattattaccgaaagtatttccagtacaatttttaagaatattgtggattgttcatatttcagcttaaaattggaattaactatgttgtatttaaaatattccaaatcaatttagttaaatattagatatagggcttttcattcacagtcatttgtttcgagcttctgtcatgtgtcacatagattaatatatctacgtcatacgttattggtatccaccatgatacaaaccgaagacgtatgacgaagatatattaatgttgtgtgacacatgacaggggctcgaaacaaatgacaatcgatgaaaagccctattagttcagtcgcagtttaatgctaaaaaatcagttaatttactctcgaattttgacggttccaatagggcttttcatccgttgtcgtttgtttcgagcttctgtcatgtgtcacataatattaatctatctacgtcattgtaaaataccaataacgtatgacgtagatatattaatattatgtgacacatgacaggggctcgagcaatgactgcgaatgaaaagccctattttggtatcaaactctgagacaaagttttgaatgcgtgacgataatgaccaatcatggcaaatgcgcaatgataatgaccaatcacggcaaacgtagagtagttaactgtcattcatctgcgcaaacgctgacatttttgatacgccgtcaccaattatggaacatagagaacaaagtattttcgctgagtgatcctacagattcgttaacattatgctgtggttcactgacgtattaactttactgttgtatgaacaaaccccagaaaaacttgtaaatattgtaacaaagcataaaaaatgtgcctcaacattttcgacagtgttttattatttattaagtacgggttatttactgaaataaagaaagatataatgaagtattatgtattttatataatattgattagtgacgagattagaaataggttaagtttaatacctttaggtatcccgaaaacgttgttttttgcatgtttaaataacaacgttttctggtacaaggaatatttgttgtacattaccttatctgagaataaaatttttctaaa

SEQ ID NO: 1387 - DNA, 2683 bp, Diabrotica virgifera
  SmartBlast Evalue=7E-52; Info=AP-like endonuclease/reverse transcriptase n=8 Tax=Adineta vaga RepID=D2K2T4_ADIVA
ctccttagtgactttttacattatttgtttgcaattctactatacgatattaacacaacaaatgtctaactattaaacaccaaatagctttgtaatgcgcaatgtctgaacgtaaaaatacgattaagttattgttggcatatacttatatatttaagtatatatacgattaagttattgttggcatatacttccccagaagggaaagccgaagcattcaaaaattcgcttcaaaacaattttcaaacgccagataacccgaactttgatcgcatatttaaattcaacacagaatacattgtaaatgttactctcaaccactacattccagtctatgatcctatcatggaccccctcacagacagggaaacggagagcttttgccaaatcggcaaaaacagcgctcccggtcctgatggcatcaaccgaaggtgcctcaaaaaacttccagagagtatcatccctcttctaactaaaatattcaatgcatgtctcaaaaacagccactttcctactccttggaaagtggccaacaccatcatgcttttgaaaaaaggcaaacccccaaccgacgtggaatcctacagaccaatttcattaatcaatactctgggtaaagttcttgagctaatcctaagggagaggctcaataactttctcgaaaaccacaatatcataccaaaattccaatatggattccagtcaggtaaatctaccaaacatgcattaatagatttcactaccaaagtcactcaaaccatcaacgatggttctatcgccatagccacatttctggatgtgcagaaggctttcgaccaggtctggcacgacgggcttgttcggaaacttctggacatcgggcttccattgcaatttaccaaaattgtacactcctacctccacaaccgtactgtcagagtgaaaatatgcgatcaaaagtccacccccttcactccacaagctggagttccccagggttcagtcctagcgccgctgttgtacatcatctacaacagcgacatcactaaccaaaatatcccaggtactcggctgtttctctatgcagacgacacgactctgctctcaactacctctcgatacaacccaagactcctcttcagaagagcacaggctctgttggacggtgtcggcgaatggtgttgtaagtggagagtcacgctcaagcgaacaaaacaacaacaattgtgtttcgcgccccttctgtgtcaaatagaatcattcgcaatgaagacgaccaatatcctctgagtttgttgggagaaaggcttgttgttagcccgactgtgaactatttggagttctgtttaccaggactctcaactgggacgcagatctaaaggcaactttagatagggtaaggaacagggccagacttctcaacgctctctctggacgaattggcaagacacacaagaacactctcattcacacttacaagacctttattcgacccgtcatggagtacaagtcatgtatctactctctttgctctaaacaaaaacaagagaggttgttgaggacagagcgcagagtcttgcgtagatgtaactatgagcactggcgatatccctcaaacgaaatccataacatctcgaacacccccaaaatcaccgagagaataaactctctgaacaggaacttcacaatcaaagtaatcaacggccccccttccgacacacaagaatctctcaaatgttcctgttcatcttccggccacgtactccaccgaaagcccaaacgcaaaaagattcatgtaccgtccgctctaatgcaaacatgcattgacgaactcccggtagagtacgaaaacatccttgaggctaccccgttagccttccgtacccacctctaacatttcctcttccctaccccgaacagggagaagttgtttttttgcggtttcccaacttcattgcacaattatacctgttcgtcccaagaaaatagccgcaactattttctccactcgaacgcacactgtccacgctgcactcaaagccacctcctgaccgccgacgagggacgcaggctcgcctgtcgttgtacaatggtttctagggagactggtcgagagcaaagcacggacagtacacgtaaatgtctatggaaccaacaacaatccatcaaactttcttctctgttgtcttcttagccttccggacaccaccgtccggcaccacaggatccaaaaacaccaggacacggcgcttgccccagtgtgttttcgggctgtttgcttttgctgctaacactaaatattcactacaaaccctgaagaggacaaaatcctaaacggggaagcacattgaacgcatttcttcttaacattatcaagacaagcaaatcaaacaatgtagtagtagagttatatattatcatagagagagtgtcattcagagcgaagtgacgacaccatcttttttatttggattagtgctgtttcactcttacgcatagtaaagctgctacagttgtcctcctcttccgtgcctatattcacactgaatgtatcatagattttcgatacaatgtgttagaaagagatgcagcaaaccagtccatgagatcttgtcgtcaggaagcgcggaaggtaggctccctctatgttaatatatacctctatggtttttacctcgtttaaacgcaccttttacgtcaacgt

SEQ ID NO: 1388 - DNA, 1616 bp, Diabrotica virgifera
cacttacaaggggctcgatagcttggttagtagagcattggaccagagatcgagaggtcccgggttccaatcccagatgattcactatttttttttttaatttttggttgttttaataaaaaatttttgaaagtggtaggtaagaaagttagtttaatatttaaataaaatacaactaacctgttaagtatatatttatttctttgaaatcatataatagaagtataacttcttacgtgcgtacaaagtacacacacattctttttttttgagattttactaaacagcctgctaaaggtactagtgaccgagatacacttgtagtttctgcaaatatcttttggacctttttttgtgagttgtagtaatccatgcttctttccaattcttcacaatttcttccccatttaagtatcttgtgaacagcttagatagcttattattagttttggtgttccgttttttagaagttctgctggtatatatgttctccggcccgggtgctttgtttgtgtaccgtataattgtgcaattttgcggtttcccaacttcattgcacaattatacctgttcgtcccaagaaaatagccgcaactattttctccactcgaacgcacactgtccacgctgcactcaaagccacctcctgaccgccgacgagggacgcaggctcgcctgtcgttgtacaatggtttctagggagactggtcgagagcaaagcacggacagtacacgtaaatgtctatggaaccaacaacaatccatcaaactttcttctctgttgtcttcttagccttccggacaccaccgtccggcaccacaggatccaaaaacaccaggacacggcgcttgccccagtgtgttttcgggctgtttgcttttgctgctaacactaaatattcactacaaaccctgaagaggacaaaatcctaaacggggaagcacattgaacgcatttcttcttaacattatcaagacaagcaaatcaaacaatgtagtagtagagttatatattatcatagagagagtgtcattcagagcgaagtgacgacaccatcttttttatttggattagtgctgtttcactcttacgcatagtaaagctgctacagttgtcctcctcttccgtgcctatactcatacttaatgtcatcttagtttctcgatacaatgtgctagaaagagatgccgcaaaccagtccatgagatcttgtcgtcaggaagcgcggagggtaggctcactctatgttaatatttacctctatgattttaacgtacgttgtcagtagcagttatgtcaatattggatgatgagccatagacatattaaggatagacaaggcatattgagcaaaaaagcttaacgcgtgggcagtcgatcggtggtctgtctttctcatttttcaaagtgatcccaagcatgtgacagacaaagatggctagaccactcaaagtgaatattgtccattgatattggcgttacacctcgatgcacagagcggcccataccttgcctggtctaccctttattatgtctatgtgatgagcaaggggtttatttggaaataacttattatgtaattgtttatgtatatggcgtactaaatctccaggcc

SEQ ID NO: 1389 - DNA, 1428 bp, Diabrotica virgifera
  SmartBlast Evalue=2E-82; Info=Endonuclease-reverse transcriptase n=1 Tax=Bombyx mori RepID=D5LB38_BOMMO
tagttgagtgtttgatttatcaaatacctattgacaaatatatgattttaaaaaggattgtataaatgtatgtcgccggtccggaggaagaatgacgtagctgcaaaaagccaaatttctcacgagagcaaaaaacgatttttaaatatttaaaatggggattaaatgaggaacaatcgtccaggatgcgatgaaataccagtcgaatttttaaaagtttttaacgagaacaacatgaatgtagtattggaactgtttaataagatatacgatactggtcaaattccatcggactggttgaaatctacatttgtgccctttcccaagaaatccaattctaagacgtgtagcgaatatcgccttataagtttaatgagtcacacccttaaagtattcttgcgtattatccattccagaatactagcaaaattagaacacagcataagtaaaacacagttcggttttagatgcggttttggaactcgagagcccctatttgcaatacaagtcttgattcaaaaatgcctggatcaacagaaagatgtttacgcctgttttattgactatgagaaagcattcgatactatcaaacatgacaaactcatagaactattacatctttcaggacttgacactaaggacatccagattataaaaaatctatattggaatcaaacagcccacataaagaatggacatatggtgagtgaaaacataaccatttctagaggggttagacagggctgtattctttcgccactgcttttcaacctgtacacggaacaaatatttctagaggcactggaagagtacaatgagggcatcaagattaatggcgtaccaataagtaattttcgatatgcagatgatactgttatactggccgataacatcgaagatttacagatgatgctaaatagagtaaatacaactggcaaccgatttggactgaagatcaatagaaagaaaactaaatttatggtgatcagtaaaaagaacattcaacatgtcgacctgaatattgaagccgaagtattgaaagagtacaccgatttaaatatctgggatatacagtaaatgataattgggacccagacgtagagattatgatccgaattgaaatagcaagatccaaattcataaaaatgagaaagctcttaacccggcacctgccacgtggctttgcaaggcgccaactgccacgtggggtgctcacagcaccccttaaaaattttctgtgatctacttgtttaaaaaacaaaataatgtgttgagtaacacaagaatataaaaaaacatgttttattaacttattagccactaatatgttataaaagttaaaaaataaaatgaaaaagatgttataagcaaattagcaagtaccaagccataataaatgaagtcaaagtaaaaatatacttaaaaaaa

SEQ ID NO: 1390 - DNA, 1248 bp, Diabrotica virgifera
  SmartBlast Evalue=0.000000002; Info=Endonuclease-reverse transcriptase n=1 Tax=Bombyx mori RepID=D5LB38_BOMMO
attaaatatttacataaataaatagaaaaggagtattttgataaaacgttcagcgtttctcgttagctactgcttaacccggcacctgccacgtggctttgcaaggcatcaactgccacgtggggtgctcagagcaccccttaaaaattttctgtgatctacttgtttataaacaaaataatgtgttgagttacacaagtatataaaaaaacatgtcttattaacttattagctactaatatattataaaagttaaaaaataaaattaaaaaggtgttataagcaaattagcaagtaccaacccataataaatgaggtgaagtaaaatatctaaaataattaagatttactgagtatagagactatattaataatttaaatcagttatttcaataaaaaatgtgaatttgacctgtttatcaaaaatacaaaaaaaatttaaaacttaaagtgccagatgatgacaccccaattcgactttagagctatagttcagaatgacactaaatacccacttcaaacactaacacatctatgctatataatattatagaaagctacgatgacgcacagctcggttaccaaacttgaaataccaaatatttgataaaaatgtgttatggggtgctggtagcaccccacgtggcaggtgccgggttaagcaaccgcaacctaagcgttaacctccgatggcgcgccacgaaatgctacgtactctctacgctactttacggagtagaaaggtggacgttaacagcagcaactataaagaagttagcggctctagaaatgtggctgtatcgacgcatactgagaataccttggacagacagagtgaccaacacagaggtattgagacgaatgggtaaagaggtggaattgttaacaactgttaatcctggctgagaaacttgagagaatggtttcaaataccagaagctgcgatgctgcgaacataatagagaaacctatcgtttgatggtcgccaaccttcggtagaagacggcacataaagaagaagaagaagaatcgtccaggagcatcggtatggcgtttattcttacaatgacggcttatccctattggttcgaatttcattatcttaatttaatcccaccattttcaaccctatctacagttgcgtcattattcatctaaaattttttaaatatttaatatagtgattaaataaatagtaaccgtccaggagcattatcatcatcatcagtgacattacagctctttatg

SEQ ID NO: 1391 - DNA, 1224 bp, Diabrotica virgifera
  SmartBlast Evalue=7E-23; Info=Endonuclease-reverse transcriptase n=1 Tax=Bombyx mori RepID=D5LB38_BOMMO
tcagttctttaacacattgacggacagtgcgtcaaatgtgtaagcaagtgttgtgacacatgtattttgcaaagtagaatagggaaattgctgaatttcttttagcgcttattgtttatggaaacaacgagattttaacatattttgtaaacatgtggacgacgaccatggagatcgtgtaacatttattatgcatctgtatatgtaatgtgacatgtttttgacatcgatttttggtcacaactcgttattgtaaaaatatcgtctatagacttcgtgtcacataacatcaatggaaattagacgtctatagacgttctgtccgtcaaagtgttaatgtacagctgcggtgactgaatatattataccttcattttttattttttattttgatatttatgatttatgttctgatatatttatttatctgttattttgattttctaattttaatcaacctatttataaaaagaacattcaacatgtcgacctgaatattgaagccgaagtattgaaagagtacaccgatttaaatatctgggatatacagtaaatgataattgggacccagacgtagagattatgatccgaattgaaatagcaagatccaaattcataaaaatgagaaagttcttaagcaaccgcaacctaagcattaacctccgatggcgcgccacgaaatgctacgtactctctacgctactttacggagtagaaaggtggacgttaacagcagcaactataaagaagttagcggctctagaaatgtggctgtatcgacgcatactgagaataccttggacagacagagtgaccaacacagaggtattgagacgaatgggtaaagaggtggaattgttaacaactgttaatcctggctgagaaacttgagagaatggtttcaaataccagaagctgcgatgctgcgaacataatagagaaacctatcgtttgatggtcgccaaccttcggtagaagacggcacataaagaagaagaagaagaatcgtccaggagcatcggtatggcgtttattcttacaatgacggcttatccctattggttcgaatttcattatcttaatttaatcccaccattttcaaccctatctacagttgcgtcattattcatctaaaattttttaaatatttaatatagtgattaaataaatagtaaccgtccaggagcattatcatcatcatcagtgacattacagctctttatg

SEQ ID NO: 1392 - DNA, 1217 bp, Diabrotica virgifera
  SmartBlast Evalue=7E-23; Info=Endonuclease-reverse transcriptase n=1 Tax=Bombyx mori RepID=D5LB38_BOMMO
tcagttctttaacacattgacggacagtgcgtcaaatgtgtaagcaagtgttgtgacacatgtattttgcaaagtagaatagggaaattgctgaatttcttttagcgcttattgtttatggaaacaacgagattttaacatattttgtaaacatgtggacgacgaccatggagatcgtgtaacatttattatgcatctgtatatgtaatgtgacatgtttttgacatcgatttttggtcacaactcgttattgtaaaaatatcgtctatagacttcgtgtcacataacatcaatggaaattagacgtctatagacgttctgtccgtcaaagtgttaatgtacagctgcggtgactgaatatattataccttcattttttattttttattttgatatttatgttctgatatatttatttatctgtgattttgattttctaattttaatcaacctatttataaaaagaacattcaacatgtcgacctgaatattgaagccgaagtattgaaagagtacaccgatttaaatatctgggatatacagtaaatgataattgggacccagacgtagagattatgatccgaattgaaatagcaagatccaaattcataaaaatgagaaagttcttaagcaaccgcaacctaagcattaacctccgatggcgcgccacgaaatgctacgtactctctacgctactttacggagtagaaaggtggacgttaacagcagcaactataaagaagttagcggctctagaaatgtggctgtatcgacgcatactgagaataccttggacagacagagtgaccaacacagaggtattgagacgaatgggtaaagaggtggaattgttaacaactgttaatcctggctgagaaacttgagagaatggtttcaaataccagaagctgcgatgctgcgaacataatagagaaacctatcgtttgatggtcgccaaccttcggtagaagacggcacataaagaagaagaagaagaatcgtccaggagcatcggtatggcgtttattcttacaatgacggcttatccctattggttcgaatttcattatcttaatttaatcccaccattttcaaccctatctacagttgcgtcattattcatctaaaattttttaaatatttaatatagtgattaaataaatagtaaccgtccaggagcattatcatcatcatcagtgacattacagctctttatg

SEQ ID NO: 1393 - DNA, 904 bp, Diabrotica virgifera
tcagttctttaacacattgacggacagtgcgtcaaatgtgtaagcaagtgttgtgacacatgtattttgcaaagtagaatagggaaattgctgaatttcttttagcgcttattgtttatggaaacaacgagattttaacatattttgtaaacatgtggacgacgaccatggagatcgtgtaacatttattatgcatctgtatatgtaatgtgacatgtttttgacatcgatttttggtcacaactcgttattgtaaaaatatcgtctatagacttcgtgtcacataacatcaatggaaattagacgtctatagacgttctgtccgtcaaagtgttaatgtacagctgcggtgactgaatatattataccttcattttttattttttattttgatatttatgatttatgttctgatatatttatttatctgttattttgattttctaattttaatcaacctatttataaaaagaacattcaacatgtcgacctgaatattgaagccgaagtattgaaagagtacaccgatttaaatatctgggatatacagtaaatgataattgggacccagacgtagagattatgatccgaattgaaatagcaagatccaaattcataaaaatgagaaagctcttaacccggcacctgccacgtggctttgcaaggcgccaactgccacgtggggtgctcacagcaccccttaaaaattttctgtgatctacttgtttaaaaaacaaaataatgtgttgagtaacacaagaatataaaaaaacatgttttattaacttattagccactaatatgttataaaagttaaaaaataaaatgaaaaagatgttataagcaaattagcaagtaccaagccataataaatgaagtcaaagtaaaaatatacttaaaaaaa

SEQ ID NO: 1394 - DNA, 897 bp, Diabrotica virgifera
tcagttctttaacacattgacggacagtgcgtcaaatgtgtaagcaagtgttgtgacacatgtattttgcaaagtagaatagggaaattgctgaatttcttttagcgcttattgtttatggaaacaacgagattttaacatattttgtaaacatgtggacgacgaccatggagatcgtgtaacatttattatgcatctgtatatgtaatgtgacatgtttttgacatcgatttttggtcacaactcgttattgtaaaaatatcgtctatagacttcgtgtcacataacatcaatggaaattagacgtctatagacgttctgtccgtcaaagtgttaatgtacagctgcggtgactgaatatattataccttcattttttattttttattttgatatttatgttctgatatatttatttatctgtgattttgattttctaattttaatcaacctatttataaaaagaacattcaacatgtcgacctgaatattgaagccgaagtattgaaagagtacaccgatttaaatatctgggatatacagtaaatgataattgggacccagacgtagagattatgatccgaattgaaatagcaagatccaaattcataaaaatgagaaagctcttaacccggcacctgccacgtggctttgcaaggcgccaactgccacgtggggtgctcacagcaccccttaaaaattttctgtgatctacttgtttaaaaaacaaaataatgtgttgagtaacacaagaatataaaaaaacatgttttattaacttattagccactaatatgttataaaagttaaaaaataaaatgaaaaagatgttataagcaaattagcaagtaccaagccataataaatgaagtcaaagtaaaaatatacttaaaaaaa

SEQ ID NO: 1395 - DNA, 271 bp, Diabrotica virgifera
ttaacccggcacctgccacgtggctttgcaaggcgccaactgccacgtggggtgctcacagcaccccttaaaaattttctgtgatctacttgtttaaaaaacaaaataatgtgttgagtaacacaagaatataaaaaaacatgttttattaacttattagccactaatatgttataaaagttaaaaaataaaatgaaaaagatgttataagcaaattagcaagtaccaagccataataaatgaagtcaaagtaaaaatatacttaaaaaaa

SEQ ID NO: 1396 - DNA, 3251 bp, Diabrotica virgifera
  SmartBlast Evalue=2E-84; Info=Endonuclease-reverse transcriptase n=1 Tax=Bombyx mori RepID=D7F162_BOMMO
tagttgagtgtttgatttatcaaatacctattgacaaatatatgattttaaaaaggattgtataaatgtatgtcgccggtccggaggaagaatgacgtagctgcaaaaagccaaatttctcacgagagcaaaaaacgatttttaaatatttaaaatggggattaaatgaggaacaatcgtccaggatgcgatgaaataccagtcgaatttttaaaagtttttaacgagaacaacatgaatgtagtattggaactgtttaataagatatacgatactggtcaaattccatcggactggttgaaatctacatttgtgccctttcccaagaaatccaattctaagacgtgtagcgaatatcgccttataagtttaatgagtcacacccttaaagtattcttgcgtattatccattccagaatactagcaaaattagaacacagcataagtaaaacacagttcggttttagatgcggttttggaactcgagagcccctatttgcaatacaagtcttgattcaaaaatgcctggatcaacagaaagatgtttacgcctgttttattgactatgagaaagcattcgatactatcaaacatgacaaactcatagaactattacatctttcaggacttgacactaaggacatccagattataaaaaatctatattggaatcaaacagcccacataaagaatggacatatggtgagtgaaaacataaccatttctagaggggttagacagggctgtattctttcgccactgcttttcaacctgtacacggaacaaatatttctagaggcactggaagagtacaatgagggcatcaagattaatggcgtaccaataagtaattttcgatatgcagatgatactgttatactggccgataacatcgaagatttacagatgatgctaaatagagtaaatacaactggcaaccgatttggactgaagatcaatagaaagaaaactaaatttatggtgatcagtaaaaagaacattcaacatgtcgacctgaatattgaagccgaagtattgaaagagtacaccgatttaaatatctgggatatacagtaaatgataattgggacccagacgtagagattatgatccgaattgaaatagcaagatccaaattcataaaaatgagaaagttcttaagcaaccgcaacctaagcattaacctccgatggcgcgccacgaaatgctacgtactctctacgctactttacggagtagaaaggtggacgttaacagcagcaactataaagaagttagcggctctagaaatgtggctgtatcgacgcatactgagaataccttggacagacagagtgaccaacacagaggtattgagacgaatgggtaaagaggtggaattgttaacaactgttaaaaggaggaaagcgtcatacctgggccacgtgttccgtaatgataagtacagtctgctacagcttatcgtggaaggcaagattgaaggtagaagaggtttgggcggaaagaaaaaatcctggctgagaaacttgagagaatggtttcaaataccagaagctgcgaacataatacatgcggcacaaaacagagaaacctatcgtttgatggtcgccaaccttcggtagaagacggcacaaagaagaagaatcaacctattctgagtccgccactggtaattaagtcactttgacataaaaagtgcgtttaaacgaggtaaaaattcaacaaatccgctattagatatgtaagggtgtaaactattcaatggccgcagctgcagattgaacttcgcgtaaatatattttattttattgtcagtggctaagaatagtatagagtatgagtgaacgggttaaattgtatgcaatctatttttcttacaaaatgtttgtataggcgtggagaactaaattagtgatgttgatgttttattttataattgttatattttttgctttattttaaagttatataatttaaaggattatgaatgtattacagtacgttgtaaaatgggaacataaaaaatttccagttactggaacagttatggatttcccagataaccgaaaaaagacacagaagcagttaaaaagtcgcttttaaaattctccagtttatctacttgaaatttttgatagtccgtgtattatcagaaataatcttcttcttcttgtagtgctgtctcctttagtggaggttatcgactacattagtaaatctgtctctgtccaatgcggaactgaacaaagatgttgaatcaaggccgcggccgatccaatctctgatatttttaagccatgaaatctggcgcctaccgggaccctgttttcttttaatcttcccctggatgatgttgcgcgaggtggtattttcgtttcttattatatgtcccaggtagctaactttgataatctttagcagctctctatctgtacctattttcagcaacaaccattttcgttggtggtgtgggttgtccaaggtattttcaagatccttatataaataagagtgcaaaagcttctaacttattcatcagcgttatgttgagcgtccaggcctccgttccatacaatagtaagggcaatgtgaaataatcgcattgcctttataataaaatttatgttgagttatataaaaattttacccatcaaaacaaaaaacaaatgcattcgtatatgatattgcatatttgcttttattacgaaccaatcttatgtcaagaggcgtccgagtggcatagtagatggatcaatcaatttgcactcttcccacatatgttcgagtattgagttcttacaattgattttaattccctgatataatgtttcagcttttgacaatgaatagttatttattaaggacgcttacaaactaaccactttttgaggtcgaagtcggcagcaaaaaggcgctggcttgtcgcctgtcggttttgatagacatcatttttgtagttaacagcggcaacaaaatgtagtccgtacaggcagattaattatgaattcgaataaagtcattgattttgttgctccttcgaaagcgcagacaaagaaggaggttcagcctgaactgcagcaatgaaagtgtctgtgtcgaatgactccatttttgtcaacactgctttcaaaaacagcaatcacgcttgtacttttttcgctgctaccgtcgtttcaaagtggtttcgtgtgaaacgagaatctctacaattactgagaagtcagccgacgggaggggtgacaaccgacgac

SEQ ID NO: 1397 - DNA, 2751 bp, Diabrotica virgifera
  SmartBlast Evalue=2E-32; Info=Endonuclease-reverse transcriptase n=1 Tax=Bombyx mori RepID=D5LB38_BOMMO
attaaatatttacataaataaatagaaaaggagtattttgataaaacgttcagcgtttctcgttagctactgcttaacccggcacctgccacgtggctttgcaaggcatcaactgccacgtggggtgctcagagcaccccttaaaaattttctgtgatctacttgtttataaacaaaataatgtgttgagttacacaagtatataaaaaaacatgtcttattaacttattagctactaatatattataaaagttaaaaaataaaattaaaaaggtgttataagcaaattagcaagtaccaacccataataaatgaggtgaagtaaaatatctaaaataattaagatttactgagtatagagactatattaataatttaaatcagttatttcaataaaaaatgtgaatttgacctgtttatcaaaaatacaaaaaaaatttaaaacttaaagtgccagatgatgacaccccaattcgactttagagctatagttcagaatgacactaaatacccacttcaaacactaacacatctatgctatataatattatagaaagctacgatgacgcacagctcggttaccaaacttgaaataccaaatatttgataaaaatgtgttatggggtgctggtagcaccccacgtggcaggtgccgggttaagcaaccgcaacctaagcgttaacctccgatggcgcgccacgaaatgctacgtactctctacgctactttacggagtagaaaggtggacgttaacagcagcaactataaagaagttagcggctctagaaatgtggctgtatcgacgcatactgagaataccttggacagacagagtgaccaacacagaggtattgagacgaatgggtaaagaggtggaattgttaacaactgttaaaaggaggaaagcgtcatacctgggccacgtgttccgtaatgataagtacagtctgctacagcttatcgtggaaggcaagattgaaggtagaagaggtttgggcggaaagaaaaaatcctggctgagaaacttgagagaatggtttcaaataccagaagctgcgaacataatacatgcggcacaaaacagagaaacctatcgtttgatggtcgccaaccttcggtagaagacggcacaaagaagaagaatcaacctattctgagtccgccactggtaattaagtcactttgacataaaaagtgcgtttaaacgaggtaaaaattcaacaaatccgctattagatatgtaagggtgtaaactattcaatggccgcagctgcagattgaacttcgcgtaaatatattttattttattgtcagtggctaagaatagtatagagtatgagtgaacgggttaaattgtatgcaatctatttttcttacaaaatgtttgtataggcgtggagaactaaattagtgatgttgatgttttattttataattgttatattttttgctttattttaaagttatataatttaaaggattatgaatgtattacagtacgttgtaaaatgggaacataaaaaatttccagttactggaacagttatggatttcccagataaccgaaaaaagacacagaagcagttaaaaagtcgcttttaaaattctccagtttatctacttgaaatttttgatagtccgtgtattatcagaaataatcttcttcttcttgtagtgctgtctcctttagtggaggttatcgactacattagtaaatctgtctctgtccaatgcggaactgaacaaagatgttgaatcaaggccgcggccgatccaatctctgatatttttaagccatgaaatctggcgcctaccgggaccctgttttcttttaatcttcccctggatgatgttgcgcgaggtggtattttcgtttcttattatatgtcccaggtagctaactttgataatctttagcagctctctatctgtacctattttcagcaacaaccattttcgttggtggtgtgggttgtccaaggtattttcaagatccttatataaataagagtgcaaaagcttctaacttattcatcagcgttatgttgagcgtccaggcctccgttccatacaatagtaagggcaatgtgaaataatcgcattgcctttataataaaatttatgttgagttatataaaaattttacccatcaaaacaaaaaacaaatgcattcgtatatgatattgcatatttgcttttattacgaaccaatcttatgtcaagaggcgtccgagtggcatagtagatggatcaatcaatttgcactcttcccacatatgttcgagtattgagttcttacaattgattttaattccctgatataatgtttcagcttttgacaatgaatagttatttattaaggacgcttacaaactaaccactttttgaggtcgaagtcggcagcaaaaaggcgctggcttgtcgcctgtcggttttgatagacatcatttttgtagttaacagcggcaacaaaatgtagtccgtacaggcagattaattatgaattcgaataaagtcattgattttgttgctccttcgaaagcgcagacaaagaaggaggttcagcctgaactgcagcaatgaaagtgtctgtgtcgaatgactccatttttgtcaacactgctttcaaaaacagcaatcacgcttgtacttttttcgctgctaccgtcgtttcaaagtggtttcgtgtgaaacgagaatctctacaattactgagaagtcagccgacgggaggggtgacaaccgacgac

SEQ ID NO: 1398 - DNA, 2727 bp, Diabrotica virgifera
  SmartBlast Evalue=3E-46; Info=Endonuclease-reverse transcriptase n=1 Tax=Bombyx mori RepID=D5LB38_BOMMO
tcagttctttaacacattgacggacagtgcgtcaaatgtgtaagcaagtgttgtgacacatgtattttgcaaagtagaatagggaaattgctgaatttcttttagcgcttattgtttatggaaacaacgagattttaacatattttgtaaacatgtggacgacgaccatggagatcgtgtaacatttattatgcatctgtatatgtaatgtgacatgtttttgacatcgatttttggtcacaactcgttattgtaaaaatatcgtctatagacttcgtgtcacataacatcaatggaaattagacgtctatagacgttctgtccgtcaaagtgttaatgtacagctgcggtgactgaatatattataccttcattttttattttttattttgatatttatgatttatgttctgatatatttatttatctgttattttgattttctaattttaatcaacctatttataaaaagaacattcaacatgtcgacctgaatattgaagccgaagtattgaaagagtacaccgatttaaatatctgggatatacagtaaatgataattgggacccagacgtagagattatgatccgaattgaaatagcaagatccaaattcataaaaatgagaaagttcttaagcaaccgcaacctaagcattaacctccgatggcgcgccacgaaatgctacgtactctctacgctactttacggagtagaaaggtggacgttaacagcagcaactataaagaagttagcggctctagaaatgtggctgtatcgacgcatactgagaataccttggacagacagagtgaccaacacagaggtattgagacgaatgggtaaagaggtggaattgttaacaactgttaaaaggaggaaagcgtcatacctgggccacgtgttccgtaatgataagtacagtctgctacagcttatcgtggaaggcaagattgaaggtagaagaggtttgggcggaaagaaaaaatcctggctgagaaacttgagagaatggtttcaaataccagaagctgcgaacataatacatgcggcacaaaacagagaaacctatcgtttgatggtcgccaaccttcggtagaagacggcacaaagaagaagaatcaacctattctgagtccgccactggtaattaagtcactttgacataaaaagtgcgtttaaacgaggtaaaaattcaacaaatccgctattagatatgtaagggtgtaaactattcaatggccgcagctgcagattgaacttcgcgtaaatatattttattttattgtcagtggctaagaatagtatagagtatgagtgaacgggttaaattgtatgcaatctatttttcttacaaaatgtttgtataggcgtggagaactaaattagtgatgttgatgttttattttataattgttatattttttgctttattttaaagttatataatttaaaggattatgaatgtattacagtacgttgtaaaatgggaacataaaaaatttccagttactggaacagttatggatttcccagataaccgaaaaaagacacagaagcagttaaaaagtcgcttttaaaattctccagtttatctacttgaaatttttgatagtccgtgtattatcagaaataatcttcttcttcttgtagtgctgtctcctttagtggaggttatcgactacattagtaaatctgtctctgtccaatgcggaactgaacaaagatgttgaatcaaggccgcggccgatccaatctctgatatttttaagccatgaaatctggcgcctaccgggaccctgttttcttttaatcttcccctggatgatgttgcgcgaggtggtattttcgtttcttattatatgtcccaggtagctaactttgataatctttagcagctctctatctgtacctattttcagcaacaaccattttcgttggtggtgtgggttgtccaaggtattttcaagatccttatataaataagagtgcaaaagcttctaacttattcatcagcgttatgttgagcgtccaggcctccgttccatacaatagtaagggcaatgtgaaataatcgcattgcctttataataaaatttatgttgagttatataaaaattttacccatcaaaacaaaaaacaaatgcattcgtatatgatattgcatatttgcttttattacgaaccaatcttatgtcaagaggcgtccgagtggcatagtagatggatcaatcaatttgcactcttcccacatatgttcgagtattgagttcttacaattgattttaattccctgatataatgtttcagcttttgacaatgaatagttatttattaaggacgcttacaaactaaccactttttgaggtcgaagtcggcagcaaaaaggcgctggcttgtcgcctgtcggttttgatagacatcatttttgtagttaacagcggcaacaaaatgtagtccgtacaggcagattaattatgaattcgaataaagtcattgattttgttgctccttcgaaagcgcagacaaagaaggaggttcagcctgaactgcagcaatgaaagtgtctgtgtcgaatgactccatttttgtcaacactgctttcaaaaacagcaatcacgcttgtacttttttcgctgctaccgtcgtttcaaagtggtttcgtgtgaaacgagaatctctacaattactgagaagtcagccgacgggaggggtgacaaccgacgac

SEQ ID NO: 1399 - DNA, 2720 bp, Diabrotica virgifera
  SmartBlast Evalue=3E-46; Info=Endonuclease-reverse transcriptase n=1 Tax=Bombyx mori RepID=D5LB38_BOMMO
tcagttctttaacacattgacggacagtgcgtcaaatgtgtaagcaagtgttgtgacacatgtattttgcaaagtagaatagggaaattgctgaatttcttttagcgcttattgtttatggaaacaacgagattttaacatattttgtaaacatgtggacgacgaccatggagatcgtgtaacatttattatgcatctgtatatgtaatgtgacatgtttttgacatcgatttttggtcacaactcgttattgtaaaaatatcgtctatagacttcgtgtcacataacatcaatggaaattagacgtctatagacgttctgtccgtcaaagtgttaatgtacagctgcggtgactgaatatattataccttcattttttattttttattttgatatttatgttctgatatatttatttatctgtgattttgattttctaattttaatcaacctatttataaaaagaacattcaacatgtcgacctgaatattgaagccgaagtattgaaagagtacaccgatttaaatatctgggatatacagtaaatgataattgggacccagacgtagagattatgatccgaattgaaatagcaagatccaaattcataaaaatgagaaagttcttaagcaaccgcaacctaagcattaacctccgatggcgcgccacgaaatgctacgtactctctacgctactttacggagtagaaaggtggacgttaacagcagcaactataaagaagttagcggctctagaaatgtggctgtatcgacgcatactgagaataccttggacagacagagtgaccaacacagaggtattgagacgaatgggtaaagaggtggaattgttaacaactgttaaaaggaggaaagcgtcatacctgggccacgtgttccgtaatgataagtacagtctgctacagcttatcgtggaaggcaagattgaaggtagaagaggtttgggcggaaagaaaaaatcctggctgagaaacttgagagaatggtttcaaataccagaagctgcgaacataatacatgcggcacaaaacagagaaacctatcgtttgatggtcgccaaccttcggtagaagacggcacaaagaagaagaatcaacctattctgagtccgccactggtaattaagtcactttgacataaaaagtgcgtttaaacgaggtaaaaattcaacaaatccgctattagatatgtaagggtgtaaactattcaatggccgcagctgcagattgaacttcgcgtaaatatattttattttattgtcagtggctaagaatagtatagagtatgagtgaacgggttaaattgtatgcaatctatttttcttacaaaatgtttgtataggcgtggagaactaaattagtgatgttgatgttttattttataattgttatattttttgctttattttaaagttatataatttaaaggattatgaatgtattacagtacgttgtaaaatgggaacataaaaaatttccagttactggaacagttatggatttcccagataaccgaaaaaagacacagaagcagttaaaaagtcgcttttaaaattctccagtttatctacttgaaatttttgatagtccgtgtattatcagaaataatcttcttcttcttgtagtgctgtctcctttagtggaggttatcgactacattagtaaatctgtctctgtccaatgcggaactgaacaaagatgttgaatcaaggccgcggccgatccaatctctgatatttttaagccatgaaatctggcgcctaccgggaccctgttttcttttaatcttcccctggatgatgttgcgcgaggtggtattttcgtttcttattatatgtcccaggtagctaactttgataatctttagcagctctctatctgtacctattttcagcaacaaccattttcgttggtggtgtgggttgtccaaggtattttcaagatccttatataaataagagtgcaaaagcttctaacttattcatcagcgttatgttgagcgtccaggcctccgttccatacaatagtaagggcaatgtgaaataatcgcattgcctttataataaaatttatgttgagttatataaaaattttacccatcaaaacaaaaaacaaatgcattcgtatatgatattgcatatttgcttttattacgaaccaatcttatgtcaagaggcgtccgagtggcatagtagatggatcaatcaatttgcactcttcccacatatgttcgagtattgagttcttacaattgattttaattccctgatataatgtttcagcttttgacaatgaatagttatttattaaggacgcttacaaactaaccactttttgaggtcgaagtcggcagcaaaaaggcgctggcttgtcgcctgtcggttttgatagacatcatttttgtagttaacagcggcaacaaaatgtagtccgtacaggcagattaattatgaattcgaataaagtcattgattttgttgctccttcgaaagcgcagacaaagaaggaggttcagcctgaactgcagcaatgaaagtgtctgtgtcgaatgactccatttttgtcaacactgctttcaaaaacagcaatcacgcttgtacttttttcgctgctaccgtcgtttcaaagtggtttcgtgtgaaacgagaatctctacaattactgagaagtcagccgacgggaggggtgacaaccgacgac

SEQ ID NO: 1400 - DNA, 2452 bp, Diabrotica virgifera
  SmartBlast Evalue=1E-84; Info=Endonuclease-reverse transcriptase n=1 Tax=Bombyx mori RepID=D7F162_BOMMO
tagttgagtgtttgatttatcaaatacctattgacaaatatatgattttaaaaaggattgtataaatgtatgtcgccggtccggaggaagaatgacgtagctgcaaaaagccaaatttctcacgagagcaaaaaacgatttttaaatatttaaaatggggattaaatgaggaacaatcgtccaggatgcgatgaaataccagtcgaatttttaaaagtttttaacgagaacaacatgaatgtagtattggaactgtttaataagatatacgatactggtcaaattccatcggactggttgaaatctacatttgtgccctttcccaagaaatccaattctaagacgtgtagcgaatatcgccttataagtttaatgagtcacacccttaaagtattcttgcgtattatccattccagaatactagcaaaattagaacacagcataagtaaaacacagttcggttttagatgcggttttggaactcgagagcccctatttgcaatacaagtcttgattcaaaaatgcctggatcaacagaaagatgtttacgcctgttttattgactatgagaaagcattcgatactatcaaacatgacaaactcatagaactattacatctttcaggacttgacactaaggacatccagattataaaaaatctatattggaatcaaacagcccacataaagaatggacatatggtgagtgaaaacataaccatttctagaggggttagacagggctgtattctttcgccactgcttttcaacctgtacacggaacaaatatttctagaggcactggaagagtacaatgagggcatcaagattaatggcgtaccaataagtaattttcgatatgcagatgatactgttatactggccgataacatcgaagatttacagatgatgctaaatagagtaaatacaactggcaaccgatttggactgaagatcaatagaaagaaaactaaatttatggtgatcagtaaaaagaacattcaacatgtcgacctgaatattgaagccgaagtattgaaagagtacaccgatttaaatatctgggatatacagtaaatgataattgggacccagacgtagagattatgatccgaattgaaatagcaagatccaaattcataaaaatgagaaagttcttaagcaaccgcaacctaagcattaacctccgatggcgcgccacgaaatgctacgtactctctacgctactttacggagtagaaaggtggacgttaacagcagcaactataaagaagttagcggctctagaaatgtggctgtatcgacgcatactgagaataccttggacagacagagtgaccaacacagaggtattgagacgaatgggtaaagaggtggaattgttaacaactgttaaaaggaggaaagcgtcatacctgggccacgtgttccgtaatgataagtacagtctgctacagcttatcgtggaaggcaagattgaaggtagaagaggtttgggcggaaagaaaaaatcctggctgagaaacttgagagaatggtttcaaataccagaagctgcgaacataatacatgcggcacaaaacagagaaacctatcgtttgatggtcgccaaccttcggtagaagacggcacaaagaagaagaatcaacctattctgagtccgccactggtaattaagtcactttgacataaaaagtgcgtttaaacgaggtaaaaattcaacaaatccgctattagatatgtaagggtgtaaactattcaatggccgcagctgcagattgaacttcgcgtaaatatattttattttattgtcagtggctaagaatagtatagagtatgagtgaacgggttaaattgtatgcaatctatttttcttacaaaatgtttgtataggcgtggagaactaaattagtgatgttgatgttttattttataattgttatattttttgctttattttaaagttatataatttaaaggattatgaatgtattacagtacgttgtaaaatgggaacataaaaaatttccagttactggaacagttatggatttcccagataaccgaaaaaagacacagaagcagttaaaaagtcgcttttaaaattctccagtttatctacttgaaatttttgatagtccgtgtattatcagaaataatcttcttcttcttgtagtgctgtctcctttagtggaggttatcgactacattagtaaatctgtctctgtccaatgcggaactgaacaaagatgttgaatcaaggccgcggccgatccaatctctgatatttttaagccatgaaatctggcgcctaccgggaccccgtttcctttaatctgttcctggatgatcagttgcgcgaggtggtacttttcgtttctcattatgtgtctcaggtagctaactttgataattactaaagaagtaaaaaatcttcctttctagatggtac

SEQ ID NO: 1401 - DNA, 1952 bp, Diabrotica virgifera
  SmartBlast Evalue=1E-32; Info=Endonuclease-reverse transcriptase n=1 Tax=Bombyx mori RepID=D5LB38_BOMMO
attaaatatttacataaataaatagaaaaggagtattttgataaaacgttcagcgtttctcgttagctactgcttaacccggcacctgccacgtggctttgcaaggcatcaactgccacgtggggtgctcagagcaccccttaaaaattttctgtgatctacttgtttataaacaaaataatgtgttgagttacacaagtatataaaaaaacatgtcttattaacttattagctactaatatattataaaagttaaaaaataaaattaaaaaggtgttataagcaaattagcaagtaccaacccataataaatgaggtgaagtaaaatatctaaaataattaagatttactgagtatagagactatattaataatttaaatcagttatttcaataaaaaatgtgaatttgacctgtttatcaaaaatacaaaaaaaatttaaaacttaaagtgccagatgatgacaccccaattcgactttagagctatagttcagaatgacactaaatacccacttcaaacactaacacatctatgctatataatattatagaaagctacgatgacgcacagctcggttaccaaacttgaaataccaaatatttgataaaaatgtgttatggggtgctggtagcaccccacgtggcaggtgccgggttaagcaaccgcaacctaagcgttaacctccgatggcgcgccacgaaatgctacgtactctctacgctactttacggagtagaaaggtggacgttaacagcagcaactataaagaagttagcggctctagaaatgtggctgtatcgacgcatactgagaataccttggacagacagagtgaccaacacagaggtattgagacgaatgggtaaagaggtggaattgttaacaactgttaaaaggaggaaagcgtcatacctgggccacgtgttccgtaatgataagtacagtctgctacagcttatcgtggaaggcaagattgaaggtagaagaggtttgggcggaaagaaaaaatcctggctgagaaacttgagagaatggtttcaaataccagaagctgcgaacataatacatgcggcacaaaacagagaaacctatcgtttgatggtcgccaaccttcggtagaagacggcacaaagaagaagaatcaacctattctgagtccgccactggtaattaagtcactttgacataaaaagtgcgtttaaacgaggtaaaaattcaacaaatccgctattagatatgtaagggtgtaaactattcaatggccgcagctgcagattgaacttcgcgtaaatatattttattttattgtcagtggctaagaatagtatagagtatgagtgaacgggttaaattgtatgcaatctatttttcttacaaaatgtttgtataggcgtggagaactaaattagtgatgttgatgttttattttataattgttatattttttgctttattttaaagttatataatttaaaggattatgaatgtattacagtacgttgtaaaatgggaacataaaaaatttccagttactggaacagttatggatttcccagataaccgaaaaaagacacagaagcagttaaaaagtcgcttttaaaattctccagtttatctacttgaaatttttgatagtccgtgtattatcagaaataatcttcttcttcttgtagtgctgtctcctttagtggaggttatcgactacattagtaaatctgtctctgtccaatgcggaactgaacaaagatgttgaatcaaggccgcggccgatccaatctctgatatttttaagccatgaaatctggcgcctaccgggaccccgtttcctttaatctgttcctggatgatcagttgcgcgaggtggtacttttcgtttctcattatgtgtctcaggtagctaactttgataattactaaagaagtaaaaaatcttcctttctagatggtac

SEQ ID NO: 1402 - DNA, 1928 bp, Diabrotica virgifera
  SmartBlast Evalue=2E-46; Info=Endonuclease-reverse transcriptase n=1 Tax=Bombyx mori RepID=D5LB38_BOMMO
tcagttctttaacacattgacggacagtgcgtcaaatgtgtaagcaagtgttgtgacacatgtattttgcaaagtagaatagggaaattgctgaatttcttttagcgcttattgtttatggaaacaacgagattttaacatattttgtaaacatgtggacgacgaccatggagatcgtgtaacatttattatgcatctgtatatgtaatgtgacatgtttttgacatcgatttttggtcacaactcgttattgtaaaaatatcgtctatagacttcgtgtcacataacatcaatggaaattagacgtctatagacgttctgtccgtcaaagtgttaatgtacagctgcggtgactgaatatattataccttcattttttattttttattttgatatttatgatttatgttctgatatatttatttatctgttattttgattttctaattttaatcaacctatttataaaaagaacattcaacatgtcgacctgaatattgaagccgaagtattgaaagagtacaccgatttaaatatctgggatatacagtaaatgataattgggacccagacgtagagattatgatccgaattgaaatagcaagatccaaattcataaaaatgagaaagttcttaagcaaccgcaacctaagcattaacctccgatggcgcgccacgaaatgctacgtactctctacgctactttacggagtagaaaggtggacgttaacagcagcaactataaagaagttagcggctctagaaatgtggctgtatcgacgcatactgagaataccttggacagacagagtgaccaacacagaggtattgagacgaatgggtaaagaggtggaattgttaacaactgttaaaaggaggaaagcgtcatacctgggccacgtgttccgtaatgataagtacagtctgctacagcttatcgtggaaggcaagattgaaggtagaagaggtttgggcggaaagaaaaaatcctggctgagaaacttgagagaatggtttcaaataccagaagctgcgaacataatacatgcggcacaaaacagagaaacctatcgtttgatggtcgccaaccttcggtagaagacggcacaaagaagaagaatcaacctattctgagtccgccactggtaattaagtcactttgacataaaaagtgcgtttaaacgaggtaaaaattcaacaaatccgctattagatatgtaagggtgtaaactattcaatggccgcagctgcagattgaacttcgcgtaaatatattttattttattgtcagtggctaagaatagtatagagtatgagtgaacgggttaaattgtatgcaatctatttttcttacaaaatgtttgtataggcgtggagaactaaattagtgatgttgatgttttattttataattgttatattttttgctttattttaaagttatataatttaaaggattatgaatgtattacagtacgttgtaaaatgggaacataaaaaatttccagttactggaacagttatggatttcccagataaccgaaaaaagacacagaagcagttaaaaagtcgcttttaaaattctccagtttatctacttgaaatttttgatagtccgtgtattatcagaaataatcttcttcttcttgtagtgctgtctcctttagtggaggttatcgactacattagtaaatctgtctctgtccaatgcggaactgaacaaagatgttgaatcaaggccgcggccgatccaatctctgatatttttaagccatgaaatctggcgcctaccgggaccccgtttcctttaatctgttcctggatgatcagttgcgcgaggtggtacttttcgtttctcattatgtgtctcaggtagctaactttgataattactaaagaagtaaaaaatcttcctttctagatggtac

SEQ ID NO: 1403 - DNA, 1921 bp, Diabrotica virgifera
  SmartBlast Evalue=2E-46; Info=Endonuclease-reverse transcriptase n=1 Tax=Bombyx mori RepID=D5LB38_BOMMO
tcagttctttaacacattgacggacagtgcgtcaaatgtgtaagcaagtgttgtgacacatgtattttgcaaagtagaatagggaaattgctgaatttcttttagcgcttattgtttatggaaacaacgagattttaacatattttgtaaacatgtggacgacgaccatggagatcgtgtaacatttattatgcatctgtatatgtaatgtgacatgtttttgacatcgatttttggtcacaactcgttattgtaaaaatatcgtctatagacttcgtgtcacataacatcaatggaaattagacgtctatagacgttctgtccgtcaaagtgttaatgtacagctgcggtgactgaatatattataccttcattttttattttttattttgatatttatgttctgatatatttatttatctgtgattttgattttctaattttaatcaacctatttataaaaagaacattcaacatgtcgacctgaatattgaagccgaagtattgaaagagtacaccgatttaaatatctgggatatacagtaaatgataattgggacccagacgtagagattatgatccgaattgaaatagcaagatccaaattcataaaaatgagaaagttcttaagcaaccgcaacctaagcattaacctccgatggcgcgccacgaaatgctacgtactctctacgctactttacggagtagaaaggtggacgttaacagcagcaactataaagaagttagcggctctagaaatgtggctgtatcgacgcatactgagaataccttggacagacagagtgaccaacacagaggtattgagacgaatgggtaaagaggtggaattgttaacaactgttaaaaggaggaaagcgtcatacctgggccacgtgttccgtaatgataagtacagtctgctacagcttatcgtggaaggcaagattgaaggtagaagaggtttgggcggaaagaaaaaatcctggctgagaaacttgagagaatggtttcaaataccagaagctgcgaacataatacatgcggcacaaaacagagaaacctatcgtttgatggtcgccaaccttcggtagaagacggcacaaagaagaagaatcaacctattctgagtccgccactggtaattaagtcactttgacataaaaagtgcgtttaaacgaggtaaaaattcaacaaatccgctattagatatgtaagggtgtaaactattcaatggccgcagctgcagattgaacttcgcgtaaatatattttattttattgtcagtggctaagaatagtatagagtatgagtgaacgggttaaattgtatgcaatctatttttcttacaaaatgtttgtataggcgtggagaactaaattagtgatgttgatgttttattttataattgttatattttttgctttattttaaagttatataatttaaaggattatgaatgtattacagtacgttgtaaaatgggaacataaaaaatttccagttactggaacagttatggatttcccagataaccgaaaaaagacacagaagcagttaaaaagtcgcttttaaaattctccagtttatctacttgaaatttttgatagtccgtgtattatcagaaataatcttcttcttcttgtagtgctgtctcctttagtggaggttatcgactacattagtaaatctgtctctgtccaatgcggaactgaacaaagatgttgaatcaaggccgcggccgatccaatctctgatatttttaagccatgaaatctggcgcctaccgggaccccgtttcctttaatctgttcctggatgatcagttgcgcgaggtggtacttttcgtttctcattatgtgtctcaggtagctaactttgataattactaaagaagtaaaaaatcttcctttctagatggtac

SEQ ID NO: 1404 - DNA, 1748 bp, Diabrotica virgifera
  SmartBlast Evalue=2E-82; Info=Endonuclease-reverse transcriptase n=1 Tax=Bombyx mori RepID=D5LB38_BOMMO
tagttgagtgtttgatttatcaaatacctattgacaaatatatgattttaaaaaggattgtataaatgtatgtcgccggtccggaggaagaatgacgtagctgcaaaaagccaaatttctcacgagagcaaaaaacgatttttaaatatttaaaatggggattaaatgaggaacaatcgtccaggatgcgatgaaataccagtcgaatttttaaaagtttttaacgagaacaacatgaatgtagtattggaactgtttaataagatatacgatactggtcaaattccatcggactggttgaaatctacatttgtgccctttcccaagaaatccaattctaagacgtgtagcgaatatcgccttataagtttaatgagtcacacccttaaagtattcttgcgtattatccattccagaatactagcaaaattagaacacagcataagtaaaacacagttcggttttagatgcggttttggaactcgagagcccctatttgcaatacaagtcttgattcaaaaatgcctggatcaacagaaagatgtttacgcctgttttattgactatgagaaagcattcgatactatcaaacatgacaaactcatagaactattacatctttcaggacttgacactaaggacatccagattataaaaaatctatattggaatcaaacagcccacataaagaatggacatatggtgagtgaaaacataaccatttctagaggggttagacagggctgtattctttcgccactgcttttcaacctgtacacggaacaaatatttctagaggcactggaagagtacaatgagggcatcaagattaatggcgtaccaataagtaattttcgatatgcagatgatactgttatactggccgataacatcgaagatttacagatgatgctaaatagagtaaatacaactggcaaccgatttggactgaagatcaatagaaagaaaactaaatttatggtgatcagtaaaaagaacattcaacatgtcgacctgaatattgaagccgaagtattgaaagagtacaccgatttaaatatctgggatatacagtaaatgataattgggacccagacgtagagattatgatccgaattgaaatagcaagatccaaattcataaaaatgagaaagttcttaagcaaccgcaacctaagcattaacctccgatggcgcgccacgaaatgctacgtactctctacgctactttacggagtagaaaggtggacgttaacagcagcaactataaagaagttagcggctctagaaatgtggctgtatcgacgcatactgagaataccttggacagacagagtgaccaacacagaggtattgagacgaatgggtaaagaggtggaattgttaacaactgttaatcctggctgagaaacttgagagaatggtttcaaataccagaagctgcgatgctgcgaacataatagagaaacctatcgtttgatggtcgccaaccttcggtagaagacggcacataaagaagaagaagaagaatcgtccaggagcatcggtatggcgtttattcttacaatgacggcttatccctattggttcgaatttcattatcttaatttaatcccaccattttcaaccctatctacagttgcgtcattattcatctaaaattttttaaatatttaatatagtgattaaataaatagtaaccgtccaggagcattatcatcatcatcagtgacattacagctctttatg

SEQ ID NO: 1405 - DNA, 461 bp, Diabrotica virgifera
attagtcgatgctgtggttccacagcagaagaattatttcgagccgaagtcgatagagaaaggtaaaaaatgagatatttttgaacgcagtgcatcaaaattatttaaaaccagctcaaaaatagcccaacgcaatagtggtataattatgtctcaagattctaacttcagatacactctaggcatatacatattacatacaataaatcatcattctctttgccttatccctatgcggggtcggcttccctaattgcatttctccacacaattctgtcttgggtcatatcaatgttaatcccctttaccaacatgtcctgccttatcgtctccccccaggtcttctttggtcttcctctcctactccttccagaaatctgcacaacttaccgtactatcccttgcaatataattcggatggaatttcccagattaggagactggggcgatatcaagcacaa

SEQ ID NO: 1406 - DNA, 429 bp, Diabrotica virgifera
attagtcgatgctgtggttccacagcagaagaattatttcgagccgaagtcgatagagaaaggtaaaaaatgagatatttttgaacgcagtgcatcaaaattatttaaaaccagctcaaaaatagcccaacgcaatagtggtataattatgtctcaagattctaacttcagatacactctaggcatatacatattacatacaataaatcatcattctctttgccttatccctatgcggggtcggcttccctaattgcatttctccacacaattctatcttgggccatatcaatgttaatcccctttaccaacatgtcctgccttatcgtctccccccaggtcttctttggtcttcctctcctactccttccaggaatctgcacttcagctattcttcgtattgggtggttaacgtctcgacgttgaaca

SEQ ID NO: 1407 - DNA, 385 bp, Diabrotica virgifera
cctgaatgaccttagtggattcagatatttctacacaatagggaacttgcacatttttttagtacataataatgttcagttttgtttaaaaatgagatttccaaaatttcacgctttaaaaactcatatcatcatcattctctttgccttatccctatgcggggtcggcttccctaattgcatttctccacacaattctgtcttgggtcatatcaatgttaatcccctttaccaacatgtcctgccttatcgtctccccccaggtcttctttggtcttcctctcctactccttccagaaatctgcacaacttaccgtactatcccttgcaatataattcggatggaatttcccagattaggagactggggcgatatcaagcacaa

SEQ ID NO: 1408 - DNA, 353 bp, Diabrotica virgifera
cctgaatgaccttagtggattcagatatttctacacaatagggaacttgcacatttttttagtacataataatgttcagttttgtttaaaaatgagatttccaaaatttcacgctttaaaaactcatatcatcatcattctctttgccttatccctatgcggggtcggcttccctaattgcatttctccacacaattctatcttgggccatatcaatgttaatcccctttaccaacatgtcctgccttatcgtctccccccaggtcttctttggtcttcctctcctactccttccaggaatctgcacttcagctattcttcgtattgggtggttaacgtctcgacgttgaaca

SEQ ID NO: 1409 - DNA, 3197 bp, Diabrotica virgifera
aaaatataccttgtttagttggcaataaatcggataaagcagaatatctaatatcaagcggccgcaatatgctttggtgtgatgagcggacaaacgcggtggtctccaataaacgcagtaggtcgcgtacagcgtcacgccatacgttgtgtctatttgctttggatgaggtctcttattttgtaagctgaacacagcaattagtggagaccaccgccctaagagagcgtcaactattcgcgatgaaaaacaaagtagctgacgtctggtggaataaatttaaactactataagtggtataaacaaaccagaaaattgttgatctgaattgaatttggtcactattaagaaatttttagtaaatttcagcatcatgagtacattaaaatattttaaatcaaatcggtattgttctattcctcaaatgaatgtttgtttataccatgtatatctgccattttcttgcattcgacctgccctctatattccgtttcaatcgcgaatagtttggacagtgttgaatggacgagcaacatacacatacaagtgattaaaaatgaggatcataattatctttagaaaaaagtaaactacaaaactgtagttaagactcgattgatgatgtgtttctccatattacataatatcttatgggaaagttttaaatcctgatccaaaacatgctcatgatacacttcgagtacctactaaaattattgtttatcgtgtaatcgtgtaggacagaatatttcttttaaattatattaaaaacacctagctaccgaatgacaagttataatatttcatataagtattactttacactatcaactaataataataatttcgtatgacattttttccggggagatccttttgggcaggttccggcaccaatggcattggtaaccctgtttcaagtagctaatgtcttccccaccttgactttacagtacacgaacatacggcaatacaatccttatgggagtttttagcgcggcgatgccgattttcttcaaaagaattttcaatcggacattaccaaggtcctaaaaatgtaggtccctaaaaattttaaattaaaactaacccgttacagtcaagtaaaacaatatgtttcattgtttttttgtgtgatagtcattttcgaaaaagtaatcagcaattttataatcgatatgcgtaataactttttttggttaagaatgttagaatattcaacattaaaagtggatgttgttctatattatggttgttaatttatgtattgacagtacttaagacagttctgaagtaatgtcaagaaaaatataaaatagattgtcagtcaagtttaagtaaagttttatattgtcctaccaggtcctacagttgagaataaataaaggataattgttgatggtcagttcacctaaattaaattataacaaagaatattaaataagcttaaaattattactgataacattgtattgagtaactcattgcttatttgaaaaattttgatcctaattgcagtttattgttattcttaacgactgatttccaagatgaaagtaatgtcattttaatgtgtttacaccctacgacagtggcagtgaaagtgagggagacgggattatagaaagaagctaaaatatatatagtttaaatgtattttaattatttctgtaggtacctacgtatttattaaggtttaacatatttatgcgcttaaatacattattatataaatgatttatacaaaattatttttattttgttcacataaaggtatttttcgaaaaaaaaaaatgttttagaaccccttacagccacaaaatgtcaataatattaattcctaagttattaatagttatcctatagaaaaagtatgtttgcttaaaacctgtttctgataaaatttggcatcactgttggtcataagaacctgtactgtaaagtcaaggtgggacgcacaatagtgtcgatgcaccctagcctagggggaccgattgctttacgtgccctccgaagcactagtatcattcatatcagtatcttgtcgctacaaagtaactaactgtcgctaactaagccaagtacacatatatgataaattttgtttcaatttgcttatgcttgctcttggatacttgattatatataactgaattttgtttacataatcgaccaaaatttgtttaaaatatatttgtgacgtcatccaccttcgctttgcggccgtatgatagcgacactgcttttctaggaaaccctgcagtctacagttctagcttgttttcctgtgaaaaacaagtatttttatttacattttaaaacctaaaaagtatctacataatgggatatttttaattattgattaaaataaaaaaattcaacaattttggacacatgtcaaatatcacattatgtattttacaataagtaagtctttgaaaaaatacttcttctctagtctaacgtctactgtatcaaaagatacagaaaaactaatttatctgaagtattgtaataatagatgtaacagtgcactctcacggattctgaattaaaattcattgaattgagcaggccagagcagctttaagaaggttgtccaaggtattatgtaacagagacctaaaattgctagagtacttcggacatgtaatgagaggttccaaatataggttgccacaaaatattatgcaattgatattaagtgcattgacagacatgaataaaattaagatagacatgacggtacatattataggctatttattatgtatttcagaaaggaactacaacgttaacagggttttattatttcacatggtcaatggacctccaaatatgaaaacatcgtggagtgctatcatttaaaccggtgcgcttttgagaaacgggtgaatcagtccccaggcacagggcgaattaggttgagttccatgcacttttggtacaaacacgtctacagcaaaactattccagattaaatttactatcgaaatatcacattttaaagtcaaaaatatttttccacaaaaatatattcaaaagaaaagcaagaaaaaaacacgaaagatggcaactccgccctttgccccataacttctttccacggggatataggtatagcaattgctgtacagaaaaaacaaccatccttcctctttaaaacgtcgttcggtagaagtctctacgacttatag

SEQ ID NO: 1410 - DNA, 2089 bp, Diabrotica virgifera
aaaatataccttgtttagttggcaataaatcggataaagcagaatatctaatatcaagcggccgcaatatgctttggtgtgatgagcggacaaacgcggtggtctccaataaacgcagtaggtcgcgtacagcgtcacgccatacgttgtgtctatttgctttggatgaggtctcttattttgtaagctgaacacagcaattagtggagaccaccgccctaagagagcgtcaactattcgcgatgaaaaacaaagtagctgacgtctggtggaataaatttaaactactataagtggtataaacaaaccagaaaattgttgatctgaattgaatttggtcactattaagaaatttttagtaaatttcagcatcatgagtacattaaaatattttaaatcaaatcggtattgttctattcctcaaatgaatgtttgtttataccatgtatatctgccattttcttgcattcgacctgccctctatattccgtttcaatcgcgaatagtttggacagtgttgaatggacgagcaacatacacatacaagtgattaaaaatgaggatcataattatctttagaaaaaagtaaactacaaaactgtagttaagactcgattgatgatgtgtttctccatattacataatatcttatgggaaagttttaaatcctgatccaaaacatgctcatgatacacttcgagtacctactaaaattattgtttatcgtgtaatcgtgtaggacagaatatttcttttaaattatattaaaaacacctagctaccgaatgacaagttataatatttcatataagtattactttacactatcaactaataataataatttcgtatgacattttttccggggagatccttttgggcaggttccggcaccaatggcattggtaaccctgtttcaagtagctaatgtcttccccaccttgactttacagtacacgaacatacggcaatacaatccttatgggagtttttagcgcggcgatgccgattttcttcaaaagaattttcaatcggacattaccaaggtcctaaaaatgtaggtccctaaaaattttaaattaaaactaacccgttacagtcaagtaaaacaatatgtttcattgtttttttgtgtgatagtcattttcgaaaaagtaatcagcaattttataatcgatatgcgtaataactttttttggttaagaatgttagaatattcaacattaaaagtggatgttgttctatattatggttgttaatttatgtattgacagtacttaagacagttctgaagtaatgtcaagaaaaatataaaatagattgtcagtcaagtttaagtaaagttttatattgtcctaccaggtcctacagttgagaataaataaaggataattgttgatggtcagttcacctaaattaaattataacaaagaatattaaataagcttaaaattattactgataacattgtattgagtaactcattgcttatttgaaaaattttgatcctaattgcagtttattgttattcttaacgactgatttccaagatgaaagtaatgtcattttaatgtgtttacaccctacgacagtggcagtgaaagtgagggagacgggattatagaaagaagctaaaatatatatagtttaaatgtattttaattatttctgtaggtacctacgtatttattaaggtttaacatatttatgcgcttaaatacattattatataaatgatttatacaaaattatttttattttgttcacataaaggtatttttcgaaaaaaaaaaatgttttagaaccccttacagccacaaaatgtcaataatattaattcctaagttattaatagttatcctatagaaaaagtatgtttgcttaaaacctgtttctgataaaatttggcatcactgttggtcataagaacctgtactgtagagtcaaggtggaacgcactataggaatctaattcgttcaacttttacctggataaattgacgaatcgatgaatgcatattgcagattccccatgtctatcccatgtttatccccgtttgctttgtgaattgtggaacactcgaatttg

SEQ ID NO: 1411 - DNA, 2028 bp, Diabrotica virgifera
aaaatataccttgtttagttggcaataaatcggataaagcagaatatctaatatcaagcggccgcaatatgctttggtgtgatgagcggacaaacgcggtggtctccaataaacgcagtaggtcgcgtacagcgtcacgccatacgttgtgtctatttgctttggatgaggtctcttattttgtaagctgaacacagcaattagtggagaccaccgccctaagagagcgtcaactattcgcgatgaaaaacaaagtagctgacgtctggtggaataaatttaaactactataagtggtataaacaaaccagaaaattgttgatctgaattgaatttggtcactattaagaaatttttagtaaatttcagcatcatgagtacattaaaatattttaaatcaaatcggtattgttctattcctcaaatgaatgtttgtttataccatgtatatctgccattttcttgcattcgacctgccctctatattccgtttcaatcgcgaatagtttggacagtgttgaatggacgagcaacatacacatacaagtgattaaaaatgaggatcataattatctttagaaaaaagtaaactacaaaactgtagttaagactcgattgatgatgtgtttctccatattacataatatcttatgggaaagttttaaatcctgatccaaaacatgctcatgatacacttcgagtacctactaaaattattgtttatcgtgtaatcgtgtaggacagaatatttcttttaaattatattaaaaacacctagctaccgaatgacaagttataatatttcatataagtattactttacactatcaactaataataataatttcgtatgacattttttccggggagatccttttgggcaggttccggcaccaatggcattggtaaccctgtttcaagtagctaatgtcttccccaccttgactttacagtacacgaacatacggcaatacaatccttatgggagtttttagcgcggcgatgccgattttcttcaaaagaattttcaatcggacattaccaaggtcctaaaaatgtaggtccctaaaaattttaaattaaaactaacccgttacagtcaagtaaaacaatatgtttcattgtttttttgtgtgatagtcattttcgaaaaagtaatcagcaattttataatcgatatgcgtaataactttttttggttaagaatgttagaatattcaacattaaaagtggatgttgttctatattatggttgttaatttatgtattgacagtacttaagacagttctggttctgaagtaatctcaagaaaaatataaaatagattgtcagtcaagtttaagtaaagttttatattgtcctacagttgagaataaataaattataattgttgacggtcagttgacctaaattaatattaaataagcttaaaattattactgataacattgtattgagtaactcattgcttatttcgaaaatttggatcctaattgcagtttattgttattcttaatgactgagttccaagatgaaattaatgtcattttaatgtgtttacaccctacgacagtggcagtgaaagtgagggagacgggattatagaaagaagctaaaatatcatcatcattctctttgccttatccctatgcggggtcggcttccctaattgcatttctccacacaattctatcttgggccatatcaatgttaatcccctttaccaacatgtcctgccttatcgtctccccccaggtcttctttggtcttcctctcctactccttccaggaatctgcacttcagctattcttcgtattgggtggttaacgtctcgacgttgaacagctttgttgggttttaaaaactcataataacttagaaatacaaatttaaagtcttctgcgatattgaaatggttcaaacgacccgtgacgtcacatagtttaactatatggttatatttaggtatattcttcttccccttctttagttattggcctccacctacctgggtatttggccagct

SEQ ID NO: 1412 - DNA, 1878 bp, Diabrotica virgifera
aaaatataccttgtttagttggcaataaatcggataaagcagaatatctaatatcaagcggccgcaatatgctttggtgtgatgagcggacaaacgcggtggtctccaataaacgcagtaggtcgcgtacagcgtcacgccatacgttgtgtctatttgctttggatgaggtctcttattttgtaagctgaacacagcaattagtggagaccaccgccctaagagagcgtcaactattcgcgatgaaaaacaaagtagctgacgtctggtggaataaatttaaactactataagtggtataaacaaaccagaaaattgttgatctgaattgaatttggtcactattaagaaatttttagtaaatttcagcatcatgagtacattaaaatattttaaatcaaatcggtattgttctattcctcaaatgaatgtttgtttataccatgtatatctgccattttcttgcattcgacctgccctctatattccgtttcaatcgcgaatagtttggacagtgttgaatggacgagcaacatacacatacaagtgattaaaaatgaggatcataattatctttagaaaaaagtaaactacaaaactgtagttaagactcgattgatgatgtgtttctccatattacataatatcttatgggaaagttttaaatcctgatccaaaacatgctcatgatacacttcgagtacctactaaaattattgtttatcgtgtaatcgtgtaggacagaatatttcttttaaattatattaaaaacacctagctaccgaatgacaagttataatatttcatataagtattactttacactatcaactaataataataatttcgtatgacattttttccggggagatccttttgggcaggttccggcaccaatggcattggtaaccctgtttcaagtagctaatgtcttccccaccttgactttacagtacacgaacatacggcaatacaatccttatgggagtttttagcgcggcgatgccgattttcttcaaaagaattttcaatcggacattaccaaggtcctaaaaatgtaggtccctaaaaattttaaattaaaactaacccgttacagtcaagtaaaacaatatgtttcattgtttttttgtgtgatagtcattttcgaaaaagtaatcagcaattttataatcgatatgcgtaataactttttttggttaagaatgttagaatattcaacattaaaagtggatgttgttctatattatggttgttaatttatgtattgacagtacttaagacagttctggttctgaagtaatctcaagaaaaatataaaatagattgtcagtcaagtttaagtaaagttttatattgtcctacagttgagaataaataaattataattgttgacggtcagttgacctaaattaatattaaataagcttaaaattattactgataacattgtattgagtaactcattgcttatttcgaaaatttggatcctaattgcagtttattgttattcttaatgactgagttccaagatgaaattaatgtcattttaatgtgtttacaccctacgacagtggcagtgaaagtgagggagacgggattatagaaagaagctaaaatatcatcatcattctctttgccttatccctatgcggggtcggcttccctaattgcatttctccacacaattctgtcttgggtcatatcaatgttaatcccctttaccaacatgtcctgccttatcgtctccccccaggtcttctttggtcttcctctcctactccttccagaaatctgcacaacttaccgtactatcccttgcaatataattcggatggaatttcccagattaggagactggggcgatatcaagcacaa

SEQ ID NO: 1413 - DNA, 1846 bp, Diabrotica virgifera
aaaatataccttgtttagttggcaataaatcggataaagcagaatatctaatatcaagcggccgcaatatgctttggtgtgatgagcggacaaacgcggtggtctccaataaacgcagtaggtcgcgtacagcgtcacgccatacgttgtgtctatttgctttggatgaggtctcttattttgtaagctgaacacagcaattagtggagaccaccgccctaagagagcgtcaactattcgcgatgaaaaacaaagtagctgacgtctggtggaataaatttaaactactataagtggtataaacaaaccagaaaattgttgatctgaattgaatttggtcactattaagaaatttttagtaaatttcagcatcatgagtacattaaaatattttaaatcaaatcggtattgttctattcctcaaatgaatgtttgtttataccatgtatatctgccattttcttgcattcgacctgccctctatattccgtttcaatcgcgaatagtttggacagtgttgaatggacgagcaacatacacatacaagtgattaaaaatgaggatcataattatctttagaaaaaagtaaactacaaaactgtagttaagactcgattgatgatgtgtttctccatattacataatatcttatgggaaagttttaaatcctgatccaaaacatgctcatgatacacttcgagtacctactaaaattattgtttatcgtgtaatcgtgtaggacagaatatttcttttaaattatattaaaaacacctagctaccgaatgacaagttataatatttcatataagtattactttacactatcaactaataataataatttcgtatgacattttttccggggagatccttttgggcaggttccggcaccaatggcattggtaaccctgtttcaagtagctaatgtcttccccaccttgactttacagtacacgaacatacggcaatacaatccttatgggagtttttagcgcggcgatgccgattttcttcaaaagaattttcaatcggacattaccaaggtcctaaaaatgtaggtccctaaaaattttaaattaaaactaacccgttacagtcaagtaaaacaatatgtttcattgtttttttgtgtgatagtcattttcgaaaaagtaatcagcaattttataatcgatatgcgtaataactttttttggttaagaatgttagaatattcaacattaaaagtggatgttgttctatattatggttgttaatttatgtattgacagtacttaagacagttctggttctgaagtaatctcaagaaaaatataaaatagattgtcagtcaagtttaagtaaagttttatattgtcctacagttgagaataaataaattataattgttgacggtcagttgacctaaattaatattaaataagcttaaaattattactgataacattgtattgagtaactcattgcttatttcgaaaatttggatcctaattgcagtttattgttattcttaatgactgagttccaagatgaaattaatgtcattttaatgtgtttacaccctacgacagtggcagtgaaagtgagggagacgggattatagaaagaagctaaaatatcatcatcattctctttgccttatccctatgcggggtcggcttccctaattgcatttctccacacaattctatcttgggccatatcaatgttaatcccctttaccaacatgtcctgccttatcgtctccccccaggtcttctttggtcttcctctcctactccttccaggaatctgcacttcagctattcttcgtattgggtggttaacgtctcgacgttgaaca

SEQ ID NO: 1414 - DNA, 1610 bp, Diabrotica virgifera
aaaatataccttgtttagttggcaataaatcggataaagcagaatatctaatatcaagcggccgcaatatgctttggtgtgatgagcggacaaacgcggtggtctccaataaacgcagtaggtcgcgtacagcgtcacgccatacgttgtgtctatttgctttggatgaggtctcttattttgtaagctgaacacagcaattagtggagaccaccgccctaagagagcgtcaactattcgcgatgaaaaacaaagtagctgacgtctggtggaataaatttaaactactataagtggtataaacaaaccagaaaattgttgatctgaattgaatttggtcactattaagaaatttttagtaaatttcagcatcatgagtacattaaaatattttaaatcaaatcggtattgttctattcctcaaatgaatgtttgtttataccatgtatatctgccattttcttgcattcgacctgccctctatattccgtttcaatcgcgaatagtttggacagtgttgaatggacgagcaacatacacatacaagtgattaaaaatgaggatcataattatctttagaaaaaagtaaactacaaaactgtagttaagactcgattgatgatgtgtttctccatattacataatatcttatgggaaagttttaaatcctgatccaaaacatgctcatgatacacttcgagtacctactaaaattattgtttatcgtgtaatcgtgtaggacagaatatttcttttaaattatattaaaaacacctagctaccgaatgacaagttataatatttcatataagtattactttacactatcaactaataataataatttcgtatgacattttttccggggagatccttttgggcaggttccggcaccaatggcattggtaaccctgtttcaagtagctaatgtcttccccaccttgactttacagtacacgaacatacggcaatacaatccttatgggagtttttagcgcggcgatgccgattttcttcaaaagaattttcaatcggacattaccaaggtcctaaaaatgtaggtccctaaaaattttaaattaaaactaacccgttacagtcaagtaaaacaatatgtttcattgtttttttgtgtgatagtcattttcgaaaaagtaatcagcaattttataatcgatatgcgtaataactttttttggttaagaatgttagaatattcaacattaaaagtggatgttgttctatggttgttaatttatgtattgacagtatagacagttctgaagtaatgtcaagaaaaatataaaatagattgtcagtcaagtttaagtaaagttttatattgtcctacattgagaataaataaattataattgttgatggtcagttcacctaaattaaattataacaaagaatatcaaataaacttataattattactgataacattgtattgagtaactgattgcttatttggaaaatttggatctaattgcagtttattgtattctaatgactgatttccaacttgaaattaatgtcattttaatgtacaccctcattaaaatttagtataaattttaaacttaaaattaattttagttagttca

SEQ ID NO: 1415 - DNA, 678 bp, Diabrotica virgifera
cataggtacatattttatatttcggcaacaatgctactttatttcgttagtagaggctgggacaaggtcatactgagttcacccattgagacgaaacggttttcattagactcaattttgcagttcagttcagaacaataaaaatggtattatctgtaatattaaaaaaaaatcatttatcatcaaaaaatattctggttgctttgcgttttattttgaaagttaatctggtgctaattatactaaaatcattcaaacctaaaaagtagtgtacctaaagattttttagaacgaaaggtgcaatttatgacactgttgaaattaatgaaccacattccagtagtcaaatagttaggaaagtgttacttgaagtcccctctccttgatttgctacctgaatgaccttagtggattcagatatttctacacaatagggaacttgcacatttttttttagagataataatgttcagttttgtttaaaaatgagatttccaaaatttcacgctttaaaaactcataataacttagaaatacaaatttaaagtcttctgcgatattgaaatggttcaaacgacccgtgacgtcacatagtttaactatatggttatatttaggtatattcttcttccccttctttagttattggcctccacctacctgggtatttggccagct

SEQ ID NO: 1416 - DNA, 611 bp, Diabrotica virgifera
attagtcgatgctgtggttccacagcagaagaattatttcgagccgaagtcgatagagaaaggtaaaaaatgagatatttttgaacgcagtgcatcaaaattatttaaaaccagctcaaaaatagcccaacgcaatagtggtataattatgtctcaagattctaacttcagatacactctaggcatatacatattacatacaataaatcatcattctctttgccttatccctatgcggggtcggcttccctaattgcatttctccacacaattctatcttgggccatatcaatgttaatcccctttaccaacatgtcctgccttatcgtctccccccaggtcttctttggtcttcctctcctactccttccaggaatctgcacttcagctattcttcgtattgggtggttaacgtctcgacgttgaacagctttgttgggttttaaaaactcataataacttagaaatacaaatttaaagtcttctgcgatattgaaatggttcaaacgacccgtgacgtcacatagtttaactatatggttatatttaggtatattcttcttccccttctttagttattggcctccacctacctgggtatttggccagct

SEQ ID NO: 1417 - DNA, 535 bp, Diabrotica virgifera
cctgaatgaccttagtggattcagatatttctacacaatagggaacttgcacatttttttagtacataataatgttcagttttgtttaaaaatgagatttccaaaatttcacgctttaaaaactcatatcatcatcattctctttgccttatccctatgcggggtcggcttccctaattgcatttctccacacaattctatcttgggccatatcaatgttaatcccctttaccaacatgtcctgccttatcgtctccccccaggtcttctttggtcttcctctcctactccttccaggaatctgcacttcagctattcttcgtattgggtggttaacgtctcgacgttgaacagctttgttgggttttaaaaactcataataacttagaaatacaaatttaaagtcttctgcgatattgaaatggttcaaacgacccgtgacgtcacatagtttaactatatggttatatttaggtatattcttcttccccttctttagttattggcctccacctacctgggtatttggccagct

SEQ ID NO: 1418 - DNA, 695 bp, Diabrotica virgifera
cacggcacatgaagaagaaagttgaactttttggcataagtataataagtataaaatatggtcaccgtaaaaactgtctttttgacccaggagtgtattttcagacacatgtttaacatccagtcacaattagtggaaaaatagttcgagatgttcaggaatcaacattttgaataaaaatcatgcactcaactttcaaaagcaaatgttctggacaaaattttatttagaggacttcgtaaaacgcgtagaaattttttaaaagtgacacatgacgtcttgcgtgggatgacagatgtcaaaactgagagtaattcgttttcacgtaacgccatctatgaacgctaaattaacattaagctatattttgaatgtatatgtatataatgtgtatttatatgtatattttggatttctgtttgaaacaatagattcatttgttaagattatcccggtatctatccatttttgttgacttattacattgtgatttactaggtagaaaaatctaagtactttgtacgaatctagctaataaacaaggcaactgtatgttacttttgatggtcaatgttttatgtattgtgaaatatctgccgaacatttaatagtctgatttactcgtgatccaagaaagttttaagtttcatacttcatagaggtatgtcattttattattttgtaatgtttgataa

SEQ ID NO: 1419 - DNA, 5453 bp, Diabrotica virgifera
  SmartBlast Evalue=1E-149; Info="Synoviolin, putative n=1 Tax= Pediculus humanus corporis RepID=E0VSK4_PEDHC"
aaaagctgtcgtcagtgtatcaaaatattaggaaaatctaaaaaatcacattagtttaggtaattaaatgtaaatgaagatgaggtcgcttagtatatctttgttaagcgtatctttaacattagtagtcattgcaaatgcatattatcagaagaaacagttctacccatctgttgtgtacattacaaaatccaatcccagtatggctgtaatatatctacaggcttttatatgtgtttggataagtggaaaaatcatgagaaggatattctttggacagttgagaacaacagaatttgagcatctgatggaaagatcttggtatgcagtaaccgaaacatgcctggctttcactgtatttagagatgacttcaatccaaaatttgtagctctttttacactattactctttttgaaatcttttcattggttagcagaggatcgagttgattatatggagaggagtccagtaataagttggcttttccatattcgagtcctctccctacttctccttctaggatccttagacttacatttcattcaacacgcttacctttcaaccgtatctaaaggtgcatctgttcagctagtgttcggttttgaatatgctatccttcttaccgttgttattaacatcgctattaagtatggattgcattcagttgacctcaacagcgaaaccccttgggacaacaaagcagtatttcttctatacaccgaactagtgatggggcttattaaggttattttatatttcgctttcgttgcaatcatggttagaatatacactttgccgctgttcgcgttcagaccgatgtattatacgattagaaacttcaagaaagcgttcagcgacgtgattttgtctcgaagagctattcataatatgaacactttgtaccctgatgccaccccggaagaactgcaagctgccgacaatgtctgcatcatctgccgagaggagatgacgacagcctccaaaaaattaccctgcaatcatattttccatacggcttgtttacgttcatggtttcaacggcaacagacttgcccaacatgccgtctcaacattctacgcaatcccaccaacaacaactcccgtcccgcacaagcccctcgaccaccgcaaccgaacgtacaaaaccctttcataaaccccttcttcgccgcacagaaccccttcgcacagatgttccaaccgcccaacgcagataaccaacccccacaacaaccgccaagaccagctgcagaaggcggtgctgagcagacagtgccccctcaagtcccaccccaagttaatctgccaccattcgctttcccaccgtttcccttcgtgccgttcttgcctcccccaccgatgccgccccaagcagttttcgagacactgtccacggaggagttgcaaaggatggaggggacggagagggagaatgtggaggctaggatacagtgcctaaggaatatacagatgctcttggatgccgctgtcgtaatgatgcaacagtacagcactacggtacttctttcttctcacatcacgccagtttctagcgcatcttcatcctcacccttcttgaacaccccagcttggaacaacccccccacacagtccgagacgcccaaagttgctaaagtggcccccacaaccaacgctcaagtgtccacgagtactgcaggagagacaagcaccgccgcagagacgacgttcgataaaccgaccacttcgaagacgactaacgaagaacatttggtcgagcaaggtccgattagtcaggaggagatcataagaagaagaaggttgcagaaattcgagcaacaagtagaaagggaataggttttggtactgttacattgaaattttttacttaaatgtcttgttatttttgttcgcggttgcggtatttcacaatactttacagaactttttttacgctggaaatcataacaatattaaatacaaatatcaattgatgaatatgttctttaccgccgtaccgcgctttcaaaatttgatgtattctgagaatgcagctgtgcatggccataagatcggtcttaacctaacctaaaagtgcgagaaaagtgaaaaataagatcgatcctccatttatccgtcgtttaatgttgccccacatgccgaatctttgaaagatgacagctgacagtttgtttctcagtaaatagtatttgcgtccgagcttaatagggaacttgcataaaattttaaattcgaaaaaatgttataaatcacaacagaacattgtatcaaagataaaaaagttttgtttgccttttcgtttggcccctaaagacgattaaaaattcaaattataccgcgtcgtgacgtcatccggttgtatgtttacattcttcaccaacaaagtaaacaaaattgtatataattttaaattagacattataaacgtcagtagaaaatacagttatgtgacgttacaagtagtgtttctgatcgtttgaactattcatagaaaatttgtacttttacaaaataattttattttaaatagtaaaccttctttcctttccttcaaaaactgtatcaaaccccaatctcaacaaacttgtatatattattacaatgatatacgataaatgtcgttagaatataaatatttttcccttattccgcgacgacgagctggccaaatacccaagtaggtggaggccaataaactaaagaagaagaagaagaatatacctaaatataaccataaacagaaccatatagttaaactatgtgacgtcacgggtcgtttgaactattttaaaatacagaagactttaaatttgtacttctaagttattatgagtttttgaagcgtgaaattttggaaatctcttttttatacaaaactgaacattattatgtaataaaaaaatgtgcaagttccctattcaccaatttacataacacttttttgtattgtttaacctcctcgttgctgattaaattgaactcgtattttattatgattctgcactacaacttgaggcttttctttttactgatctcgttatcatagtaattaacatcttagcaggtgtgttgtagttcatctatgagctagagatatttctccactagtctcggtcatatgttacaagtagtgcatcagtatactatttgttgagaagctttttcgtaatatctacccatcgctgtggggatttgccgcgttgtcgttgactctgacgccttccttggaccatcaaccgcggaaaaaagtgtgtctgtttcagattcaaagactgtgttgtcgttgtctgggagaggagtgtgatgtgcccctgttgaagaagagtggaaagtggagacctgccaatcaggtacatatataattttgtctcaatccgtctgtacattgccttcatcatctttggtagaccaagatttctgcttgactttacgtgcgagtagtctgactttatcgaagagttttttggtgttatttgtgtctgcatgttgttaaatatctttgcaaatgttctctatatgctctttcttgtttcgtctaaaagcagcctgaataactgtagatagctttcagtactggcaatgcctaagagggttctctttttcatcgtatgaaaagaagtgaacagattgtaatgtaaacatgccatatttttagatcttacagtaggctaccacattactgctggttctttttggtcatttaataaactagtaagatccctttattgtcacaaagatcaatgtcataattttgttttaaggtaatggtaatgttcaaggtggtatcaaaatgaatggcgtcaatattaataatttgagatacgcggatggcacggtgttaaatgcgagcaattacgaagaacttcaacatctgattaataggattaccacaacgtgtgatgaatatggactcaagctaaacaccgcaaagaccaaggtgatggttgtcagtaagacgccaatacaaccggaagtagtaacagcttatggtgaacaattggagagaactaacagtatcacctaccttggttgtaatctaaatgtgaactgggacatgagcaaagaaattagaatacgtatagagaaggtcagagcagcattcttaaagataaataaacttttggaaatttcccctatggggaagcaacattactttgaatctgaaaattagattagtgagatgttatgtgttctctactcttttgtacggtatcgaaggttgggctttcacagatacatttctcaagaaattggaaatttgggtgtatcggaaaatcctacgaataagttgggtggatagagttcgtaacgaagttgttttgaatcagatgggaaaagtcacggaagtcgtcagaacagttaaaaatcgaaaacttgaatatttacccggcgacacccagcgagatataaggtttgttccaactcagtacaaaaccattcttgaacggttacgagtatgcgccgtaactaaaaatatgttactgcgcataattattagttattgcgcatgcgcataacggttcaagaacggttttgtatcgagttggaacaaacctcctagtatagtatactccatttaataatacaaggcaaggtagacggaagaagcgggccaggtcgaagaagaacgtcatagtttaaagacatgagagaatggtttaacagatcctctgcatcccttttccgagctgccgtcaacaaagttactatagccaatttgatagccaacgctcgataatcgagcacggcacatgaataagaaggtatttgaacgttgaactttttggcataagtataatacgtatgtataaaatatggtcaccgtaaaagctgtctttttgacccaggagtgtattttcagacacatgtttaacatccagtcacaattagtggaaaaatggttcgagctgttcaggaatcaacattttgaataaaaatcatgcactcaactttcaaaagcaaatgttctggacaaaattttatttagaggacttcgtaaaacgcgtagaaattttttaaaagtgacacatgacgtcttgcgtgggatgacagatgtcaaaactgagagtaattcgttttcacgtaacgccatctatgaacgctaaattaacattaagctatattttgaatgtatatgtatataatgtgtatttatatgtatattttggatttctgtttgaaacaatagattcatttgttaagattatcccggtatctatccatttttgttgacttattacattgtgatttactaggtagaaaaatctaagtactttgtacgaatctagctaataaacaaggcaactgtatgttacttttgatggtcaatgttttatgtattgtgaaatatctgccgaacatttaatagtctgatttactcgtgatccaagaaagttttaagtttcatacttcatagaggtatgtcattttattattttgtaatgtttgataa

SEQ ID NO: 1420 - DNA, 5453 bp, Diabrotica virgifera
  SmartBlast Evalue=1E-149; Info="Synoviolin, putative n=1 Tax= Pediculus humanus corporis RepID=E0VSK4_PEDHC"
aaaagctgtcgtcagtgtatcaaaatattaggaaaatctaaaaaatcacattagtttaggtaattaaatgtaaatgaagatgaggtcgcttagtatatctttgttaagcgtatctttaacattagtagtcattgcaaatgcatattatcagaagaaacagttctacccatctgttgtgtacattacaaaatccaatcccagtatggctgtaatatatctacaggcttttatatgtgtttggataagtggaaaaatcatgagaaggatattctttggacagttgagaacaacagaatttgagcatctgatggaaagatcttggtatgcagtaaccgaaacatgcctggctttcactgtatttagagatgacttcaatccaaaatttgtagctctttttacactattactctttttgaaatcttttcattggttagcagaggatcgagttgattatatggagaggagtccagtaataagttggcttttccatattcgagtcctctccctacttctccttctaggatccttagacttacatttcattcaacacgcttacctttcaaccgtatctaaaggtgcatctgttcagctagtgttcggttttgaatatgctatccttcttaccgttgttattaacatcgctattaagtatggattgcattcagttgacctcaacagcgaaaccccttgggacaacaaagcagtatttcttctatacaccgaactagtgatggggcttattaaggttattttatatttcgctttcgttgcaatcatggttagaatatacactttgccgctgttcgcgttcagaccgatgtattatacgattagaaacttcaagaaagcgttcagcgacgtgattttgtctcgaagagctattcataatatgaacactttgtaccctgatgccaccccggaagaactgcaagctgccgacaatgtctgcatcatctgccgagaggagatgacgacagcctccaaaaaattaccctgcaatcatattttccatacggcttgtttacgttcatggtttcaacggcaacagacttgcccaacatgccgtctcaacattctacgcaatcccaccaacaacaactcccgtcccgcacaagcccctcgaccaccgcaaccgaacgtacaaaaccctttcataaaccccttcttcgccgcacagaaccccttcgcacagatgttccaaccgcccaacgcagacaaccaacccccacaacaaccgccaagaccagctgcagaaggcggtgctgagcagacagtgccccctcaagtccccccgcaagttaatctgccgccgtttgctttcccaccgtttcccttcgtgccgttcttgcccccaccaccgatgccgccccaagcagttttcgagacactgtccacggaagagttgcagaggatggaggggacagagagggagaatgtggaggctaggatacagtgcctaaggaatatacagatgctcttggatgccgctgtcgtaatgatgcaacagtacagcactacggtacttctttcttctcacatcacgccagtttctagcgcatcttcatcctcacccttcttgaacaccccagcttggaacaacccccccacacagtccgagacgcccaaagttgctaaagtggcccccacaaccaacgctcaagtgtccacgagtactgcaggagagacaagcaccgccgcagagacgacgttcgataaaccgaccacttcgaagacgactaacgaagaacatttggtcgagcaaggtccgattagtcaggaggagatcataagaagaagaaggttgcagaaattcgagcaacaagtagaaagggaataggttttggtactgttacattgaaattttttacttaaatgtcttgttatttttgttcgcggttgcggtatttcacaatactttacagaactttttttacgctggaaatcataacaatattaaatacaaatatcaattgatgaatatgttctttaccgccgtaccgcgctttcaaaatttgatgtattctgagaatgcagctgtgcatggccataagatcggtcttaacctaacctaaaagtgcgagaaaagtgaaaaataagatcgatcctccatttatccgtcgtttaatgttgccccacatgccgaatctttgaaagatgacagctgacagtttgtttctcagtaaatagtatttgcgtccgagcttaatagggaacttgcataaaattttaaattcgaaaaaatgttataaatcacaacagaacattgtatcaaagataaaaaagttttgtttgccttttcgtttggcccctaaagacgattaaaaattcaaattataccgcgtcgtgacgtcatccggttgtatgtttacattcttcaccaacaaagtaaacaaaattgtatataattttaaattagacattataaacgtcagtagaaaatacagttatgtgacgttacaagtagtgtttctgatcgtttgaactattcatagaaaatttgtacttttacaaaataattttattttaaatagtaaaccttctttcctttccttcaaaaactgtatcaaaccccaatctcaacaaacttgtatatattattacaatgatatacgataaatgtcgttagaatataaatatttttcccttattccgcgacgacgagctggccaaatacccaagtaggtggaggccaataaactaaagaagaagaagaagaatatacctaaatataaccataaacagaaccatatagttaaactatgtgacgtcacgggtcgtttgaactattttaaaatacagaagactttaaatttgtacttctaagttattatgagtttttgaagcgtgaaattttggaaatctcttttttatacaaaactgaacattattatgtaataaaaaaatgtgcaagttccctattcaccaatttacataacacttttttgtattgtttaacctcctcgttgctgattaaattgaactcgtattttattatgattctgcactacaacttgaggcttttctttttactgatctcgttatcatagtaattaacatcttagcaggtgtgttgtagttcatctatgagctagagatatttctccactagtctcggtcatatgttacaagtagtgcatcagtatactatttgttgagaagctttttcgtaatatctacccatcgctgtggggatttgccgcgttgtcgttgactctgacgccttccttggaccatcaaccgcggaaaaaagtgtgtctgtttcagattcaaagactgtgttgtcgttgtctgggagaggagtgtgatgtgcccctgttgaagaagagtggaaagtggagacctgccaatcaggtacatatataattttgtctcaatccgtctgtacattgccttcatcatctttggtagaccaagatttctgcttgactttacgtgcgagtagtctgactttatcgaagagttttttggtgttatttgtgtctgcatgttgttaaatatctttgcaaatgttctctatatgctctttcttgtttcgtctaaaagcagcctgaataactgtagatagctttcagtactggcaatgcctaagagggttctctttttcatcgtatgaaaagaagtgaacagattgtaatgtaaacatgccatatttttagatcttacagtaggctaccacattactgctggttctttttggtcatttaataaactagtaagatccctttattgtcacaaagatcaatgtcataattttgttttaaggtaatggtaatgttcaaggtggtatcaaaatgaatggcgtcaatattaataatttgagatacgcggatggcacggtgttaaatgcgagcaattacgaagaacttcaacatctgattaataggattaccacaacgtgtgatgaatatggactcaagctaaacaccgcaaagaccaaggtgatggttgtcagtaagacgccaatacaaccggaagtagtaacagcttatggtgaacaattggagagaactaacagtatcacctaccttggttgtaatctaaatgtgaactgggacatgagcaaagaaattagaatacgtatagagaaggtcagagcagcattcttaaagataaataaacttttggaaatttcccctatggggaagcaacattactttgaatctgaaaattagattagtgagatgttatgtgttctctactcttttgtacggtatcgaaggttgggctttcacagatacatttctcaagaaattggaaatttgggtgtatcggaaaatcctacgaataagttgggtggatagagttcgtaacgaagttgttttgaatcagatgggaaaagtcacggaagtcgtcagaacagttaaaaatcgaaaacttgaatatttacccggcgacacccagcgagatataaggtttgttccaactcagtacaaaaccattcttgaacggttacgagtatgcgccgtaactaaaaatatgttactgcgcataattattagttattgcgcatgcgcataacggttcaagaacggttttgtatcgagttggaacaaacctcctagtatagtatactccatttaataatacaaggcaaggtagacggaagaagcgggccaggtcgaagaagaacgtcatagtttaaagacatgagagaatggtttaacagatcctctgcatcccttttccgagctgccgtcaacaaagttactatagccaatttgatagccaacgctcgataatcgagcacggcacatgaataagaaggtatttgaacgttgaactttttggcataagtataatacgtatgtataaaatatggtcaccgtaaaagctgtctttttgacccaggagtgtattttcagacacatgtttaacatccagtcacaattagtggaaaaatggttcgagctgttcaggaatcaacattttgaataaaaatcatgcactcaactttcaaaagcaaatgttctggacaaaattttatttagaggacttcgtaaaacgcgtagaaattttttaaaagtgacacatgacgtcttgcgtgggatgacagatgtcaaaactgagagtaattcgttttcacgtaacgccatctatgaacgctaaattaacattaagctatattttgaatgtatatgtatataatgtgtatttatatgtatattttggatttctgtttgaaacaatagattcatttgttaagattatcccggtatctatccatttttgttgacttattacattgtgatttactaggtagaaaaatctaagtactttgtacgaatctagctaataaacaaggcaactgtatgttacttttgatggtcaatgttttatgtattgtgaaatatctgccgaacatttaatagtctgatttactcgtgatccaagaaagttttaagtttcatacttcatagaggtatgtcattttattattttgtaatgtttgataa

SEQ ID NO: 1421 - DNA, 5417 bp, Diabrotica virgifera
  SmartBlast Evalue=1E-149; Info="Synoviolin, putative n=1 Tax= Pediculus humanus corporis RepID=E0VSK4_PEDHC"
aaaagctgtcgtcagtgtatcaaaatattaggaaaatctaaaaaatcacattagtttaggtaattaaatgtaaatgaagatgaggtcgcttagtatatctttgttaagcgtatctttaacattagtagtcattgcaaatgcatattatcagaagaaacagttctacccatctgttgtgtacattacaaaatccaatcccagtatggctgtaatatatctacaggcttttatatgtgtttggataagtggaaaaatcatgagaaggatattctttggacagttgagaacaacagaatttgagcatctgatggaaagatcttggtatgcagtaaccgaaacatgcctggctttcactgtatttagagatgacttcaatccaaaatttgtagctctttttacactattactctttttgaaatcttttcattggttagcagaggatcgagttgattatatggagaggagtccagtaataagttggcttttccatattcgagtcctctccctacttctccttctaggatccttagacttacatttcattcaacacgcttacctttcaaccgtatctaaaggtgcatctgttcagctagtgttcggttttgaatatgctatccttcttaccgttgttattaacatcgctattaagtatggattgcattcagttgacctcaacagcgaaaccccttgggacaacaaagcagtatttcttctatacaccgaactagtgatggggcttattaaggttattttatatttcgctttcgttgcaatcatggttagaatatacactttgccgctgttcgcgttcagaccgatgtattatacgattagaaacttcaagaaagcgttcagcgacgtgattttgtctcgaagagctattcataatatgaacactttgtaccctgatgccaccccggaagaactgcaagctgccgacaatgtctgcatcatctgccgagaggagatgacgacagcctccaaaaaattaccctgcaatcatattttccatacggcttgtttacgttcatggtttcaacggcaacagacttgcccaacatgccgtctcaacattctacgcaatcccaccaacaacaactcccgtcccgcacaagcccctcgaccaccgcaaccgaacgtacaaaaccctttcataaaccccttcttcgccgcacagaaccccttcgcacagatgttccaaccgcccaacgcagataaccaacccccacaacaaccgccaagaccagctgcagaaggcggtgctgagcagacagtgccccctcaagtcccaccccaagttaatctgccaccattcgctttcccaccgtttcccttcgtgccgttcttgcctcccccaccgatgccgccccaagcagttttcgagacactgtccacggaggagttgcaaaggatggaggggacggagagggagaatgtggaggctaggatacagtgcctaaggaatatacagatgctcttggatgccgctgtcgtaatgatgcaacagtacagcactacggtacttctttcttctcacatcacgccagtttctagcgcatcttcatcctcacccttcttgaacaccccagcttggaacaacccccccacacagtccgagacgcccaaagttgctaaagtggcccccacaaccaacgctcaagtgtccacgagtactgcaggagagacaagcaccgccgcagagacgacgttcgataaaccgaccacttcgaagacgactaacgaagaacatttggtcgagcaaggtccgattagtcaggaggagatcataagaagaagaaggttgcagaaattcgagcaacaagtagaaagggaataggttttggtactgttacattgaaattttttacttaaatgtcttgttatttttgttcgcggttgcggtatttcacaatactttacagaactttttttacgctggaaatcataacaatattaaatacaaatatcaattgatgaatatgttctttaccgccgtaccgcgctttcaaaatttgatgtattctgagaatgcagctgtgcatggccataagatcggtcttaacctaacctaaaagtgcgagaaaagtgaaaaataagatcgatcctccatttatccgtcgtttaatgttgccccacatgccgaatctttgaaagatgacagctgacagtttgtttctcagtaaatagtatttgcgtccgagcttaatagggaacttgcataaaattttaaattcgaaaaaatgttataaatcacaacagaacattgtatcaaagataaaaaagttttgtttgccttttcgtttggcccctaaagacgattaaaaattcaaattataccgcgtcgtgacgtcatccggttgtatgtttacattcttcaccaacaaagtaaacaaaattgtatataattttaaattagacattataaacgtcagtagaaaatacagttatgtgacgttacaagtagtgtttctgatcgtttgaactattcatagaaaatttgtacttttacaaaataattttattttaaatagtaaaccttctttcctttccttcaaaaactgtatcaaaccccaatctcaacaaacttgtatatattattacaatgatatacgataaatgtcgttagaatataaatatttttcccttattccgcgacgacgagctggccaaatacccaagtaggtggaggccaataaactaaagaagaagaagaagaatatacctaaatataaccataaacagaaccatatagttaaactatgtgacgtcacgggtcgtttgaactattttaaaatacagaagactttaaatttgtacttctaagttattatgagtttttgaagcgtgaaattttggaaatctcttttttatacaaaactgaacattattatgtaataaaaaaatgtgcaagttccctattcaccaatttacataacacttttttgtattgtttaacctcctcgttgctgattaaattgaactcgtattttattatgattctgcactacaacttgaggcttttctttttactgatctcgttatcatagtaattaacatcttagcaggtgtgttgtagttcatctatgagctagagatatttctccactagtctcggtcatatgttacaagtagtgcatcagtatactatttgttgagaagctttttcgtaatatctacccatcgctgtggggatttgccgcgttgtcgttgactctgacgccttccttggaccatcaaccgcggaaaaaagtgtgtctggttcagattcaaagactttgttgtcggtgtctgggagaggagtgtgatgtgcccctgttgaagaagagtggaaagtggagacctgacatgcaggtacatataataatcttgtcccaacccgtctatacattgccttcatcatctttggttgaccaagatttctgcttgactttacgtgcgagtagtctgactttatcgaagagttttttggtgttatttgtgtctgcatgttgttaaatctctttgcaaatgttctctatatgctctttcttgtttcgtctaaaagctgcctgaataactctagataactttcagtactggcaatgaataagagggttctcttagggtaagtgtggcatttttttagatcttacagtaggctaccacattactgctggttctttttggtcatttaataaactagtaagatcccgttattgtcacaaagatcaatgtcataaatttcttttcaaggtaatgttcaaggtggtatcaaaatgaatggcgtcaatattaataatttgagatacgcggatggcacggtgttaaatgcgagcaattacgaagaacttcaacatctgattaataggattaccacaacgtgtgatgaatatggactcaagctaaacaccgcaaagaccaaggtgatggttgtcagtaagacgccaatacaaccggaagtagtaacagcttatggtgaacaattggagagaactaacagtatcacctaccttggttgtaatctaaatgtgaactgggacatgagcaaagaaattagaatacgtatagagaaggtcagagcagcattcttaaagataaataaacttttggaaatttcccctatggggaagcaacattactttgaatctgaaaattagattagtgagatgttatgtgttctctactcttttgtacggtatcgaaggttgggctttcacagatacatttctcaagaaattggaaatttgggtgtatcggaaaatcctacgaataagttgggtggatagagttcgtaacgaagttgttttgaatcagatgggaaaagtcacggaagtcgtcagaacagttaaaaatcgaaaacttgaatatttacccggcgacacccagcgagatataaggtttgttccaactcagtacaaaaccattcttgaacggttacgagtatgcgccgtaactaaaaatatgttactgcgcataattattagttattgcgcatgcgcataacggttcaagaacggttttgtatcgagttggaacaaacctcctagtatagtatactccatttaataatacaaggcaaggtagacggaagaagcgggccaggtcgaagaagaacgtcatagtttaaagacatgagagaatggtttaacagatcctctgcatcccttttccgagctgccgtcaacaaagttactatagccaatttgatagccaacgctcgataatcgagcacggcacatgaataagaaggtatttgaacgttgaactttttggcataagtataatacgtatgtataaaatatggtcaccgtaaaagctgtctttttgacccaggagtgtattttcagacacatgtttaacatccagtcacaattagtggaaaaatggttcgagctgttcaggaatcaacattttgaataaaaatcatgcactcaactttcaaaagcaaatgttctggacaaaattttatttagaggacttcgtaaaacgcgtagaaattttttaaaagtgacacatgacgtcttgcgtgggatgacagatgtcaaaactgagagtaattcgttttcacgtaacgccatctatgaacgctaaattaacattaagctatattttgaatgtatatgtatataatgtgtatttatatgtatattttggatttctgtttgaaacaatagattcatttgttaagattatcccggtatctatccatttttgttgacttattacattgtgatttactaggtagaaaaatctaagtactttgtacgaatctagctaataaacaaggcaactgtatgttacttttgatggtcaatgttttatgtattgtgaaatatctgccgaacatttaatagtctgatttactcgtgatccaagaaagttttaagtttcatacttcatagaggtatgtcattttattattttgtaatgtttgataa

SEQ ID NO: 1422 - DNA, 5417 bp, Diabrotica virgifera
  SmartBlast Evalue=1E-149; Info="Synoviolin, putative n=1 Tax= Pediculus humanus corporis RepID=E0VSK4_PEDHC"
aaaagctgtcgtcagtgtatcaaaatattaggaaaatctaaaaaatcacattagtttaggtaattaaatgtaaatgaagatgaggtcgcttagtatatctttgttaagcgtatctttaacattagtagtcattgcaaatgcatattatcagaagaaacagttctacccatctgttgtgtacattacaaaatccaatcccagtatggctgtaatatatctacaggcttttatatgtgtttggataagtggaaaaatcatgagaaggatattctttggacagttgagaacaacagaatttgagcatctgatggaaagatcttggtatgcagtaaccgaaacatgcctggctttcactgtatttagagatgacttcaatccaaaatttgtagctctttttacactattactctttttgaaatcttttcattggttagcagaggatcgagttgattatatggagaggagtccagtaataagttggcttttccatattcgagtcctctccctacttctccttctaggatccttagacttacatttcattcaacacgcttacctttcaaccgtatctaaaggtgcatctgttcagctagtgttcggttttgaatatgctatccttcttaccgttgttattaacatcgctattaagtatggattgcattcagttgacctcaacagcgaaaccccttgggacaacaaagcagtatttcttctatacaccgaactagtgatggggcttattaaggttattttatatttcgctttcgttgcaatcatggttagaatatacactttgccgctgttcgcgttcagaccgatgtattatacgattagaaacttcaagaaagcgttcagcgacgtgattttgtctcgaagagctattcataatatgaacactttgtaccctgatgccaccccggaagaactgcaagctgccgacaatgtctgcatcatctgccgagaggagatgacgacagcctccaaaaaattaccctgcaatcatattttccatacggcttgtttacgttcatggtttcaacggcaacagacttgcccaacatgccgtctcaacattctacgcaatcccaccaacaacaactcccgtcccgcacaagcccctcgaccaccgcaaccgaacgtacaaaaccctttcataaaccccttcttcgccgcacagaaccccttcgcacagatgttccaaccgcccaacgcagacaaccaacccccacaacaaccgccaagaccagctgcagaaggcggtgctgagcagacagtgccccctcaagtccccccgcaagttaatctgccgccgtttgctttcccaccgtttcccttcgtgccgttcttgcccccaccaccgatgccgccccaagcagttttcgagacactgtccacggaagagttgcagaggatggaggggacagagagggagaatgtggaggctaggatacagtgcctaaggaatatacagatgctcttggatgccgctgtcgtaatgatgcaacagtacagcactacggtacttctttcttctcacatcacgccagtttctagcgcatcttcatcctcacccttcttgaacaccccagcttggaacaacccccccacacagtccgagacgcccaaagttgctaaagtggcccccacaaccaacgctcaagtgtccacgagtactgcaggagagacaagcaccgccgcagagacgacgttcgataaaccgaccacttcgaagacgactaacgaagaacatttggtcgagcaaggtccgattagtcaggaggagatcataagaagaagaaggttgcagaaattcgagcaacaagtagaaagggaataggttttggtactgttacattgaaattttttacttaaatgtcttgttatttttgttcgcggttgcggtatttcacaatactttacagaactttttttacgctggaaatcataacaatattaaatacaaatatcaattgatgaatatgttctttaccgccgtaccgcgctttcaaaatttgatgtattctgagaatgcagctgtgcatggccataagatcggtcttaacctaacctaaaagtgcgagaaaagtgaaaaataagatcgatcctccatttatccgtcgtttaatgttgccccacatgccgaatctttgaaagatgacagctgacagtttgtttctcagtaaatagtatttgcgtccgagcttaatagggaacttgcataaaattttaaattcgaaaaaatgttataaatcacaacagaacattgtatcaaagataaaaaagttttgtttgccttttcgtttggcccctaaagacgattaaaaattcaaattataccgcgtcgtgacgtcatccggttgtatgtttacattcttcaccaacaaagtaaacaaaattgtatataattttaaattagacattataaacgtcagtagaaaatacagttatgtgacgttacaagtagtgtttctgatcgtttgaactattcatagaaaatttgtacttttacaaaataattttattttaaatagtaaaccttctttcctttccttcaaaaactgtatcaaaccccaatctcaacaaacttgtatatattattacaatgatatacgataaatgtcgttagaatataaatatttttcccttattccgcgacgacgagctggccaaatacccaagtaggtggaggccaataaactaaagaagaagaagaagaatatacctaaatataaccataaacagaaccatatagttaaactatgtgacgtcacgggtcgtttgaactattttaaaatacagaagactttaaatttgtacttctaagttattatgagtttttgaagcgtgaaattttggaaatctcttttttatacaaaactgaacattattatgtaataaaaaaatgtgcaagttccctattcaccaatttacataacacttttttgtattgtttaacctcctcgttgctgattaaattgaactcgtattttattatgattctgcactacaacttgaggcttttctttttactgatctcgttatcatagtaattaacatcttagcaggtgtgttgtagttcatctatgagctagagatatttctccactagtctcggtcatatgttacaagtagtgcatcagtatactatttgttgagaagctttttcgtaatatctacccatcgctgtggggatttgccgcgttgtcgttgactctgacgccttccttggaccatcaaccgcggaaaaaagtgtgtctggttcagattcaaagactttgttgtcggtgtctgggagaggagtgtgatgtgcccctgttgaagaagagtggaaagtggagacctgacatgcaggtacatataataatcttgtcccaacccgtctatacattgccttcatcatctttggttgaccaagatttctgcttgactttacgtgcgagtagtctgactttatcgaagagttttttggtgttatttgtgtctgcatgttgttaaatctctttgcaaatgttctctatatgctctttcttgtttcgtctaaaagctgcctgaataactctagataactttcagtactggcaatgaataagagggttctcttagggtaagtgtggcatttttttagatcttacagtaggctaccacattactgctggttctttttggtcatttaataaactagtaagatcccgttattgtcacaaagatcaatgtcataaatttcttttcaaggtaatgttcaaggtggtatcaaaatgaatggcgtcaatattaataatttgagatacgcggatggcacggtgttaaatgcgagcaattacgaagaacttcaacatctgattaataggattaccacaacgtgtgatgaatatggactcaagctaaacaccgcaaagaccaaggtgatggttgtcagtaagacgccaatacaaccggaagtagtaacagcttatggtgaacaattggagagaactaacagtatcacctaccttggttgtaatctaaatgtgaactgggacatgagcaaagaaattagaatacgtatagagaaggtcagagcagcattcttaaagataaataaacttttggaaatttcccctatggggaagcaacattactttgaatctgaaaattagattagtgagatgttatgtgttctctactcttttgtacggtatcgaaggttgggctttcacagatacatttctcaagaaattggaaatttgggtgtatcggaaaatcctacgaataagttgggtggatagagttcgtaacgaagttgttttgaatcagatgggaaaagtcacggaagtcgtcagaacagttaaaaatcgaaaacttgaatatttacccggcgacacccagcgagatataaggtttgttccaactcagtacaaaaccattcttgaacggttacgagtatgcgccgtaactaaaaatatgttactgcgcataattattagttattgcgcatgcgcataacggttcaagaacggttttgtatcgagttggaacaaacctcctagtatagtatactccatttaataatacaaggcaaggtagacggaagaagcgggccaggtcgaagaagaacgtcatagtttaaagacatgagagaatggtttaacagatcctctgcatcccttttccgagctgccgtcaacaaagttactatagccaatttgatagccaacgctcgataatcgagcacggcacatgaataagaaggtatttgaacgttgaactttttggcataagtataatacgtatgtataaaatatggtcaccgtaaaagctgtctttttgacccaggagtgtattttcagacacatgtttaacatccagtcacaattagtggaaaaatggttcgagctgttcaggaatcaacattttgaataaaaatcatgcactcaactttcaaaagcaaatgttctggacaaaattttatttagaggacttcgtaaaacgcgtagaaattttttaaaagtgacacatgacgtcttgcgtgggatgacagatgtcaaaactgagagtaattcgttttcacgtaacgccatctatgaacgctaaattaacattaagctatattttgaatgtatatgtatataatgtgtatttatatgtatattttggatttctgtttgaaacaatagattcatttgttaagattatcccggtatctatccatttttgttgacttattacattgtgatttactaggtagaaaaatctaagtactttgtacgaatctagctaataaacaaggcaactgtatgttacttttgatggtcaatgttttatgtattgtgaaatatctgccgaacatttaatagtctgatttactcgtgatccaagaaagttttaagtttcatacttcatagaggtatgtcattttattattttgtaatgtttgataa

SEQ ID NO: 1423 - DNA, 3052 bp, Diabrotica virgifera
  SmartBlast Evalue=1E-149; Info="Synoviolin, putative n=1 Tax= Pediculus humanus corporis RepID=E0VSK4_PEDHC"
aaaagctgtcgtcagtgtatcaaaatattaggaaaatctaaaaaatcacattagtttaggtaattaaatgtaaatgaagatgaggtcgcttagtatatctttgttaagcgtatctttaacattagtagtcattgcaaatgcatattatcagaagaaacagttctacccatctgttgtgtacattacaaaatccaatcccagtatggctgtaatatatctacaggcttttatatgtgtttggataagtggaaaaatcatgagaaggatattctttggacagttgagaacaacagaatttgagcatctgatggaaagatcttggtatgcagtaaccgaaacatgcctggctttcactgtatttagagatgacttcaatccaaaatttgtagctctttttacactattactctttttgaaatcttttcattggttagcagaggatcgagttgattatatggagaggagtccagtaataagttggcttttccatattcgagtcctctccctacttctccttctaggatccttagacttacatttcattcaacacgcttacctttcaaccgtatctaaaggtgcatctgttcagctagtgttcggttttgaatatgctatccttcttaccgttgttattaacatcgctattaagtatggattgcattcagttgacctcaacagcgaaaccccttgggacaacaaagcagtatttcttctatacaccgaactagtgatggggcttattaaggttattttatatttcgctttcgttgcaatcatggttagaatatacactttgccgctgttcgcgttcagaccgatgtattatacgattagaaacttcaagaaagcgttcagcgacgtgattttgtctcgaagagctattcataatatgaacactttgtaccctgatgccaccccggaagaactgcaagctgccgacaatgtctgcatcatctgccgagaggagatgacgacagcctccaaaaaattaccctgcaatcatattttccatacggcttgtttacgttcatggtttcaacggcaacagacttgcccaacatgccgtctcaacattctacgcaatcccaccaacaacaactcccgtcccgcacaagcccctcgaccaccgcaaccgaacgtacaaaaccctttcataaaccccttcttcgccgcacagaaccccttcgcacagatgttccaaccgcccaacgcagataaccaacccccacaacaaccgccaagaccagctgcagaaggcggtgctgagcagacagtgccccctcaagtcccaccccaagttaatctgccaccattcgctttcccaccgtttcccttcgtgccgttcttgcctcccccaccgatgccgccccaagcagttttcgagacactgtccacggaggagttgcaaaggatggaggggacggagagggagaatgtggaggctaggatacagtgcctaaggaatatacagatgctcttggatgccgctgtcgtaatgatgcaacagtacagcactacggtacttctttcttctcacatcacgccagtttctagcgcatcttcatcctcacccttcttgaacaccccagcttggaacaacccccccacacagtccgagacgcccaaagttgctaaagtggcccccacaaccaacgctcaagtgtccacgagtactgcaggagagacaagcaccgccgcagagacgacgttcgataaaccgaccacttcgaagacgactaacgaagaacatttggtcgagcaaggtccgattagtcaggaggagatcataagaagaagaaggttgcagaaattcgagcaacaagtagaaagggaataggttttggtactgttacattgaaattttttacttaaatgtcttgttatttttgttcgcggttgcggtatttcacaatactttacagaactttttttacgctggaaatcataacaatattaaatacaaatatcaattgatgaatatgttctttaccgccgtaccgcgctttcaaaatttgatgtattctgagaatgcagctgtgcatggccataagatcggtcttaacctaacctaaaagtgcgagaaaagtgaaaaataagatcgatcctccatttatccgtcgtttaatgttgccccacatgccgaatctttgaaagatgacagctgacagtttgtttctcagtaaatagtatttgcgtccgagcttaatagggaacttgcataaaattttaaattcgaaaaaatgttataaatcacaacagaacattgtatcaaagataaaaaagttttgtttgccttttcgtttggcccctaaagacgattaaaaattcaaattataccgcgtcgtgacgtcatccggttgtatgtttacattcttcaccaacaaagtaaacaaaattgtatataattttaaattagacattataaacgtcagtagaaaatacagttatgtgacgttacaagtagtgtttctgatcgtttgaactattcatagaaaatttgtacttttacaaaataattttattttaaatagtaaaccttctttcctttccttcaaaaactgtatcaaaccccaatctcaacaaacttgtatatattattacaatgatatacgataaatgtcgttagaatataaatatttttcccttattccgcgacgacgagctggccaaatacccaagtaggtggaggccaataaactaaagaagaagaagaagaatatacctaaatataaccataaacagaaccatatagttaaactatgtgacgtcacgggtcgtttgaactattttaaaatacagaagactttaaatttgtacttctaagttattatgagtttttgaagcgtgaaattttggaaatctcttttttatacaaaactgaacattattatgtaataaaaaaatgtgcaagttccctattcaccaatttacataacacttttttgtattgtctgacctcctcgttgctgattaaattgaactctattttatctgtgacattatgattctgcaccacaccttgaggcttttctttttactgatctcgttatca

SEQ ID NO: 1424 - DNA, 3052 bp, Diabrotica virgifera
  SmartBlast Evalue=1E-149; Info="Synoviolin, putative n=1 Tax= Pediculus humanus corporis RepID=E0VSK4_PEDHC"
aaaagctgtcgtcagtgtatcaaaatattaggaaaatctaaaaaatcacattagtttaggtaattaaatgtaaatgaagatgaggtcgcttagtatatctttgttaagcgtatctttaacattagtagtcattgcaaatgcatattatcagaagaaacagttctacccatctgttgtgtacattacaaaatccaatcccagtatggctgtaatatatctacaggcttttatatgtgtttggataagtggaaaaatcatgagaaggatattctttggacagttgagaacaacagaatttgagcatctgatggaaagatcttggtatgcagtaaccgaaacatgcctggctttcactgtatttagagatgacttcaatccaaaatttgtagctctttttacactattactctttttgaaatcttttcattggttagcagaggatcgagttgattatatggagaggagtccagtaataagttggcttttccatattcgagtcctctccctacttctccttctaggatccttagacttacatttcattcaacacgcttacctttcaaccgtatctaaaggtgcatctgttcagctagtgttcggttttgaatatgctatccttcttaccgttgttattaacatcgctattaagtatggattgcattcagttgacctcaacagcgaaaccccttgggacaacaaagcagtatttcttctatacaccgaactagtgatggggcttattaaggttattttatatttcgctttcgttgcaatcatggttagaatatacactttgccgctgttcgcgttcagaccgatgtattatacgattagaaacttcaagaaagcgttcagcgacgtgattttgtctcgaagagctattcataatatgaacactttgtaccctgatgccaccccggaagaactgcaagctgccgacaatgtctgcatcatctgccgagaggagatgacgacagcctccaaaaaattaccctgcaatcatattttccatacggcttgtttacgttcatggtttcaacggcaacagacttgcccaacatgccgtctcaacattctacgcaatcccaccaacaacaactcccgtcccgcacaagcccctcgaccaccgcaaccgaacgtacaaaaccctttcataaaccccttcttcgccgcacagaaccccttcgcacagatgttccaaccgcccaacgcagacaaccaacccccacaacaaccgccaagaccagctgcagaaggcggtgctgagcagacagtgccccctcaagtccccccgcaagttaatctgccgccgtttgctttcccaccgtttcccttcgtgccgttcttgcccccaccaccgatgccgccccaagcagttttcgagacactgtccacggaagagttgcagaggatggaggggacagagagggagaatgtggaggctaggatacagtgcctaaggaatatacagatgctcttggatgccgctgtcgtaatgatgcaacagtacagcactacggtacttctttcttctcacatcacgccagtttctagcgcatcttcatcctcacccttcttgaacaccccagcttggaacaacccccccacacagtccgagacgcccaaagttgctaaagtggcccccacaaccaacgctcaagtgtccacgagtactgcaggagagacaagcaccgccgcagagacgacgttcgataaaccgaccacttcgaagacgactaacgaagaacatttggtcgagcaaggtccgattagtcaggaggagatcataagaagaagaaggttgcagaaattcgagcaacaagtagaaagggaataggttttggtactgttacattgaaattttttacttaaatgtcttgttatttttgttcgcggttgcggtatttcacaatactttacagaactttttttacgctggaaatcataacaatattaaatacaaatatcaattgatgaatatgttctttaccgccgtaccgcgctttcaaaatttgatgtattctgagaatgcagctgtgcatggccataagatcggtcttaacctaacctaaaagtgcgagaaaagtgaaaaataagatcgatcctccatttatccgtcgtttaatgttgccccacatgccgaatctttgaaagatgacagctgacagtttgtttctcagtaaatagtatttgcgtccgagcttaatagggaacttgcataaaattttaaattcgaaaaaatgttataaatcacaacagaacattgtatcaaagataaaaaagttttgtttgccttttcgtttggcccctaaagacgattaaaaattcaaattataccgcgtcgtgacgtcatccggttgtatgtttacattcttcaccaacaaagtaaacaaaattgtatataattttaaattagacattataaacgtcagtagaaaatacagttatgtgacgttacaagtagtgtttctgatcgtttgaactattcatagaaaatttgtacttttacaaaataattttattttaaatagtaaaccttctttcctttccttcaaaaactgtatcaaaccccaatctcaacaaacttgtatatattattacaatgatatacgataaatgtcgttagaatataaatatttttcccttattccgcgacgacgagctggccaaatacccaagtaggtggaggccaataaactaaagaagaagaagaagaatatacctaaatataaccataaacagaaccatatagttaaactatgtgacgtcacgggtcgtttgaactattttaaaatacagaagactttaaatttgtacttctaagttattatgagtttttgaagcgtgaaattttggaaatctcttttttatacaaaactgaacattattatgtaataaaaaaatgtgcaagttccctattcaccaatttacataacacttttttgtattgtctgacctcctcgttgctgattaaattgaactctattttatctgtgacattatgattctgcaccacaccttgaggcttttctttttactgatctcgttatca

SEQ ID NO: 1425 - DNA, 2252 bp, Diabrotica virgifera
  SmartBlast Evalue=2E-59; Info=Endonuclease-reverse transcriptase n=1 Tax=Bombyx mori RepID=D7F162_BOMMO
agatctctccttcatctttttaataaagtttatcaaactggctatataccaacggattggctgctgtcgacttttgtgacgatacctaaaaaagcaaacgcgaaaagatgtagtgactaccgaaccattagcttgatgagtcatgttttaaagatatttctacgaattttgcactctaggatgtaccaaaaaatagaagaacagcttggtgatacacagtttggattccgcaataaccttgggaccagagaagcactgtttagtattcaggttatggtacagagatgcagagatgtcggacatccggtttatatgtgtttcattgactttcagaaggcctttgatcgggtaaaacatacggaaatgattgctattcttcagaaagtgggtattgatataaagacctacgcattatcaaaaatctttactggcatcaacgtgcaaacatcaggattggctgggacacgtctgaagaacttcaaatacgaagaggagtaaggcagggctgcattttgtccccactaatatttaacatctattctgagtttgttttcaataaagcagtggataatgctcaatgtggtatcaaaatgaatggcgtcaatattaataatttgagatacgcggatggcacggtgttaaatgcgagcaattacgaagaacttcaacatctgattaataggattaccacaacgtgtgatgaatatggactcaagctaaacaccgcaaagaccaaggtgatggttgtcagtaagacgccaatacaaccggaagtagtaacagcttatggtgaacaattggagagaactaacagtatcacctaccttggttgtaatctaaatgtgaactgggacatgagcaaagaaattagaatacgtatagagaaggtcagagcagcattcttaaagataaataaacttttggaaatttcccctatggggaagcaacattactttgaatctgaaaattagattagtgagatgttatgtgttctctactcttttgtacggtatcgaaggttgggctttcacagatacatttctcaagaaattggaaatttgggtgtatcggaaaatcctacgaataagttgggtggatagagttcgtaacgaagttgttttgaatcagatgggaaaagtcacggaagtcgtcagaacagttaaaaatcgaaaacttgaatatttacccggcgacacccagcgagatataaggtttgttccaactcagtacaaaaccattcttgaacggttacgagtatgcgccgtaactaaaaatatgttactgcgcataattattagttattgcgcatgcgcataacggttcaagaacggttttgtatcgagttggaacaaacctcctagtatagtatactccatttaataatacaaggcaaggtagacggaagaagcgggccaggtcgaagaagaacgtcatagtttaaagacatgagagaatggtttaacagatcctctgcatcccttttccgagctgccgtcaacaaagttactatagccaatttgatagccaacgctcgataatcgagcacggcacatgaataagaaggtatttgaacgttgaactttttggcataagtataatacgtatgtataaaatatggtcaccgtaaaagctgtctttttgacccaggagtgtattttcagacacatgtttaacatccagtcacaattagtggaaaaatggttcgagctgttcaggaatcaacattttgaataaaaatcatgcactcaactttcaaaagcaaatgttctggacaaaattttatttagaggacttcgtaaaacgcgtagaaattttttaaaagtgacacatgacgtcttgcgtgggatgacagatgtcaaaactgagagtaattcgttttcacgtaacgccatctatgaacgctaaattaacattaagctatattttgaatgtatatgtatataatgtgtatttatatgtatattttggatttctgtttgaaacaatagattcatttgttaagattatcccggtatctatccatttttgttgacttattacattgtgatttactaggtagaaaaatctaagtactttgtacgaatctagctaataaacaaggcaactgtatgttacttttgatggtcaatgttttatgtattgtgaaatatctgccgaacatttaatagtctgatttactcgtgatccaagaaagttttaagtttcatacttcatagaggtatgtcattttattattttgtaatgtttgataa

SEQ ID NO: 1426 - DNA, 1463 bp, Diabrotica virgifera
  SmartBlast Evalue=4E-36; Info=Endonuclease-reverse transcriptase n=1 Tax=Bombyx mori RepID=D5LB38_BOMMO
gcacggtgttaattgcgagcaatttctgattcaacatctgattaataggattaccacaacgtgtgatgaatatggactcaagctaaacaccgtaaagaccaagctgatggttatcagtaagacgccaatacaaccggaagtagtaacagcttatggtgaacaattagagagaactaacagtatcacctaccttggttgtaatctaaatgtgaactgggacatgagcaaagaaattagaatacgtatagagaaggccagagctgcattctttaagataaagaaacttttatgtggaaacaacattattttgaatcttaaaattagattagtgagatgttatgtgttctctactcttttgtacggtgtcgaaggttggactttaacagatactcttctcaagaaattggaagcctttgaaatctgggttatcgaagaatcctacgaataagttgggtggatagagttcgtaacgaagttgttttgcaccggatggaaaagtcacggaagtcgtcagaacagttaaaaatcgaaaacttgaatattttggccatgttatgcgacacccagagagatataatatactccatttaataatacaaggcaaggtagacggaagaagcgggccaggtcgaagaagaacgtcatagtttaaagacatgagagaatggtttaacagatcctctgcatcccttttccgagctgccgtcaacaaagttactatagccaatttgatagccaacgctcgataatcgagcacggcacatgaataagaaggtatttgaacgttgaactttttggcataagtataatacgtatgtataaaatatggtcaccgtaaaagctgtctttttgacccaggagtgtattttcagacacatgtttaacatccagtcacaattagtggaaaaatggttcgagctgttcaggaatcaacattttgaataaaaatcatgcactcaactttcaaaagcaaatgttctggacaaaattttatttagaggacttcgtaaaacgcgtagaaattttttaaaagtgacacatgacgtcttgcgtgggatgacagatgtcaaaactgagagtaattcgttttcacgtaacgccatctatgaacgctaaattaacattaagctatattttgaatgtatatgtatataatgtgtatttatatgtatattttggatttctgtttgaaacaatagattcatttgttaagattatcccggtatctatccatttttgttgacttattacattgtgatttactaggtagaaaaatctaagtactttgtacgaatctagctaataaacaaggcaactgtatgttacttttgatggtcaatgttttatgtattgtgaaatatctgccgaacatttaatagtctgatttactcgtgatccaagaaagttttaagtttcatacttcatagaggtatgtcattttattattttgtaatgtttgataa

SEQ ID NO: 1427 - DNA, 1127 bp, Diabrotica virgifera
  SmartBlast Evalue=8E-44; Info=Endonuclease-reverse transcriptase n=1 Tax=Bombyx mori RepID=D5LB38_BOMMO
gcacggtgttaattgcgagcaatttctgattcaacatctgattaataggattaccacaacgtgtgatgaatatggactcaagctaaacaccgtaaagaccaagctgatggttatcagtaagacgccaatacaaccggaagtagtaacagcttatggtgaacaattagagagaactaacagtatcacctaccttggttgtaatctaaatgtgaactgggacatgagcaaagaaattagaatacgtatagagaaggccagagctgcattctttaagataaagaaacttttatgtggaaacaacattattttgaatcttaaaattagattagtgagatgttatgtgttctctactcttttgtacggtgtcgaaggttggactttaacagatactcttctcaagaaattggaagcctttgaaatctgggttatcgaagaatcctacgaataagttgggtggatagagttcgtaacgaagttgttttgcaccggatggaaaagtcacggaagtcgtcagaacagttaaaaatcgaaaacttgaatattttggccatgttatgcgacacccagagagatataatatactccatttaataatacaaggcaaggtagacggaagaagagggccaggtcgaagaagaacgtcatggcttaaaaacctgagagaatggtataacagatcctctgcatcccttttccgagctgccgttaacaaaatgtctatagccaatttgatagccaacgttcgataatcgagcacggcacatgaggaagaagaagaaggaaaaatgtataaattttaacaggtcgaggaatttgaatatttaggaactacattttcgtgtaaaccaagtacagactgtcaggaaatcattgcatgtatccactctatagaatcctcagaagcaagaaaaaatccaaagcagctaaattaagaatgtagaaaactgtaataagaccaatagttacgtattcctcataaacttgaaccaagacaaaaactgggtgatcaatgttaaaagtatgggaaagaaaaatactttgaagggtatttggtggaaaaatgataaacaatcagtggacacgaagaacaaacaaagagttagaagaattatacagggtgttaataa

SEQ ID NO: 1428 - DNA, 2581 bp, Diabrotica virgifera
ggtgttgaacagttttattcatgaaataatcgcaacaaattgcactcgatctctaaaattaatatagtattttgccctcgtgacacttcggctcgtgaaattaaaactgtcaaagtgtcactcgggaaaaattcaataattttagagctcttgtgcaattactactgataatatttttgatatatttacaaactttctggataaagcgttttgaactttcaaatttattgaaacaagttttttttactatgtagaatctgcgacttatttaataggttcattattatgtacttaacagatatatcagaattggataaacattttaaaaaattcatgggttatctcttactagatctagtaatgagataacaaataaactagaattatttaataatcatagaagaacacgataaactctgtaaaaatttatcttaattgccttttaactatattacaattcaataatatatagttcaatgctcgaatatatgaattttacaaataaaacgcagatatcgagcagttatttattaaattttgcccaagtagtttcgctctcatagcatcatcagggggcattccgtcaaaaaaggaagttatccagcaaatcccggaatgtcagacatttaattaaaaataatacaaatagataacacacactggacaagggacaaacataaaaataattattaagggggctacaatatcggctctttgaacataaaatggtatttttacttagaaattaatgaaaaaaattttttttaatcaaacagtttagttttctaaccttgaacacttgaatatttctgttaaattctaacgaaccggaaccattttatctccaaacataactgataatgtcggccacgtacaatctgttatcttatccttgtatctttttatccttgcgtgtgttattatggttccatgacatctcgtaacgcgacagttcgtaacccgacaaatggtaacggacaattcgtaacggcgagagttcgtaactacatattcgtaacggtataattcgtaaggtcaacatttaattattttttaggaaattcaggattacagaagttaataacatatgcattttgcatattttttatatttctatactaaaagtctatctaggtatacagggtgattgattagtaaggtaaagctcaatagctccgctatagtaatagatagcagtaaaagtcaataacaaaaatttcagccacccttgagcttcacattacaaaactagtcagaatgttacagggtgttcgataacacagtggcagaccaaacttatgtctttaaataggacaccctatattccattttaaactcgaaatcctgttaacctctccatcacaaaaatataaaggttcttcatgttatacagggcatttacaaagttataaccaatttcattgaaaatcgtaacaagctcaactccctgtataaataaaaatatgcaaaacaacaatggttcatcaatgccacatcctttaacgtattgtcaaaattttcaagaatggtccatattgtaactttctttatatcaaatacaaagtgagtcaaaacgccagtacatcattttctcagtaattcaaatggaacatcctgtattttatatcactattgaaaattaacatttttactttaatttttagataacattccctatgtccaaatctatcagttttcgtgacattttcattttttgataaactggactgatttttttgggattacgttattattgaagtttataaaatacctccaacaagggatgagatgaaaaatagaatacaaagtgtatttcgatgtgttaatttacaaatgctccgtagagtaagtagctcattcaatgatcgtttttaggcgtacataagtgtgttatttataggagataattttgaacaccttatgtaattaaatattaaaaatattttattaaaagtagcttctaattttttcaaacatgtttttttgcaaaatgtattactgataaattatgtttcgttctttatttgttacattgttacatttacatacaaaagtagtgtttaattgtcttcacaaaatattgtattttgtgtttgtgtgttttttttgtaaaatttattactaattttctttgtttatttgttgcatttacataaaaagatagtttttaattgtttcaaaaatgttgcatgtagtggttgtgtttttgtttgtaaaatgtattactaataaattatttttatttctttatttgctacagtgttacattgattaccggattgataatcggtaatcttcaattgtcaattcagtcatggcttacttaaaatttagttaaatttaaacacctaaaataatttgctctgaaaaatgaaaatatttcgaaaactaacaaatccgggcatagggaaggttatataaaaattaaattacgttaattacgttaatgttacttttcaataatgatataaaatacagggcgttccattcaacattactgcgaaaacaatgtacttgcgttccgactcaccctgtacttgatataaagaaagttagcaatatgaataattcctaaaaaatt

SEQ ID NO: 1429 - DNA, 2587 bp, Diabrotica virgifera
ggtgttgaacagttttattcatgaaataatcgcaacaaattgcactcgatctctaaaattaatatagtattttgccctcgtgacacttcggctcgtgaaattaaaactgtcaaagtgtcactcgggaaaaattcaataattttagagctcttgtgcaattactactgataatatttttgatatatttacaaactttctggataaagcgttttgaactttcaaatttattgaaacaagttttttttactatgtagaatctgcgacttatttaataggttcattattatgtacttaacagatatatcagaattggataaacattttaaaaaattcatgggttatctcttactagatctagtaatgagataacaaataaactagaattatttaataatcatagaagaacacgataaactctgtaaaaatttatcttaattgccttttaactatattacaattcaataatatatagttcaatgctcgaatatatgaattttacaaataaaacgcagatatcgagcagttatttattaaattttgcccaagtagtttcgctctcatagcatcatcagggggcattccgtcaaaaaaggaagttatccagcaaatcccggaatgtcagacatttaattaaaaataatacaaatagataacacacactggacaagggacaaacataaaaataattattaagggggctacaatatcggctctttgaacataaaatggtatttttacttagaaattaatgaaaaaaattttttttaatcaaacagtttagttttctaaccttgaacacttgaatatttctgttaaattctaacgaaccggaaccattttatctccaaacataactgataatgtcggccacgtacaatctgttatcttatccttgtatctttttatccttgcgtgtgttattatggttccatgacatctcgtaacgcgacagttcgtaacccgacaaatggtaacggacaattcgtaacggcgagagttcgtaactacatattcgtaacggtataattcgtaaggtcaacatttaattattttttaggaaattcaggattacagaagttaataacatatgcattttgcatattttttatatttctatactaaaagtctatctaggtatacagggtgattgattagtaaggtaaagctcaatagctccgctatagtaatagatagcagtaaaagtcaataacaaaaatttcagccacccttgagcttcacattacaaaactagtcagaatgttacagggtgttcgataacacagtggcagaccaaacttatgtctttaaataggacaccctatattccattttaaactcgaaatcctgttaacctctccatcacaaaaatataaaggttcttcatgttatacagggcatttacaaagttataaccaatttcattgaaaatcgtaacaagctcaactccctgtataaataaaaatatgcaaaacaacaatggttcatcaatgccacatcctttaacgtattgtcaaaattttcaagaatggtccatattgtaactttctttatatcaaatacaaagtgagtcaaaacgccagtacatcattttctcagtaattcaaatggaacatcctgtattttatatcactattgaaaattaacatttttactttaatttttagataacattccctatgtccaaatctatcagttttcgtgacattttcattttttgataaactggactgatttttttgggattacgttattattgaagtttataaaatacctccaacaagggatgagatgaaaaatagaatacaaagtgtatttcgatgtgttaatttacaaatgctccgtagagtaagtagctcattcaatgatcgtttttaggcgtacataagtgtgttatttataggagataattttgaacaccttatgtaattaaatattaaaaatattttattaaaagtagcttctaattttttcaaacatgtttttttgcaaaatgtattactgataaattatgttttgttctttatttgttacatttacatacaagagtagtgtttaattgccttcacaaaatattgtatattgtgtttgtgtgttttttttgtaaaatttattactaattttctttgtttatttgttgcatatacataaaaagatactttttaattgtttcaaaaatgttgcatgtagtggttgtgtttttgtttgtaaaatgtattactaataaattatttttatttctttatttgctacagtgttacatttatcattgatcattgattaccggattgataatcggtaatcttcaattgtcaattcagtcatggcttacttaaaatttagttaaatttaaacacctaaaataatttgctctgaaaaatgaaaatatttcgaaaactaacaaatccgggcatagggaaggttatataaaaattaaattacgttaattacgttaatgttacttttcaataatgatataaaatacagggcgttccattcaacattactgcgaaaacaatgtacttgcgttccgactcaccctgtacttgatataaagaaagttagcaatatgaataattcctaaaaaatt

SEQ ID NO: 1430 - DNA, 1657 bp, Diabrotica virgifera
ggtgttgaacagttttattcatgaaataatcgcaacaaattgcactcgatctctaaaattaatatagtattttgccctcgtgacacttcggctcgtgaaattaaaactgtcaaagtgtcactcgggaaaaattcaataattttagagctcttgtgcaattactactgataatatttttgatatatttacaaactttctggataaagcgttttgaactttcaaatttattgaaacaagttttttttactatgtagaatctgcgacttatttaataggttcattattatgtacttaacagatatatcagaattggataaacattttaaaaaattcatgggttatctcttactagatctagtaatgagataacaaataaactagaattatttaataatcatagaagaacacgataaactctgtaaaaatttatcttaattgccttttaactatattacaattcaataatatatagttcaatgctcgaatatatgaattttacaaataaaacgcagatatcgagcagttatttattaaattttgcccaagtagtttcgctctcatagcatcatcagggggcattccgtcaaaaaaggaagttatccagcaaatcccggaatgtcagacatttaattaaaaataatacaaatagataacacacactggacaagggacaaacataaaaataattattaagggggctacaatatcggctctttgaacataaaatggtatttttacttagaaattaatgaaaaaaattttttttaatcaaacagtttagttttctaaccttgaacacttgaatatttctgttaaattctaacgaaccggaaccattttatctccaaacataactgataatgtcggccacgtacaatctgttatcttatccttgtatctttttatccttgcgtgtgttattatggttccatgacatctcgtaacgcgacagttcgtaacccgacaaatggtaacggacaattcgtaacggcgagagttcgtaactacatattcgtaacggtataattcgtaaggtcaacatttaattattttttaggaaattcaggattacagaagttaataacatatgcattttgcatattttttatatttctatactaaaagtctatctaggtatacagggtgattgattagtaaggtaaagctcaatagctccgctatagtaatagatagcagtaaaagtcaataacaaaaatttcagccacccttgagcttcacattacaaaactagtcagaatgttacagggtgttcgataacacagtggcagaccaaacttatgtctttaaataggacaccctatattccattttaaactcgaaatcctgttaacctctccatcacaaaaatataaaggttcttcatgttatacagggcatttacaaagttataaccaatttcattgaaaatcgtaacaagctcaactccctgtataaataaaaacaagcacaacggcaacggctcattgatgccatactttctatttattgtcgaaatttaaaaaaatgattgatattgccaatcctctccatatctaatacagggtgagccaaaacgcacgtacaccatttcctcagcaattttaaatggaacattttatatcactattgaaaagtaggtaccaggtaccattaccgt

SEQ ID NO: 1431 - DNA, 1508 bp, Diabrotica virgifera
ggtgttgaacagttttattcatgaaataatcgcaacaaattgcactcgatctctaaaattaatatagtattttgccctcgtgacacttcggctcgtgaaattaaaactgtcaaagtgtcactcgggaaaaattcaataattttagagctcttgtgcaattactactgataatatttttgatatatttacaaactttctggataaagcgttttgaactttcaaatttattgaaacaagttttttttactatgtagaatctgcgacttatttaataggttcattattatgtacttaacagatatatcagaattggataaacattttaaaaaattcatgggttatctcttactagatctagtaatgagataacaaataaactagaattatttaataatcatagaagaacacgataaactctgtaaaaatttatcttaattgccttttaactatattacaattcaataatatatagttcaatgctcgaatatatgaattttacaaataaaacgcagatatcgagcagttatttattaaattttgcccaagtagtttcgctctcatagcatcatcagggggcattccgtcaaaaaaggaagttatccagcaaatcccggaatgtcagacatttaattaaaaataatacaaatagataacacacactggacaagggacaaacataaaaataattattaagggggctacaatatcggctctttgaacataaaatggtatttttacttagaaattaatgaaaaaaattttttttaatcaaacagtttagttttctaaccttgaacacttgaatatttctgttaaattctaacgaaccggaaccattttatctccaaacataactgataatgtcggccacgtacaatctgttatcttatccttgtatctttttatccttgcgtgtgttattatggttccatgacatctcgtaacgcgacagttcgtaacccgacaaatggtaacggacaattcgtaacggcgagagttcgtaactacatattcgtaacggtataattcgtaaggtcaacatttaattattttttaggaaattcaggattacagaagttaataacatatgcattttgcatattttttatatttctatactaaaagtctatctaggtatacagggtgattgattagtaaggtaaagctcaatagctccgctatagtaatagatagcagtaaaagtcaataacaaaaatttcagccacccttgagcttcacattacaaaactagtcagaatgttacagggtgttcgataacacagtggcagaccaaacttatgtctttaaataggacaccctatattccattttaaactcgaaatcctgttaacctctccatcacaaaaatataaaggtttttcatgttatacaggacctcgaatacaaaataaaatatagggtgttacatttaaaaaaaaacttaaagttaggtctgccactctgttatcgaacaccctgcaacactccaaccaactttgtaatatgaa

SEQ ID NO: 1432 - DNA, 1328 bp, Diabrotica virgifera
ggtgttgaacagttttattcatgaaataatcgcaacaaattgcactcgatctctaaaattaatatagtattttgccctcgtgacacttcggctcgtgaaattaaaactgtcaaagtgtcactcgggaaaaattcaataattttagagctcttgtgcaattactactgataatatttttgatatatttacaaactttctggataaagcgttttgaactttcaaatttattgaaacaagttttttttactatgtagaatctgcgacttatttaataggttcattattatgtacttaacagatatatcagaattggataaacattttaaaaaattcatgggttatctcttactagatctagtaatgagataacaaataaactagaattatttaataatcatagaagaacacgataaactctgtaaaaatttatcttaattgccttttaactatattacaattcaataatatatagttcaatgctcgaatatatgaattttacaaataaaacgcagatatcgagcagttatttattaaattttgcccaagtagtttcgctctcatagcatcatcagggggcattccgtcaaaaaaggaagttatccagcaaatcccggaatgtcagacatttaattaaaaataatacaaatagataacacacactggacaagggacaaacataaaaataattattaagggggctacaatatcggctctttgaacataaaatggtatttttacttagaaattaatgaaaaaaattttttttaatcaaacagtttagttttctaaccttgaacacttgaatatttctgttaaattctaacgaaccggaaccattttatctccaaacataactgataatgtcggccacgtacaatctgttatcttatccttgtatctttttatccttgcgtgtgttattatggttccatgacatctcgtaacgcgacagttcgtaacccgacaaatggtaacggacaattcgtaacggcgagagttcgtaactacatattcgtaacggtataattcgtaaggtcaacatttaattattttttaggaaattcaggattacagaagttaataacatatgcattttgcatattttttatatttctatactaaaagtctatctaggtatacagggtgattgattagtaaggtaaagctcaatagctccgctatagtaatagatagcagtaaaagttaataacaaaaatttcagccaccctgagcttcacaccacaaaaccagtcagaatgctacagggtgctcgacaacacagtggcagaccaaacttatgtttttttaaataggacaccctatattcc

SEQ ID NO: 1433 - DNA, 1220 bp, Diabrotica virgifera
ggtgttgaacagttttattcatgaaataatcgcaacaaattgcactcgatctctaaaattaatatagtattttgccctcgtgacacttcggctcgtgaaattaaaactgtcaaagtgtcactcgggaaaaattcaataattttagagctcttgtgcaattactactgataatatttttgatatatttacaaactttctggataaagcgttttgaactttcaaatttattgaaacaagttttttttactatgtagaatctgcgacttatttaataggttcattattatgtacttaacagatatatcagaattggataaacattttaaaaaattcatgggttatctcttactagatctagtaatgagataacaaataaactagaattatttaataatcatagaagaacacgataaactctgtaaaaatttatcttaattgccttttaactatattacaattcaataatatatagttcaatgctcgaatatatgaattttacaaataaaacgcagatatcgagcagttatttattaaattttgcccaagtagtttcgctctcatagcatcatcagggggcattccgtcaaaaaaggaagttatccagcaaatcccggaatgtcagacatttaattaaaaataatacaaatagataacacacactggacaagggacaaacataaaaataattattaagggggctacaatatcggctctttgaacataaaatggtatttttacttagaaattaatgaaaaaaattttttttaatcaaacagtttagttttctaaccttgaacacttgaatatttctgttaaattctaacgaaccggaaccattttatctccaaacataactgataatgtcggccacgtacaatctgttatcttatccttgtatctttttatccttgcgtgtgttattatggttccatgacatctcgtaacgcgacagttcgtaacccgacaaatggtaacggacaattcgtaacggcgagagttcgtaactacatattcgtaacggtataattcgtaaggtcaacatttaattattttttaggaaattcaggattacagaagttaataacatatgcattttgcatattttttatatttctatactaaaagtctatctaggtatacagggtgattgattagtaaggtaaagctcaatagctccgctatagtaatagatagcagtaaaagttaataacaaaaatttt

SEQ ID NO: 1434 - DNA, 1265 bp, Diabrotica virgifera
ggtgttgaacagttttattcatgaaataatcgcaacaaattgcactcgatctctaaaattaatatagtattttgccctcgtgacacttcggctcgtgaaattaaaactgtcaaagtgtcactcgggaaaaattcaataattttagagctcttgtgcaattactactgataatatttttgatatatttacaaactttctggataaagcgttttgaactttcaaatttattgaaacaagttttttttactatgtagaatctgcgacttatttaataggttcattattatgtacttaacagatatatcagaattggataaacattttaaaaaattcatgggttatctcttactagatctagtaatgagataacaaataaactagaattatttaataatcatagaagaacacgataaactctgtaaaaatttatcttaattgccttttaactatattacaattcaataatatatagttcaatgctcgaatatatgaattttacaaataaaacgcagatatcgagcagttatttattaaattttgcccaagtagtttcgctctcatagcatcatcagggggcattccgtcaaaaaaggaagttatccagcaaatcccggaatgtcagacatttaattaaaaataatacaaatagataacacacactggacaagggacaaacataaaaataattattaagggggctacaatatcggctctttgaacataaaatggtatttttacttagaaattaatgaaaaaaattttttttaatcaaacagtttagttttctaaccttgaacacttgaatatttctgttaaattctaacgaaccggaaccattttatctccaaacatagctgataatgtcggccccgtacaatctgttatctgtttatccttgtatctatttatccttgctccagcgtgtgttattatggttccatgacatctcgtaacgcgatagttcgtaacccgacacatggtaacggacaattcgtaacggcgagagttcgtaagtacatatttaacatttaatttttttttagcaaattcaggattacagaatttaataaaatatgcattttgcatattttttatattcctattagggcagtcaatgagagcaagaacaggttattacctcctaattccatcctactgcatggacttttaatgaaattttaggaatagcctgaaaatatctccttattcaaagtctaccctatgaaatatcacgtaaatcgatatagtaggatggaatcggagcc

SEQ ID NO: 1435 - DNA, 1086 bp, Diabrotica virgifera
ttttctttatatcagaatacagggtgagtcgagcgcaagtgcattatttttctcagtaattttgaatggagcaccctgtgttttgtgtcactgttgaaaagtaccattgccgtactttgtttttagataacattccctattgtctaaatttattagttttcgagatattttcatttttcaatggaccagtagcgtggccacccaaatcaccagaatttaataaactggactgatttttttggggttacgttaataatgaagtttataaaatacctccaacaacaagggatgagatgaaaaatagaatacaaagtgtatttcgatgtgttaatttacaaatgcttcgtagagtaagtagctcattcaatgatcgtttttaggcgtacataagtgtgttatttataggagataattttgaacaccttatgtaattaaatattaaaaatattttattaaaagtagcttctaattttttcaaacatgtttttttgcaaaatgtattactgataaattatgtttcgttctttatttgttacattgttacatttacatacaaaagtagtgtttaattgtcttcacaaaatattgtattttgtgtttgtgtgttttttttgtaaaatttattactaattttctttgtttatttgttgcatttacataaaaagatagtttttaattgtttcaaaaatgttgcatgtagtggttgtgtttttgtttgtaaaatgtattactaataaattatttttatttctttatttgctacagtgttacattgattaccggattgataatcggtaatcttcaattgtcaattcagtcatggcttacttaaaatttagttaaatttaaacacctaaaataatttgctctgaaaaatgaaaatatttcgaaaactaacaaatccgggcatagggaaggttatataaaaattaaattacgttaattacgttaatgttacttttcaataatgatataaaatacagggcgttccattcaacattactgcgaaaacaatgtacttgcgttccgactcaccctgtacttgatataaagaaagttagcaatatgaataattcctaaaaaatt

SEQ ID NO: 1436 - DNA, 1092 bp, Diabrotica virgifera
ttttctttatatcagaatacagggtgagtcgagcgcaagtgcattatttttctcagtaattttgaatggagcaccctgtgttttgtgtcactgttgaaaagtaccattgccgtactttgtttttagataacattccctattgtctaaatttattagttttcgagatattttcatttttcaatggaccagtagcgtggccacccaaatcaccagaatttaataaactggactgatttttttggggttacgttaataatgaagtttataaaatacctccaacaacaagggatgagatgaaaaatagaatacaaagtgtatttcgatgtgttaatttacaaatgcttcgtagagtaagtagctcattcaatgatcgtttttaggcgtacataagtgtgttatttataggagataattttgaacaccttatgtaattaaatattaaaaatattttattaaaagtagcttctaattttttcaaacatgtttttttgcaaaatgtattactgataaattatgttttgttctttatttgttacatttacatacaagagtagtgtttaattgccttcacaaaatattgtatattgtgtttgtgtgttttttttgtaaaatttattactaattttctttgtttatttgttgcatatacataaaaagatactttttaattgtttcaaaaatgttgcatgtagtggttgtgtttttgtttgtaaaatgtattactaataaattatttttatttctttatttgctacagtgttacatttatcattgatcattgattaccggattgataatcggtaatcttcaattgtcaattcagtcatggcttacttaaaatttagttaaatttaaacacctaaaataatttgctctgaaaaatgaaaatatttcgaaaactaacaaatccgggcatagggaaggttatataaaaattaaattacgttaattacgttaatgttacttttcaataatgatataaaatacagggcgttccattcaacattactgcgaaaacaatgtacttgcgttccgactcaccctgtacttgatataaagaaagttagcaatatgaataattcctaaaaaatt

SEQ ID NO: 1437 - DNA, 1485 bp, Diabrotica virgifera
  SmartBlast Evalue=6E-13; Info=DNA adenine methyltransferase n=1 Tax=Aster yellows phytoplasma RepID=Q847N9_ASTYP
ttcctggatgatggggttgttttcttagaatagaatagaatagaaatatgctttattgtcatgaaaattgtacaattttatagacaaagcttacaagaatcataaataaaaacaataacaaatacaatttactaaaattatacaaatcgtcaatataaataaaacataataaagtcaaataaaaatcagtaacaatctattgcaaaattaaaaaaaaattgcaaattgcgtaatctaccttaagaaatttaataagtaatttaataagttatgctgctgcatgtgacactcaaatatagattaagattctacttatacataacaatactgtaatttcttagttattggttaagaaactctgctattgaataatatggtctttcagataaataggctttagtaattttacggaacttggggaaagatgttgcagatttaagttgtagagggagatggttgtacagtttttttgcagaatataatatagatttcttaactaactcactggacgggatcggtaaatagatgtcaaaggtagaatttctggtggaatagtcatgtctaggtcttgctggaaagacatgtagatgtttacgaattaagcaaacagtttctaaaatatataaagaaggtagtgttagaatcctgtgatctttgaagtagcttctgcaatgtgttgttcttctgaggccaaacagatatcttattgctctttttttgtaatttaaaaataacatcggattgggcagctgtaccagaaccccaaaaaggaagaccatatcgaagatgggactcgaacaaagaaaaatatgttattttggaagaggctaaattatttccttcgaaacagatcttattgcaaagcaagctgaggatagtttcttgcttaacacatcgatatgaagggaccatttaaggttgctatctaaaaaaataccaagaaactttacagaatcaacgatactgatctggctgttatgaagaggtaagggttgaagagttcctttaagggtaatgctactgttttatctacgttaaaagagagtaaattagaatcggaccaggattttattgtgagtagatcagaagttatagtagcatgaagagttgcgatatttgagttgctccaagtgatactggtatcgtcagcaaatagaaaaacttttccatcgatttttaaactagtgatgtcattaataaagatgactccccctggatccgcgcctggtaaacgggtttacgtgcgtttgaaccatttcaccacgaaactatttttagtattttgtaaaaacacatgttaatgcaggcataatttcaagtaaatataatataagatttgtgccgaattttgaagactaattaagtattaagcaacgcgccagttgtagttacactgtggataacaactgggatagaaatgattagtgttaacatctgctcttgaaccgttttactagtaacatttttatcaacaccataataccg

SEQ ID NO: 1438 - DNA, 1382 bp, Diabrotica virgifera
  SmartBlast Evalue=1E-12; Info=ReO_6 protein n=1 Tax=Oryzias latipes RepID=Q8UUM3_ORYLA
agaatagaaatatgctttattgtcactgaaaatacaaattttatggacaaagcttaattaaagtcagaaaatataaataaataatatctaacaaaacaataacaaatacaattttctgaaatttgataaatcgtcaatataaaaaaatatacataaatacaaaatataagttaataaagtaaagaaaaaaaaatcgatatattgcaacaatttatagaaattgcaaagtgaatatacaacaaagtaaaatatttatagacataggaactaataagtttaagctgctgcatgtgacacccaaatatagataagtttggttacttgtacattactgtgattttcttagttattcattaagaaattcttctattgaataatatggtctttcagatagataggcttttgtcagtttacggaacttgggaaagatgttgcagatttaagttgtaaaggagatggttgtaaagtttttttgcggaatataatatagatttctttactaactcagaggacggggtcggcatatagacgtcaaacgtagaatttctcgtgaagtagtcatgattaggtcttggtggaaagacatgtagatgtttacgaattaagcaaacagtttctaaaatatacaaagatggaagggttaaaattccgtgatctttgaagtaacttctgcaatgtgttgttcttctgaggccaaacagatatcttattgctcttttttgtaatttgaaaataacatcaattgggcagctgtaccagaaccccaaaaaggaagaccatatcgaagatgagactcgaataaagaaaaatatgttattttagaagatgctaaattgagttccttcgaaacagatcttatggcatagcaggccgaggcgagtttcttacttaacaaatcgatatgaagggaccatttgaggttgctgtctaaaagaataccaagaaattttacagaatcaacggtagagatctggctgctattcacaagcaggggttgaagagcacctttataggataatgctactgttttatccacgttaaaagagagtaaattagagtcagaccaggtctttatcgtaagtaagatccgaagttatagttgcatgaagagttgcaatagttgagttgctccaagtgatactggtatcatcagcaaaaagaaaaatttttccatcgatttttaaattagtgatgtcatttataaagataaggaacagtagaggacccaatactgaaccttgtggtactccacataaatgtttttgagactagagtcagtatcatttgctctaactagttgtttcctattatccaagtaggattggaaccaattcaaagaaatacctctattccgtagaaattgagttttttattaaaatatc

SEQ ID NO: 1439 - DNA, 1384 bp, Diabrotica virgifera
agaatagaaatatgctttattgtcactgaaaatacaaattttatggacaaagcttaattaaagtcagaaaatataaataaataatatctaacaaaacaataacaaatacaattttctgaaatttgataaatcgtcaatataaaaaaatatacataaatacaaaatataagttaataaagtaaagaaaaaaaaatcgatatattgcaacaatttatagaaattgcaaagtgaatatacaacaaagtaaaatatttatagacataggaactaataagtttaagctgctgcatgtgacacccaaatatagataagtttggttacttgtacattactgtgattttcttagttattcattaagaaattcttctattgaataatatggtctttcagatagataggcttttgtcagtttacggaacttgggaaagatgttgcagatttaagttgtaaaggagatggttgtaaagtttttttgcggaatataatatagatttctttactaactcagaggacggggtcggcatatagacgtcaaacgtagaatttctcgtgaagtagtcatgattaggtcttggtggaaagacatgtagatgtttacgaattaagcaaacagtttctaaaatatacaaagatggaagggttaaaattccgtgatctttgaagtaacttctgcaatgtgttgttcttctgaggccaaacagatatcttattgctcttttttgtaatttgaaaataacatcaattgggcagctgtaccagaaccccaaaaaggaagaccatatcgaagatgtgactcgaacaaagaaaaatatgttattttggaagatgctaaattgagttcattcgaaacagatcttatagcatagcaagctgaagatagtttcttccttaacaaatcgatatggagggaccatttaaagttgctgtctaaaaaaataccaagaaattttacagaatcaacggtactgatctggctgttattaagaggtaagggttgaagagctcctttataagacaatgctactgttttatctacgttaaacgagagtaaatttgagtcagaccaggtttttattgtaagtagatcagaagttatagtagcatgaagagttgcaatatttgagttgctccaagtgatactggtatcatcagcaaaaagaaagatttttccatcgatttttaaactagtgatgtcattaatgttggccataatttcttcaatcgttttgaaattccgggaggaacatttagcagtcttgcttcattatttggatgacttcttagtccatcaaggtagttctttgtgattcttcaaatgtcttcctctgtcaaaggtgtagctgaatcctcgtgtaggattttattgcttacataataccagggc

SEQ ID NO: 1440 - DNA, 1246 bp, Diabrotica virgifera
  SmartBlast Evalue=5E-13; Info=DNA adenine methyltransferase n=1 Tax=Aster yellows phytoplasma RepID=Q847N9_ASTYP
ttcctggatgatggggttgttttcttagaatagaatagaatagaaatatgctttattgtcatgaaaattgtacaattttatagacaaagcttacaagaatcataaataaaaacaataacaaatacaatttactaaaattatacaaatcgtcaatataaataaaacataataaagtcaaataaaaatcagtaacaatctattgcaaaattaaaaaaaaattgcaaattgcgtaatctaccttaagaaatttaataagtaatttaataagttatgctgctgcatgtgacactcaaatatagattaagattctacttatacataacaatactgtaatttcttagttattggttaagaaactctgctattgaataatatggtctttcagataaataggctttagtaattttacggaacttggggaaagatgttgcagatttaagttgtagagggagatggttgtacagtttttttgcagaatataatatagatttcttaactaactcactggacgggatcggtaaatagatgtcaaaggtagaatttctggtggaatagtcatgtctaggtcttgctggaaagacatgtagatgtttacgaattaagcaaacagtttctaaaatatataaagaaggtagtgttagaatcctgtgatctttgaagtagcttctgcaatgtgttgttcttctgaggccaaacagatatcttattgctctttttttgtaatttaaaaataacatcggattgggcagctgtaccagaaccccaaaaaggaagaccatatcgaagatgggactcgaacaaagaaaaatatgttattttggaagaggctaaattatttccttcgaaacagatcttattgcaaagcaagctgaggatagtttcttgcttaacacatcgatatgaagggaccattgaaggttgctgtccaggtttttattgtaagtaggtcagatgttatagtagcatgaagagttgcaatatttgagttgctccaagtgatactggtatcatcagcaaaaagaaagatttttccatcgatttttaaactagtgatgtcattaatgttggccataatttcttcaatcgttttgaaattccgggaggaacatttagcagtcttgcttcattatttggatgacttcttagtccatcaaggtagttctttgtgattcttcaaatgtcttcctctgtcaaaggtgtagctgaatcctcgtgtaggattttattgcttacataataccagggc

SEQ ID NO: 1441 - DNA, 908 bp, Diabrotica virgifera
  SmartBlast Evalue=8E-13; Info=ReO_6 protein n=1 Tax=Oryzias latipes RepID=Q8UUM3_ORYLA
gcggaatatagtatagatttctttactaactcagaagacgggatcggtaaatagacatcaaaagttgaatttctggtggagtagtcatgatgaggccttgctggaaagacatgcatgtgtttacgaattaagcaaacagtttctaaaatatataaagatgtaagggttaaaatgccgtgatctttgaagtaacttctgcaatgtgttgttcttctgaggccaaacagatatcttattgctcttttttgtaatttgaaaataacatcaattgggcagctgtaccagaaccccaaaaaggaagaccatatcgaagatgagactcgaataaagaaaaatatgttattttagaagatgctaaattgagttccttcgaaacagatcttatggcatagcaggccgaggcgagtttcttacttaacaaatcgatatgaagggaccatttgaggttgctgtctaaaagaataccaagaaattttacagaatcaacggtagagatctggctgctattcacaagcaggggttgaagagcacctttataggataatgctactgttttatccacgttaaaagagagtaaattagagtcagaccaggtctttatcgtaagtaagatccgaagttatagttgcatgaagagttgcaatagttgagttgctccaagtgatactggtatcatcagcaaaaagaaaaatttttccatcgatttttaaattagtgatgtcatttataaagataaggaacagtagaggacccaatactgaaccttgtggtactccacataaatgtttttgagactagagtcagtatcatttgctctaactagttgtttcctattatccaagtaggattggaaccaattcaaagaaatacctctattccgtagaaattgagttttttattaaaatatc

SEQ ID NO: 1442 - DNA, 910 bp, Diabrotica virgifera
gcggaatatagtatagatttctttactaactcagaagacgggatcggtaaatagacatcaaaagttgaatttctggtggagtagtcatgatgaggccttgctggaaagacatgcatgtgtttacgaattaagcaaacagtttctaaaatatataaagatgtaagggttaaaatgccgtgatctttgaagtaacttctgcaatgtgttgttcttctgaggccaaacagatatcttattgctcttttttgtaatttgaaaataacatcaattgggcagctgtaccagaaccccaaaaaggaagaccatatcgaagatgtgactcgaacaaagaaaaatatgttattttggaagatgctaaattgagttcattcgaaacagatcttatagcatagcaagctgaagatagtttcttccttaacaaatcgatatggagggaccatttaaagttgctgtctaaaaaaataccaagaaattttacagaatcaacggtactgatctggctgttattaagaggtaagggttgaagagctcctttataagacaatgctactgttttatctacgttaaacgagagtaaatttgagtcagaccaggtttttattgtaagtagatcagaagttatagtagcatgaagagttgcaatatttgagttgctccaagtgatactggtatcatcagcaaaaagaaagatttttccatcgatttttaaactagtgatgtcattaatgttggccataatttcttcaatcgttttgaaattccgggaggaacatttagcagtcttgcttcattatttggatgacttcttagtccatcaaggtagttctttgtgattcttcaaatgtcttcctctgtcaaaggtgtagctgaatcctcgtgtaggattttattgcttacataataccagggc

SEQ ID NO: 1443 - DNA, 829 bp, Diabrotica virgifera
agaatagaaatatgctttattgtcactgaaaatacaaattttatggacaaagcttaattaaagtcagaaaatataaataaataatatctaacaaaacaataacaaatacaattttctgaaatttgataaatcgtcaatataaaaaaatatacataaatacaaaatataagttaataaagtaaagaaaaaaaaatcgatatattgcaacaatttatagaaattgcaaagtgaatatacaacaaagtaaaatatttatagacataggaactaataagtttaagctgctgcatgtgacacccaaatatagataagtttggttacttgtacattactgtgattttcttagttattcattaagaaattcttctattgaataatatggtctttcagatagataggcttttgtcagtttacggaacttgggaaagatgttgcagatttaagttgtaaaggagatggttgtaaagtttttttgcggaatataatatagatttctttactaactcagtggatgggatcggtaaataaatatcaaagattgaatttctggtggagtagagatgattgggccttgctggaaagacatgaaggtgtttacgaattaaacaaaccgtttctagaatatataaagatggaagtgttaaaattccgtgatctctgaagtaacttctgcaatgtgtagttcttctgaggccaaacagatatcttattgctcttttttgcaatttaaaaagtaacatcaagattgagcagctgtactagaaccccaaaaaggaagaccatatcgaagatgagactcgaacaacgaaaaatatgttattttagaaga

SEQ ID NO: 1444 - DNA, 490 bp, Diabrotica virgifera
acgaatcgatatgaagggaccatttgaggtttctgtctaaaaaataccaagaaattttacagaatcaacggtactgatctggctattattaagaggcaaaggttgaagagcacctttataggataatgctactgttttatccacgttaaaagagagtaaattagagtcagaccaggtctttatcgtaagtaagatccgaagttatagttgcatgaagagttgcaatagttgagttgctccaagtgatactggtatcatcagcaaaaagaaaaatttttccatcgatttttaaattagtgatgtcatttataaagataaggaacagtagaggacccaatactgaaccttgtggtactccacataaatgtttttgagactagagtcagtatcatttgctctaactagttgtttcctattatccaagtaggattggaaccaattcaaagaaatacctctattccgtagaaattgagttttttattaaaatatc

SEQ ID NO: 1445 - DNA, 268 bp, Diabrotica virgifera
ttcctggatgatggggttgttttcttagaatagaatagaatagaaatatgctttattgtcatgaaaattgtacaattttatagacaaagcttaacatagagttcacgaaaaagatatacataacaataacaaatacaattttataaaattagataaatcgtcaataaaaaaatatataaacaagttaaaaaagtgaagtaaaaaacaaaaaccaatatattgcaaaattactataaattgcaaaattgaacctacaacataatataat

SEQ ID NO: 1446 - DNA, 3426 bp, Diabrotica virgifera
  SmartBlast Evalue=1E-161; Info=Protein arginine N- methyltransferase 8 n=3 Tax=Aculeata RepID=E2BZ08_9HYME
taatatcaaaacagcagtactaacagcagcagcgtccaccctgggaaacaagaaaaaggagagaagagcttcatggtttgatgacgagtgcagacaagcaatagaggaaagaaatgaagcacacaaaatgtacataacaagaagaacacgggaaagacgaacattatttgaagtcgcaagacggaaagcagacaagatatgtagaaataaaaagagagcctatgaaaatggacaaatagaaaaaatggaagaaaatttcaaaacaacgaaattagaggggcttacgaatacctaaaaaagataagaagtgggtataaacctcaaacaagtctatgtaaagatgaaagtgggcaaataatcagtgaccaacagaaagtcacagaaacctggaagcattattttcagaccctacttggaactcaagtagacatggaagatgaaatgggtatgatctacgtagaagagaatggagtagaagctccaactatagaggaagttctcgaagctattaaggcccagaaaaacaataaagctccgggagttgacgaaataccagcagaactatataaggtaggtggcgaccacctagcaagtcacatccacgcgctcatcagagacctatggcaagaagagaaaatacccgacgactggaagaaaagtatagtatgcccgatctataaaaaaggagacaaactccagtgcaaaaactaccgtggaatctctctactatgtacagcatataaagtcctcacgtatattataaaccagcggctccaaccactagcagaaaatattattggagagtatcagacgggcttccgacggggaagatcgacactggatcaaatatttacagtcaaacagatcttgagcaaagcatgggaacacgatattgatgttcacaacgtgtttgtagacttcaaacaggcatacgactcagtcaaaaggaacaaactatactatatattggctgaattggcaataccacacaagctaataagactcattaaagccacaatggatgaaactcaggcatgtgtacgaatacaaaaccaccggacagactttttaacatttcgcagggactaaagcagggagatgggctggccccaacattgtttaacctggcactggagtatgcggttaggcaaatgcaaactggacgaggaaactactgaccaaccgaacggttcaactggccgcttatgctgatgatattaatattatgagtagaacatcaacaggagcacaggaaacatatgcagagttaaaaacacaaacaaaaatgctaggtctggaaattacacagaaaaaacaaaaataatgactcagacgagaagaaatatagtcccagaaaacattatacatgagatgacattgaaacggttgaaaagtttacatatctgggagtagaaatatatgccgacggatcagaagatggagaaataaggaagagaataacgcaggcaaacagagcttattttgccctctcccatatatttcggtcaaaaagtgtccaccgaaatacaaagatgagaatctataaaaccttaattcgaccaataacatgctatggcagtgaagtctgggtgctgaaagaaacatccaaaaacaaactctacacattcgaaaggaaagtacttaggagaatactaggacctgtgagggaaaacggaatcttcagaagtcgatacaacaacgagctttatcaactttataaggaaacgcccctgtcagacttcattagattacaaagattgcaatgggccggacatgtgataagaatgggagaggataggctaccaaaacgagcactgcatgctttaatgcaaggaaagagaccagttgggaagccacgaaagcgctgggaagacacagtaaacagcgacgcacaagcccttttaggagtccgtgtatggagaagagcagccacagacaggcaagggtggaggcaaaaaataaaggaggccaaagctcaatttgggctgtagtgccgtagaagaagaagaaattggacttacaaactggaacaacgaagggaaaagtttgttttaagacaaaaccaaatgttgatttcatgaaccctaaggtattttggtggtccaattagaccactgctacttacagatgtttttcatttacatgatccattaaagattctttatcaagtgattttaaacttaacagttatttgacaactgcaatagtagtaacagataaaaaacttatactagaaaaatatgttaacgcattctatatctattgacttcatgcacttcgcctaactctcccttgaaatgtagttcaatgacaaaatctaaatccctattattacgggggttaggtttcatggtaaacattccatgtatttcttcattcttctttactgtcatatagttttcaaaatagaacactgtttgtttccaatgggtgtatggagcgtctggggcagtggtgaaacctatacgcttatggcatttgctaaattcaactgtaaaatatgtaactaaagcttgcacataatcatttcttctaactgtcagcatgaagggtgaagtgaaatccagatcttctttttttacagtgtatagatcaacttcctttattaaagcaggtccagtaacaacttgtttaggatccaccacatccactaaaggttcactaatagctactttgcgtatagaactcatgtcgaaaccataaacatcatcccaccagttgattttttcgtccttatactgtctgtcttcaatggcagtaacaaagagtgagcatcgatcaggaaatagaagaccatcaggctgcaaccacttgtctcttgcgaatagtacagtatcgagcatactctcatagaacaaacagtaacccatccactcggaaattataatatctactttctcgatgccgtctggtaatgttatttcttctactttgcccttgacaatggtaatgatgtggtctaatttgttggtttcgattatttgtttggcatagtccactatattcgaacattcaacagcaagaacttttttagccccggctttagcagcaaacatactaagaatacctgtaccacagccaatatccataacaactttgcccgcaaataaatgtttgttatgatacatggaatttctatatgtgagggttcttacttcatcttttaacatttcctcgtggattccaaaatgtgcataagaatcgaagtagtagtctctggaggtcatttcctcggcaggtatgtcttccattttctctcccttggtaacatgattgttaagaactgctgttggagctacttccatagtttccattttatgtgctgctaaaagtcgttgcttttcttttattgtaaacgggcaagttttattttctaaaagaatctatttcttggcgcctaaccagaaattattgtttggcttttag

SEQ ID NO: 1447 - DNA, 2760 bp, Diabrotica virgifera
  SmartBlast Evalue=5E-69; Info=Endonuclease-reverse transcriptase n=1 Tax=Bombyx mori RepID=D7F170_BOMMO
taatatcaaaacagcagtactaacagcagcagcgtccaccctgggaaacaagaaaaaggagagaagagcttcatggtttgatgacgagtgcagacaagcaatagaggaaagaaatgaagcacacaaaatgtacataacaagaagaacacgggaaagacgaacattatttgaagtcgcaagacggaaagcagacaagatatgtagaaataaaaagagagcctatgaaaatggacaaatagaaaaaatggaagaaaatttcaaaacaacgaaattagaggggcttacgaatacctaaaaaagataagaagtgggtataaacctcaaacaagtctatgtaaagatgaaagtgggcaaataatcagtgaccaacagaaagtcacagaaacctggaagcattattttcagaccctacttggaactcaagtagacatggaagatgaaatgggtatgatctacgtagaagagaatggagtagaagctccaactatagaggaagttctcgaagctattaaggcccagaaaaacaataaagctccgggagttgacgaaataccagcagaactatataaggtaggtggcgaccacctagcaagtcacatccacgcgctcatcagagacctatggcaagaagagaaaatacccgacgactggaagaaaagtatagtatgcccgatctataaaaaaggagacaaactccagtgcaaaaactaccgtggaatctctctactatgtacagcatataaagtcctcacgtatattataaaccagcggctccaaccactagcagaaaatattattggagagtatcagacgggcttccgacggggaagatcgacactggatcaaatatttacagtcaaacagatcttgagcaaagcatgggaacacgatattgatgttcacaacgtgtttgtagacttcaaacaggcatacgactcagtcaaaaggaacaaactatactatatattggctgaattggcaataccacacaagctaataagactcattaaagccacaatggatgaaactcaggcatgtgtacgaatacaaaaccaccggacagactttttaacatttcgcagggactaaagcagggagatgggctggccccaacattgtttaacctggcactggagtatgcggttaggcaaatgcaaactggacgaggaaactactgaccaaccgaacggttcaactggccgcttatgctgatgatattaatattatgagtagaacatcaacaggagcacaggaaacatatgcagagttaaaaacacaaacaaaaatgctaggtctggaaattacacagaaaaaacaaaaataatgactcagacgagaagaaatatagtcccagaaaacattatacatgagatgacattgaaacggttgaaaagtttacatatctgggagtagaaatatatgccgacggatcagaagatggagaaataaggaagagaataacgcaggcaaacagagcttattttgccctctcccatatatttcggtcaaaaagtgtccaccgaaatacaaagatgagaatctataaaaccttaattcgaccaataacatgctatggcagtgaagtctgggtgctgaaagaaacatccaaaaacaaactcgacacattcgaaaggaaagtacttaggagaatactaggacctgtgagggaaaacggaatcttcagaagtcgatacaacaacgagctttatcaactttataaggaaacgcccctgtcagacttcattagattacaaagattgcaatgggccggacatgtgataagaatgggagaggataggctaccaaaacgagcactgaatgctagaatgcaaggaaagagaccggttgggaagccacgaaagcgctgggaagacacagtaaacagcgacgcacaagcccttttaggagtccgtgtatggagaagagcagccacagacaggcaagggtggaggcaaaaaataaaggaggccaaggctcaatttgggctgtagtgccgtagaagaagaagaagaagtatggagtttatgactttggaaaggtatgatgtaacaataattaaagcttcaaaattttagataataaatattgaagtactggggtcatagcaagttaaaaacgcaaaaaattccacataatgaaaaataaccaaaactatattgaaaatatactataatggcacccaacgtggggcttaaacagcagaacagtaatttttggatgtataattggcatcaacatatgtttagcttgacttcacacagtacatgaattttttaagttatttttgcgacattcattctttacacttctttttctttaaaaccaactttaagtatcacctagttggttttaggacgatctaaaactttcccctacatagtttgacgcaacatcacaatgaatgtgtcaccacatatggctcaaactaaactacaaacagaaagttataaaaaaaaacttctaagaataacttttaagaaatgaaaaactaacaaatggtttaggcgttggacaaaattctaagacataatacaaagagtatgttccttacaattgaactggaccggcagttctggagtagaaatatggatggttagatggaatccatggcgagaaagaaaaaacgtaggaagacagcaacaaagagggtactatcgaggacttaaaaagaacagtgggactaaattggtaccggctaaatcgaaatagagaaaactgaagagcaatgaaggaagcctatactgaacagataaagaaagg

SEQ ID NO: 1448 - DNA, 2684 bp, Diabrotica virgifera
  SmartBlast Evalue=3E-42; Info="Solute carrier family 2, facilitated glucose transporter member 8 n=1 Tax=Zea mays RepID= B6U615_MAIZE"
caggttcacagtcttttatccataaaactattttaaacagtaaatttaatataaaaaaaatgtaagatggacaattataaaaaatacatattatgaaaaacttttgaatgtaaaataaaaaaaattatgtaaaatctcatttgataaaaatttgaaatgcataacatgataaataaaaatgatctaaaataacaattattaacaatataccttatacataatatatacatatatataaaccatatttctacaggcaaattcaaatcaaaggtagacatgtgtgtttaaaatctcctccatacgagcagacttaaaaaatatccccagacttttaggtgtaaaacgatctttgtagaattattatttaatatatcgtgtctgcataatatatttaataatttgactaaaattttttggtatatcactcctctctatgaccgttacttagttatcttattgtttacgctataaataatttcctacaatattctacaagtcatcaataattttctaaatattctaaacgctataaatcatttactacaatattccacactttatttggatttgtctgtattttgtagatttatttaacaaagttgctacaaaaaatacagattgttgttattgatttttttttttcaagaattatgcttttatatcgttcctcttgatgtttcgataatttgctttcattgaatctatttctatgttttgaattactgttccgtaactactttttccactttgctatttcttcaagcatatttcataaatcatttgattcagataacaatatctggcagtaaaggacaatcacaagacaccaaggccttttctgtcgccaacagacgaaatcctttgcctatctagtataaataaaaatctcacgatctgtacatggaatgttaaaacattgtacgatgtaggtaagactcatattgcaatcaaggagatggatagactaacaatagacatggtgggaataagtgaaatgagatggacgaactctgtgaatgtaaaatcagtgacgattacatatatgtatattattcagataacctcaatggaagacacgaaaatggagtaggtataatcttaaaccaagaaacatgccaaacacgttaataacttcgtacctatatcagaaagaatgctcgtcctttattaccttaatacctaaccaattacaactaatcccaggtatatgttcctatatgggagattggtagacttctattttcaaaaaactcctttacttcgatatcagttggattgttttgtatacgtgctactgtacatgtgtacacagtaaaaactttgtcctaaactaaatagacaagagaaaatttatttagatacctaccagaaataaaatagaacggaaaatactcacagaaaattgaaacaaacaaaaactgaacaaaacacagaagaaaatatctagtagtgactttactaaaaaagcaaaaaagttataaataaaacaaagaaaaatttctatgcatggaataacattgagatgtaaagcatcatcgcgaaggtgacaaactgaaatgaaaatagacaaagaaaagtgtgtgggacacaactaactgaatgtagatgatgatacgttaacgatgtgatgtgagtattaatcaaaagtacttctgaacactcaacttggtcctcatttcagatactttctactgaaatttctcaattatataacataattattttctcaagtttctttaatttattcgatctcatctgcagttgtacatcttccaaggttttgcccttggtttctggtagaaatatagaaaggataattacactagcaaaactgaagatagcaaacgtgaagaatggtaccgctaggctgaaagtactagcactccagctaaaatatttaacaacgctggttgaaacgacgctgtagcacaagttgatgacgcagaaggccttacttttgatgtgagaggggaatatctcactactaactaatataggaacacaatttaatcctatgctataggcgcatatataaactagtatagctactatctgaatatactcatatccagacaaatctatatgtgttgagtttttaatgtaagagtaagcacttattgtaaataatgtgatacatactacaactgaggagaagagaaccaaaggttttcttcctgagatatcaataagaaccaaggcaaccaaagttgctagaaagtacagtagatagtaaatcaaatttgccacttttggatctataatgtcgctggtttcttgaaatacttcctgacagtacgactgtatacctaatataccactcagttgttgtaaacttgtcatggagagggcaaggaacaagcaattgcggtattgtggttttaagaatagttctttgagacctccttttggcgtacttctcctcttccataatacccttggatattcttcctatttcgtcgtcgacctctccttttcctctgaacttttgtaaactctctttcgccaacgcgacctcactcctcaatagatagaaatatggactttctggaaggaatggcaaaatgatcatcattactaaagtaacgctacctgcaatgtaagcctgggctggaatcgatatgaagtatagcatcacgttggacatcagcattccaaaaaaccagtgtgaccaaatatgtcgtacc

SEQ ID NO: 1449 - DNA, 2612 bp, Diabrotica virgifera
  SmartBlast Evalue=2E-42; Info="Solute carrier family 2, facilitated glucose transporter member 8 n=1 Tax=Zea mays RepID= B6U615_MAIZE"
caggttcacagtcttttatccataaaactattttaaacagtaaatttaatataaaaaaaatgtaagatggacaattataaaaaatacatattatgaaaaacttttgaatgtaaaataaaaaaaattatgtaaaatctcatttgataaaaatttgaaatgcataacatgataaataaaaatgatctaaaataacaattattaacaatataccttatacataatatatacatatatataaaccatatttctacaggcaaattcaaatcaaaggtagacatgtgtgtttaaaatctcctccatacgagcagacttaaaaaatatccccagacttttaggtgtaaaacgatctttgtagaattattatttaatatatcgtgtctgcataatatatttaataatttgactaaaattttttggtatatcactcctctctatgaccgttacttagttatcttattgtttacgctataaataatttcctacaatattccacactttattttgatttgtctgtattttgtagatttatttaacaaaaaatacagattgttgttattgatttttttttttcaagaattatgcttttatatcgttcctcttgatgtttcgataatttgctttcattgaatctatttctatgttttgaattactgttccgtaactactttttccactttgctatttcttcaagcatatttcataaatcatttgattcagataacaatatctggcagtaaaggacaatcacaagacaccaaggccttttctgtcgccaacagacgaaatcctttgcctatctagtataaataaaaatctcacgatctgtacatggaatgttaaaacattgtacgatgtaggtaagactcatattgcaatcaaggagatggatagactaacaatagacatggtgggaataagtgaaatgagatggacgaactctgtgaatgtaaaatcagtgacgattacatatatgtatattattcagataacctcaatggaagacacgaaaatggagtaggtataatcttaaaccaagaaacatgccaaacacgttaataacttcgtacctatatcagaaagaatgctcgtcctttattaccttaatacctaaccaattacaactaatcccaggtatatgttcctatatgggagattggtagacttctattttcaaaaaactcctttacttcgatatcagttggattgttttgtatacgtgctactgtacatgtgtacacagtaaaaactttgtcctaaactaaatagacaagagaaaatttatttagatacctaccagaaataaaatagaacggaaaatactcacagaaaattgaaacaaacaaaaactgaacaaaacacagaagaaaatatctagtagtgactttactaaaaaagcaaaaaagttataaataaaacaaagaaaaatttctatgcatggaataacattgagatgtaaagcatcatcgcgaaggtgacaaactgaaatgaaaatagacaaagaaaagtgtgtgggacacaactaactgaatgtagatgatgatacgttaacgatgtgatgtgagtattaatcaaaagtacttctgaacactcaacttggtcctcatttcagatactttctactgaaatttctcaattatataacataattattttctcaagtttctttaatttattcgatctcatctgcagttgtacatcttccaaggttttgcccttggtttctggtagaaatatagaaaggataattacactagcaaaactgaagatagcaaacgtgaagaatggtaccgctaggctgaaagtactagcactccagctaaaatatttaacaacgctggttgaaacgacgctgtagcacaagttgatgacgcagaaggccttacttttgatgtgagaggggaatatctcactactaactaatataggaacacaatttaatcctatgctataggcgcatatataaactagtatagctactatctgaatatactcatatccagacaaatctatatgtgttgagtttttaatgtaagagtaagcacttattgtaaataatgtgatacatactacaactgaggagaagagaaccaaaggttttcttcctgagatatcaataagaaccaaggcaaccaaagttgctagaaagtacagtagatagtaaatcaaatttgccacttttggatctataatgtcgctggtttcttgaaatacttcctgacagtacgactgtatacctaatataccactcagttgttgtaaacttgtcatggagagggcaaggaacaagcaattgcggtattgtggttttaagaatagttctttgagacctccttttggcgtacttctcctcttccataatacccttggatattcttcctatttcgtcgtcgacctctccttttcctctgaacttttgtaaactctctttcgccaacgcgacctcactcctcaatagatagaaatatggactttctggaaggaatggcaaaatgatcatcattactaaagtaacgctacctgcaatgtaagcctgggctggaatcgatatgaagtatagcatcacgttggacatcagcattccaaaaaaccagtgtgaccaaatatgtcgtacc

SEQ ID NO: 1450 - DNA, 1634 bp, Diabrotica virgifera
  SmartBlast Evalue=4E-82; Info=Endonuclease-reverse transcriptase n=1 Tax=Bombyx mori RepID=D7F170_BOMMO
taatatcaaaacagcagtactaacagcagcagcgtccaccctgggaaacaagaaaaaggagagaagagcttcatggtttgatgacgagtgcagacaagcaatagaggaaagaaatgaagcacacaaaatgtacataacaagaagaacacgggaaagacgaacattatttgaagtcgcaagacggaaagcagacaagatatgtagaaataaaaagagagcctatgaaaatggacaaatagaaaaaatggaagaaaatttcaaaacaacgaaattagaggggcttacgaatacctaaaaaagataagaagtgggtataaacctcaaacaagtctatgtaaagatgaaagtgggcaaataatcagtgaccaacagaaagtcacagaaacctggaagcattattttcagaccctacttggaactcaagtagacatggaagatgaaatgggtatgatctacgtagaagagaatggagtagaagctccaactatagaggaagttctcgaagctattaaggcccagaaaaacaataaagctccgggagttgacgaaataccagcagaactatataaggtaggtggcgaccacctagcaagtcacatccacgcgctcatcagagacctatggcaagaagagaaaatacccgacgactggaagaaaagtatagtatgcccgatctataaaaaaggagacaaactccagtgcaaaaactaccgtggaatctctctactatgtacagcatataaagtcctcacgtatattataaaccagcggctccaaccactagcagaaaatattattggagagtatcagacgggcttccgacggggaagatcgacactggatcaaatatttacagtcaaacagatcttgagcaaagcatgggaacacgatattgatgttcacaacgtgtttgtagacttcaaacaggcatacgactcagtcaaaaggaacaaactatactatatattggctgaattggcaataccacacaagctaataagactcattaaagccacaatggatgaaactcaggcatgtgtacgaatacaaaaccaccggacagactttttaacatttcgcagggactaaagcagggagatgggctggccccaacattgtttaacctggcactggagtatgcggttaggcaaatgcaaactggacgaggaaactactgaccaaccgaacggttcaactggccgcttatgctgatgatattaatattatgagtagaacatcaacaggagcacaggaaacatatgcagagttaaaaacacaaacaaaaatgctaggtctggaaattacacagaaaaaacaaaaataatgactcagacgagaagaaatatagtcccagaaaacattatacatgaagatgacattgaaacggttggaaagtttacatacctgggagtagaaatatatgccgacggatcagaagatggagaaatacggaagagaataacgcaggcaaacagagcttattttgccctctcccatatatttcggtctaaaagtgtccaccgaaatacaaagatgagaatctataaaaccttaattcgaccaataacatgctatggcagaagcctgggtcctgaaagaaacatccaaaaacaaactcgacacattcgaaagga

SEQ ID NO: 1451 - DNA, 1545 bp, Diabrotica virgifera
  SmartBlast Evalue=2E-76; Info=Endonuclease-reverse transcriptase n=1 Tax=Bombyx mori RepID=D7F170_BOMMO
taatatcaaaacagcagtactaacagcagcagcgtccaccctgggaaacaagaaaaaggagagaagagcttcatggtttgatgacgagtgcagacaagcaatagaggaaagaaatgaagcacacaaaatgtacataacaagaagaacacgggaaagacgaacattatttgaagtcgcaagacggaaagcagacaagatatgtagaaataaaaagagagcctatgaaaatggacaaatagaaaaaatggaagaaaatttcaaaacaacgaaattagaggggcttacgaatacctaaaaaagataagaagtgggtataaacctcaaacaagtctatgtaaagatgaaagtgggcaaataatcagtgaccaacagaaagtcacagaaacctggaagcattattttcagaccctacttggaactcaagtagacatggaagatgaaatgggtatgatctacgtagaagagaatggagtagaagctccaactatagaggaagttctcgaagctattaaggcccagaaaaacaataaagctccgggagttgacgaaataccagcagaactatataaggtaggtggcgaccacctagcaagtcacatccacgcgctcatcagagacctatggcaagaagagaaaatacccgacgactggaagaaaagtatagtatgcccgatctataaaaaaggagacaaactccagtgcaaaaactaccgtggaatctctctactatgtacagcatataaagtcctcacgtatattataaaccagcggctccaaccactagcagaaaatattattggagagtatcagacgggcttccgacggggaagatcgacactggatcaaatatttacagtcaaacagatcttgagcaaagcatgggaacacgatattgatgttcacaacgtgtttgtagacttcaaacaggcatacgactcagtcaaaaggaacaaactatactatatattggctgaattggcaataccacacaagctaataagactcattaaagccacaatggatgaaactcaggcatgtgtacgaatacaaaaccaccggacagactttttaacatttcgcagggactaaagcagggagatgggctggccccaacattgtttaacctggcactggagtatgcggttaggcaaatgcaaactggacgaggaaactactgaccaaccgaacggttcaactggccgcttatgctgatgatattaatattatgagtagaacatcaacaggagcacaggaaacatatgcagagttaaaaacacaaacaaaaatgctaggtctggaaattacacagaaaaaacaaaaataatgactcagacgagaagaaatatagtcccagaaaacattatacatgaagatggcattgaaacggttggaaagtttacatacctgggagtagaaatatatgccgatggatcaaaagatggagaaatacggaagagaataacgcaggcaaacagagcttattttgccctctcccatatatttcggtctaaaagtgtccaccgaaatacaaagatgagaatctat

SEQ ID NO: 1452 - DNA, 1041 bp, Diabrotica virgifera
catccacatcgcacatttgtcgtctaccaggatcccttttccttcgatgttaccctttataatcagctgcatagtttgtcaaacctaggaacaagtttgacaaactgtaacaactcgtacttatcatgaatgtatgttccccaaatatgctgtttttctccaatggtggtcaaaagttctgaccttaatgcgataaaaaatgcactaagacatgacgcaaaaaaactttcttactaaaacaaatagacccctgcagactgtgccaatgtgatctttgtttaataatacaaatatgtatggagtttatgactttggaaaggtatgatgtaacaataattaaagcttcaaaattttagataataaatattgaagtactggggtcatagcaagttaaaaacgcaaaaaattccacataatgaaaaataaccaaaactatattgaaaatatactataatggcacccaacgtggggcttaaacagcagaacagtaatttttggatgtataattggcatcaacatatgtttagcttgacttcacacagtacatgaattttttaagttatttttgcgacattcattctttacacttctttttctttaaaaccaactttaagtatcacctagttggttttaggacgatctaaaactttcccctacatagtttgacgcaacatcacaatgaatgtgtcaccacatatggctcaaactaaactacaaacagaaagttataaaaaaaaacttctaagaataacttttaagaaatgaaaaactaacaaatggtttaggcgttggacaaaattctaagacataatacaaagagtatgttccttacaattgaactggaccggcagttctggagtagaaatatggatggttagatggaatccatggcgagaaagaaaaaacgtaggaagacagcaacaaagagggtactatcgaggacttaaaaagaacagtgggactaaattggtaccggctaaatcgaaatagagaaaactgaagagcaatgaaggaagcctatactgaacagataaagaaagg

SEQ ID NO: 1453 - DNA, 1950 bp, Diabrotica virgifera
  SmartBlast Evalue=0; Info="Actin, cytoplasmic 2 n=116 Tax= Fungi/Metazoa group RepID=ACTG_HUMAN"
aaaatatacatattcacggagtggtcataaatcataaaatatgactacaacattaggatttcacataacagagctaactgacaaaataatcaaaagcgaaaataggcgagacattctcttggaattttaaaactggttagcctgaagcattttcttgttaagtttgcaattgtcaatggaaagatgacctcataattgaaaacaatgaagataactttcaaccttcactatatgatatcattgactagagttgtggatcttaaatgtagaaaatatgcatgttgaattaattatcaggcattatttaaatcatttcttaaattgttaaaagaaatcagtttgttttatttattttattagaaaggtaaaataaattaaggaacatagtaatgagttttacaattttttttattttcccatagtattagcctaataatataatagtcttactttgcacaggtaataaattacaaaaattaagatagtaatactttggcctagtgtggatattttatggtctcgatcccatacgataaacacggcagttcgcgcccggaaaatgggcgggcttatgtaaatagaaataaagaatataaatgcggacaaaaacaaattagaagcattttctgtggacgatggatggaccagattcatcatattcttgtttggaaatccacatttgttggaaggtggatagagaggccaaaatggaaccaccgatccatacagagtattttctttctggtggggcgatgatcttaatcttcattgtgctaggagccaaggcagtgatttctttctgcattctatcagcaataccagggtacatggtggtacctccagagagtacagtgttggcatataggtccttacggatatcaacatcacacttcatgatggaattgtaggttgtttcatgaataccagcagcttccatacccaagaaggatggttggaagagagcttctgggcaacggaatctttcattaccaatggtgatgacttgtccatcaggaagttcataactcttttcaagggaactggaactagcagctgttgccatttcttgttcgaagtccaaagctacatagcagagtttttctttaatatctctaacaatttctctttctgctgtggtggtgaaagagtagccacgttcagtcaaaattttcatgaggtaatcagtcaagtctctaccagctaagtccaaacgaaggattgcatgaggaagagcataaccttcatagattgggacagtgtgggatacaccatcaccagaatccaacacaataccagttgtacgaccagatgcatacaaggagagtacagcctggatggcaacatacatggctggggtgttgaaagtttcaaacattatttgtgtcatcttttccctgttggccttggggttgagaggagcttctgtcaacagaacagggtgttcttctggggctactctgagttcattgtagaatgtatgatgccaaattttctccatatcatcccagtttgtgactattccgtgctcgatggggtattttaaggtaaggatacctcttttactttgagcttcatcacctacataggaatctttttgtcccattcctaccatcacaccctgatgtcttgggcgtccaacaattgaagggaatacagcacgaggtgcatcatccccagcaaaaccagctttgcacataccggatccattgtctacgactaaagcggcaacttcttcttcacacatgttgattggttagtatttgatttctatataaatgttaaaaaataaattattctaaagcacagcactgaaactgctgtaccaagtaagcactaaatatcacaagactggaatgatatggagaaaatttggcatcatacattctacaatgaactcagagtagccccagaagaacaccctgttctgttgacagaagctcctctcaaccc

SEQ ID NO: 1454 - DNA, 5807 bp, Diabrotica virgifera
  SmartBlast Evalue=0; Info=Sterile alpha and TIR motif- containing protein 1 (Fragment) n=1 Tax=Harpegnathos saltator RepID=E2B7A2_9HYME
gttgtgaagtgatcgtgtacttgcctggttaattttttaaagagtaaaagtggtttggtattatttgactaatatgccaattaataaaagaatgagaatgaatgatggcgagcgaatctcccacggacaataatgcaaatggtaccgagccgccgcttcagacgatcgtaaaaaacccatcaaggacgacagtaaccacaacttcattgcagacgaactctcaatccagtacgacaacgacacgcgttagcaaaacctcgaccagcgcttcaacgaccagccaacggcgccagctcaccgatttaaaagcttccaacatgaagagcgacttagtagactttaaaaacaacataaacgacatgaaaagcagcttacccaacacccttttgcaaataagaaactcgctagaaaatttagtcgacgccgaagaaaatgatcccatcgttacgtttcctgatgataccccagtgccatccgagatcggctcaccaacgaatgcagtggaatcgcttaaatttgaacagaagactacaaataactttaagaagaccacggtaatgaaagatggaatcagtgccgaaaaagaaagtgccaaaatggcggaaatgaaaatacttcaagctggtgacgtttcttacgaagaaaacaacgcagcccgggctactcgagcgagagttgaaatcgatggagtttcggcggagaaaagtcaagtcatggccaaagaagctagatctctcaaagctggagatctcagccaacaggagtccaaaaacctggctcaaacgaatatgaaagttacaacagacaagttcagtagtgaaagaacagccatggaatcccagcaacaaagacagactgttacagctagcggcttttacaatcaagaaaaacacagttctagcacaagtcacatatacacctcttcttcttcaaaaggtcttagcacatcggcaaagatcaatgcaacaagacagtttcacctattaaatggcactcccgaagaagcaatattaaacacgtcattagaagatctcgacagtctctcagctacttccgatgtccacgatatcgaaagagcaaaacacaaatattctacatatttagacgaatccattagatgccttcaaaaactagaccaaaacaaagatgcacccctagtgttagataaaatcaatgacgtcatgcgtaaagcatgggcagtaccgacctatggtcacgaacttggctatgctctatgcaatgcgctacgaaacagtgggggattggacctgataatgcagaactgcacaaaatcggataagagccttcaatttgccagcgctaaattactagagcagtgccttactgcagaaaatagagcacatgtagtagagcacggtctggataaagtcgtaaacgtagcttgtgtctgcacaaagatttcaaattctgtcgaccattcaagggtaggaaccggaatattggagcatttgtttaaacacagtgaagaaacgtgtagcgacgtcgttaggcttggtggtttggatgctttactattcgaatgcagaaaaagtgacgtagaaaccttaaggcactgtgctggagctttagcaaaccttagtttatacggtggtaccgagaatcaagaagctatgataaagcgaaaggttccgatgtggttattccccttagcattccacaccgacgataatattaagtactacgcttgccttgccataaccgtattagtagctaaccccgaaatcgaagctgaagtcttgcaatctggcactcttggtctggtcgaacctttcgtcactacacacaacccttccgaattcgcgaaatcgaatctagctcatgctcacggacaaagcaaaacctggctgaaaaatttagttcctgtcttaagctcaaaacgtgaagaagctagaaacctagccgccttccatttctgcatggaagccggaatcaagaagcagcagggaaacactaacatgttctctgaaatcggtgctatcgaatcactcaaaaaagtagccagttgtcctaatgccgtcgcctcaaaatatgcagctcaagccctaaggctcatcggagaggaagtgcctcataagttaagtcaacaggtgcccttatggtctgtggaggatgtagaggagtgggtgaaacagataggattcccagaagttgccattagtttcgtagaaagcagagttgacggggatttgttattgcagctaacagaagaaaatcttagggatgatattggattaacgaatggtataaaaagaaaaaggtttacacgagaacttcagcaattaaaaaagatggcagactatacgtctagagacacatcaaatatcaacaatttccttcaaacaatgggactcgaattctctatatatacctacagtttcttaaacgctgggcttgacaaaaaggattacctacgaaatatatctgaggaccagttgttaaccgaatgtggaattagtaattctattcaccggctaaggataatggaaggtatcagacaattagaaaacggccttgccaacggtatgaacgaagacaaccaagacaaatccttagatgtattcgtaagttaccgacggtccaacggttcccaactagccagtttactcaaagtccacttgcagctccgaggattcagtgtcttcatcgacgtggagaggctggaagctggaaagtttgataacaatctcctgcagagtattcaaaaagccaaacacttcttgttggtgctgacgccgaacgctctggaaagatgtataggagatattgaaagaaaagactgggtacatcgggaaatatgtgcagctctatcagctaattgtaacatcatccccatcatcgacaacttcatccttccccgaactcgaacagttgccggaagatatgagacaggtctgccacttcaacgcagttcggtggattcacgattatcaggatgcttgtgtggacaaactagaaaggttcatgcgaggagaagcgaatccacgcggggacaattacagagtcactttgcccaaaggcgatataactccaggaacaccttcaaatcccagtttggttaggcagccgcctaactaccaaagaatgcacagcaacgactcaggaagtggtaaaagctccgacaaagacatgaacggcaactcggggttaacgagggattgactagatggtccttatgcctcggctactcctactccactgcctagattctacaaagcaaacagtccgtcccgaaattggataatcaactccaacaacttcaaccggggtctcccgcccgtgccgtactctcggcgaggttccaacacccccgtctcgtcactagctcttaacagttacccccaccctccggcccctaaccgatctcgcagcctcgacggtctcctagactccgccgagcccatcctagcagcagctacagaagcaactaaaaacgatcaagttccgtccccgaaaaaagcgcaaagttgtgatgacattgacaaagacttgaacgacgcatccgcatacgtcgaagagactgacactagtttaagtaatacgaaggaactggattgttcggtagaaagtgatagtactgacaagtgttcgatatacagtaattctagtgattcgaaacgtaagagaaactttatggaccgatgtgtcaataaagtgcgatcttttattaagaaataaactgcatatttataaaaaaactaaactaggtgaagcaaacgataccaattttataggttttagtataattccaaattgacgtgaaaagtagtcacatcaacatataaaactgaatagatttgcagaaaatttcgtaaatacaaagcaatatttcaacacacaacaaaataattgtttacgctaatcttttttaaaactttgaccaagtctgctaatccggttcgaaggccaagtgtgtaaatccggctcgaaggaccatatgttgtttattcttttaaagaattagatgttaaataggtatcgtttggttctcctatactttatttcctgtatcttgatattcaatatttaaatttaaacttcatagatgatattatttattattcttttacggcaactaaattacttagtacaaacattgtgcttttatacaaaatttgtatatatagtaaaaacgtgtgattatcgagcagtcttaatgaattttcttaggtctgtttccgtatgagagagataaaaaaatttctatcgtgcaaaatttattaaaaatgaactcttttttatttgtatagtatatgttggtgctatttacaatttttttaagaaaatatgtggccagatcaacaaattcagtcaaaatggatccaaacttcatacttatttaatattccaacgggatttattcgctataaaaaaaatacaattcaaaatcacagattaacttgaaattttgtactgctatatttgaaaaatgttggctagagtgtaactctgcaatccactgagttgtcaagcttacttatctctgttttaatttagtcacttcaaattttcttccatatatagttttgttaaaagttttttcatttttgcatctttgtcatggtaaattatgtcgtttatactatatcatcatttatatacattaatcattctgaagcatacaaaacgtagacttttaaattctaagtgcctctctccaagtgccttcttgttgtttaatcaagttaaattagtaatcgtgttttcaaagatatgttgtgatatttcctatgtaagagaaacagtttccacttcaccgattttggatatgtttatagaaaatttctttcaatgcacactcacaaaaaaaacttagttgatgtcaggttacgctattaatgtggccagactcaatgacattgtgagaacaccaagaacatctgttcgaagtgacatctaaacaagagatatattttgaagatcgaatttttgaaagggcttttatatttaataattttttctgttactttttatccaatggtttttattgtattcgctactacacttccatcaattcttattttggatcttctgtgaaaaccatagaatatctagactgcgggttgcaatgcaaaactgtttcctcagtgcgacagagaaaagtatttgtaaacagggtatttattttctttctttcttgactggctttacaacttgaggtgagtcttagccgcatccactatggctctccatcttctacttgctgtatccatcatgaccattgcaccaaatggtcttgcacttctatttcccattgctgtaccccaatcctagatagatctgcttcaacctcatccttccatctttttctgggacggcctactaatcttctgccctctgctttctcatagaaaactgtctttaacactctgccttcctctgatcttaccacatgacctgcccatcttaactagttagcttttacatgcctggcgatgttttcagtaccatacagtcaccaattcagcattgcggcgccttctccactcttctgtcaattcatctctttgagggccaatatcattcggagaacctttcttttcaaatacaagcagcttatttctttctcgcttatgtagattccacgtttcacttccatattatgtaacaactgagcgaataattggcatgtacagtcttaatttagattgctttttagcagcttagatcttaataatgatgataggaaaataatgctctattcgcgattaaaactgaatatagagggcaggtcgaatgcatgaaaatggccgatataaatggtataaacaaacattcatttgaggagc

SEQ ID NO: 1455 - DNA, 5652 bp, Diabrotica virgifera
  SmartBlast Evalue=0; Info=Sterile alpha and TIR motif- containing protein 1 (Fragment) n=1 Tax=Harpegnathos saltator RepID=E2B7A2_9HYME
gttgtgaagtgatcgtgtacttgcctggttaattttttaaagagtaaaagtggtttggtattatttgactaatatgccaattaataaaagaatgagaatgaatgatggcgagcgaatctcccacggacaataatgcaaatggtaccgagccgccgcttcagacgatcgtaaaaaacccatcaaggacgacagtaaccacaacttcattgcagacgaactctcaatccagtacgacaacgacacgcgttagcaaaacctcgaccagcgcttcaacgaccagccaacggcgccagctcaccgatttaaaagcttccaacatgaagagcgacttagtagactttaaaaacaacataaacgacatgaaaagcagcttacccaacacccttttgcaaataagaaactcgctagaaaatttagtcgacgccgaagaaaatgatcccatcgttacgtttcctgatgataccccagtgccatccgagatcggctcaccaacgaatgcagtggaatcgcttaaatttgaacagaagactacaaataactttaagaagaccacggtaatgaaagatggaatcagtgccgaaaaagaaagtgccaaaatggcggaaatgaaaatacttcaagctggtgacgtttcttacgaagaaaacaacgcagcccgggctactcgagcgagagttgaaatcgatggagtttcggcggagaaaagtcaagtcatggccaaagaagctagatctctcaaagctggagatctcagccaacaggagtccaaaaacctggctcaaacgaatatgaaagttacaacagacaagttcagtagtgaaagaacagccatggaatcccagcaacaaagacagactgttacagctagcggcttttacaatcaagaaaaacacagttctagcacaagtcacatatacacctcttcttcttcaaaaggtcttagcacatcggcaaagatcaatgcaacaagacagtttcacctattaaatggcactcccgaagaagcaatattaaacacgtcattagaagatctcgacagtctctcagctacttccgatgtccacgatatcgaaagagcaaaacacaaatattctacatatttagacgaatccattagatgccttcaaaaactagaccaaaacaaagatgcacccctagtgttagataaaatcaatgacgtcatgcgtaaagcatgggcagtaccgacctatggtcacgaacttggctatgctctatgcaatgcgctacgaaacagtgggggattggacctgataatgcagaactgcacaaaatcggataagagccttcaatttgccagcgctaaattactagagcagtgccttactgcagaaaatagagcacatgtagtagagcacggtctggataaagtcgtaaacgtagcttgtgtctgcacaaagatttcaaattctgtcgaccattcaagggtaggaaccggaatattggagcatttgtttaaacacagtgaagaaacgtgtagcgacgtcgttaggcttggtggtttggatgctttactattcgaatgcagaaaaagtgacgtagaaaccttaaggcactgtgctggagctttagcaaaccttagtttatacggtggtaccgagaatcaagaagctatgataaagcgaaaggttccgatgtggttattccccttagcattccacaccgacgataatattaagtactacgcttgccttgccataaccgtattagtagctaaccccgaaatcgaagctgaagtcttgcaatctggcactcttggtctggtcgaacctttcgtcactacacacaacccttccgaattcgcgaaatcgaatctagctcatgctcacggacaaagcaaaacctggctgaaaaatttagttcctgtcttaagctcaaaacgtgaagaagctagaaacctagccgccttccatttctgcatggaagccggaataaagaagcagcagggaaacactaacatgttctctgaaatcggtgctatcgaatcactaaaaaaagtagctagttgtcctaatgccgtcgcctcaaaatatgcagctcaagccttaaggcttatcggagaggaagtgccacataagttaagtcaacaggtgcccttatggtctgtggaggatgtagaggagtgggtgaaacagataggattcccagaagttgccattagtttcgtagaaagcagggttgatggggatttgttattgcagctaacagaagaaaatcttagggatgatattggattaacgaatggtataaaaagaaaaaggtttacacgagaacttcagcaattaaaaaagatggcagactatacgtctagagacacatcaaatatcaacaatttccttcaaacaatgggactcgaattctctatatatacctacagtttcttaaacgctgggcttgacaaaaaggattacctacgaaatatatctgaggaccagttgttaaccgaatgtggaattagtaattctattcaccggctaaggataatggaaggtatcagacaattagaaaacggccttgccaacggtatgaacgaagacaaccaagacaaatccttagatgtattcgtaagttaccgacggtccaacggttcccaactagccagtttactcaaagtccacttgcagctccgaggattcagtgtcttcatcgacgtggagaggctggaagctggaaagtttgataacaatctcctgcagagtattcaaaaagccaaacacttcttgttggtgctgacgccgaacgctctggaaagatgtataggagatattgaaagaaaagactgggtacatcgggaaatatgtgcagctctatcagctaattgtaacatcatccccatcatcgacaacttcatccttccccgaactcgaacagttgccggaagatatgagacaggtctgccacttcaacgcagttcggtggattcacgattatcaggatgcttgtgtggacaaactagaaaggttcatgcgaggagaagcgaatccacgcggggacaattacagagtcactttgcccaaaggcgatataactccaggaacaccttcaaatcccagtttggttaggcagccgcctaactaccaaagaatgcacagcaacgactcaggaagtggtaaaagctccgacaaagacatgaacggcaactcggggttaacgagggattgactagatggtccttatgcctcggctactcctactccactgcctagattctacaaagcaaacagtccgtcccgaaattggataatcaactccaacaacttcaaccggggtctcccgcccgtgccgtactctcggcgaggttccaacacccccgtctcgtcactagctcttaacagttacccccaccctccggcccctaaccgatctcgcagcctcgacggtctcctagactccgccgagcccatcctagcagcagctacagaagcaactaaaaacgatcaagttccgtccccgaaaaaagcgcaaagttgtgatgacattgacaaagacttgaacgacgcatccgcatacgtcgaagagactgacactagtttaagtaatacgaaggaactggattgttcggtagaaagtgatagtactgacaagtgttcgatatacagtaattctagtgattcgaaacgtaagagaaactttatggaccgatgtgtcaataaagtgcgatcttttattaagaaataaactgcatatttataaaaaaactaaactaggtgaagcaaacgataccaattttataggttttagtataattccaaattgacgtgaaaagtagtcacatcaacatataaaactgaatagatttgcagaaaatttcgtaaatacaaagcaatatttcaacacacaacaaaataattgtttacgctaatcttttttaaaactttgaccaagtctgctaatccggttcgaaggccaagtgtgtaaatccggctcgaaggaccatatgttgtttattcttttaaagaattagatgttaaataggtatcgtttggttctcctatactttatttcctgtatcttgatattcaatatttaaatttaaacttcatagatgatattatttattattcttttacggcaactaaattacttagtacaaacattgtgcttttatacaaaatttgtatatatagtaaaaacgtgtgattatcgagcagtcttaatgaattttcttaggtctgtttccgtatgagagagataaaaaaatttctatcgtgcaaaatttattaaaaatgaactcttttttatttgtatagtatatgttggtgctatttacaatttttttaagaaaatatgtggccagatcaacaaattcagtcaaaatggatccaaacttcatacttatttaatattccaacgggatttattcgctataaaaaaaatacaattcaaaatcacagattaacttgaaattttgtactgctatatttgaaaaatgttggctagagtgtaactctgcaatccactgagttgtcaagcttacttatctctgttttaatttagtcacttcaaattttcttccatatatagttttgttaaaagttttttcatttttgcatctttgtcatggtaaattatgtcgtttatactatatcatcatttatatacattaatcattctgaagcatacaaaacgtagacttttaaattctaagtgcctctctccaagtgccttcttgttgtttaatcaagttaaattagtaatcgtgttttcaaagatatgttgtgatatttcctatgtaagagaaacagtttccacttcaccgattttggatatgtttatagaaaatttctttcaatgcacactcacaaaaaaaacttagttgatgtcaggttacgctattaatgtggccagactcaatgacattgtgagaacaccaagaacatctgttcgaagtgacatctaaacaagagatatattttgaagatcgaatttttgaaagggcttttatatttaataattttttctgttactttttatccaatggtttttattgtattcgctactacacttccatcaattcttattttggatcttctgtgaaaaccatagaatatctagactgcgggttgcaatgcaaaactgtttcctcagtgcgacagagaaaagtatttgtaaacagggtatttattttctttctttcttgactggctttacaacttgaggtgagtcttagccgcatccactatggctctccatcttctacttgctgtatccatcatgaccattgcaccaaatggtcttgcacttctatttcccattgctgtaccccaatcctagatagatctgcttcaacctcatccttccatctttttctgggacggcctactaatcttctgccctctgctttctcatagaaaactgtctttaacactctgccttcctctgatcttaccacatgacctgcccatcttaactagttagcttttacatgcctggcgatgttttcagtaccatacagtcaccaattcagcattgcggcgccttctccactcttctgtcaattcatctctttgagggccaaacatcattcttagaactttccgttccaataccagcagcttatttatttcccgctaatgtagagtctatgtttcacttccatatgtaacaactgtgcgaagaattattgacaggtac

SEQ ID NO: 1456 - DNA, 5652 bp, Diabrotica virgifera
  SmartBlast Evalue=0; Info=Sterile alpha and TIR motif- containing protein 1 (Fragment) n=1 Tax=Harpegnathos saltator RepID=E2B7A2_9HYME
gttgtgaagtgatcgtgtacttgcctggttaattttttaaagagtaaaagtggtttggtattatttgactaatatgccaattaataaaagaatgagaatgaatgatggcgagcgaatctcccacggacaataatgcaaatggtaccgagccgccgcttcagacgatcgtaaaaaacccatcaaggacgacagtaaccacaacttcattgcagacgaactctcaatccagtacgacaacgacacgcgttagcaaaacctcgaccagcgcttcaacgaccagccaacggcgccagctcaccgatttaaaagcttccaacatgaagagcgacttagtagactttaaaaacaacataaacgacatgaaaagcagcttacccaacacccttttgcaaataagaaactcgctagaaaatttagtcgacgccgaagaaaatgatcccatcgttacgtttcctgatgataccccagtgccatccgagatcggctcaccaacgaatgcagtggaatcgcttaaatttgaacagaagactacaaataactttaagaagaccacggtaatgaaagatggaatcagtgccgaaaaagaaagtgccaaaatggcggaaatgaaaatacttcaagctggtgacgtttcttacgaagaaaacaacgcagcccgggctactcgagcgagagttgaaatcgatggagtttcggcggagaaaagtcaagtcatggccaaagaagctagatctctcaaagctggagatctcagccaacaggagtccaaaaacctggctcaaacgaatatgaaagttacaacagacaagttcagtagtgaaagaacagccatggaatcccagcaacaaagacagactgttacagctagcggcttttacaatcaagaaaaacacagttctagcacaagtcacatatacacctcttcttcttcaaaaggtcttagcacatcggcaaagatcaatgcaacaagacagtttcacctattaaatggcactcccgaagaagcaatattaaacacgtcattagaagatctcgacagtctctcagctacttccgatgtccacgatatcgaaagagcaaaacacaaatattctacatatttagacgaatccattagatgccttcaaaaactagaccaaaacaaagatgcacccctagtgttagataaaatcaatgacgtcatgcgtaaagcatgggcagtaccgacctatggtcacgaacttggctatgctctatgcaatgcgctacgaaacagtgggggattggacctgataatgcagaactgcacaaaatcggataagagccttcaatttgccagcgctaaattactagagcagtgccttactgcagaaaatagagcacatgtagtagagcacggtctggataaagtcgtaaacgtagcttgtgtctgcacaaagatttcaaattctgtcgaccattcaagggtaggaaccggaatattggagcatttgtttaaacacagtgaagaaacgtgtagcgacgtcgttaggcttggtggtttggatgctttactattcgaatgcagaaaaagtgacgtagaaaccttaaggcactgtgctggagctttagcaaaccttagtttatacggtggtaccgagaatcaagaagctatgataaagcgaaaggttccgatgtggttattccccttagcattccacaccgacgataatattaagtactacgcttgccttgccataaccgtattagtagctaaccccgaaatcgaagctgaagtcttgcaatctggcactcttggtctggtcgaacctttcgtcactacacacaacccttccgaattcgcgaaatcgaatctagctcatgctcacggacaaagcaaaacctggctgaaaaatttagttcctgtcttaagctcaaaacgtgaagaagctagaaacctagccgccttccatttctgcatggaagccggaatcaagaagcagcagggaaacactaacatgttctctgaaatcggtgctatcgaatcactcaaaaaagtagccagttgtcctaatgccgtcgcctcaaaatatgcagctcaagccctaaggctcatcggagaggaagtgcctcataagttaagtcaacaggtgcccttatggtctgtggaggatgtagaggagtgggtgaaacagataggattcccagaagttgccattagtttcgtagaaagcagagttgacggggatttgttattgcagctaacagaagaaaatcttagggatgatattggattaacgaatggtataaaaagaaaaaggtttacacgagaacttcagcaattaaaaaagatggcagactatacgtctagagacacatcaaatatcaacaatttccttcaaacaatgggactcgaattctctatatatacctacagtttcttaaacgctgggcttgacaaaaaggattacctacgaaatatatctgaggaccagttgttaaccgaatgtggaattagtaattctattcaccggctaaggataatggaaggtatcagacaattagaaaacggccttgccaacggtatgaacgaagacaaccaagacaaatccttagatgtattcgtaagttaccgacggtccaacggttcccaactagccagtttactcaaagtccacttgcagctccgaggattcagtgtcttcatcgacgtggagaggctggaagctggaaagtttgataacaatctcctgcagagtattcaaaaagccaaacacttcttgttggtgctgacgccgaacgctctggaaagatgtataggagatattgaaagaaaagactgggtacatcgggaaatatgtgcagctctatcagctaattgtaacatcatccccatcatcgacaacttcatccttccccgaactcgaacagttgccggaagatatgagacaggtctgccacttcaacgcagttcggtggattcacgattatcaggatgcttgtgtggacaaactagaaaggttcatgcgaggagaagcgaatccacgcggggacaattacagagtcactttgcccaaaggcgatataactccaggaacaccttcaaatcccagtttggttaggcagccgcctaactaccaaagaatgcacagcaacgactcaggaagtggtaaaagctccgacaaagacatgaacggcaactcggggttaacgagggattgactagatggtccttatgcctcggctactcctactccactgcctagattctacaaagcaaacagtccgtcccgaaattggataatcaactccaacaacttcaaccggggtctcccgcccgtgccgtactctcggcgaggttccaacacccccgtctcgtcactagctcttaacagttacccccaccctccggcccctaaccgatctcgcagcctcgacggtctcctagactccgccgagcccatcctagcagcagctacagaagcaactaaaaacgatcaagttccgtccccgaaaaaagcgcaaagttgtgatgacattgacaaagacttgaacgacgcatccgcatacgtcgaagagactgacactagtttaagtaatacgaaggaactggattgttcggtagaaagtgatagtactgacaagtgttcgatatacagtaattctagtgattcgaaacgtaagagaaactttatggaccgatgtgtcaataaagtgcgatcttttattaagaaataaactgcatatttataaaaaaactaaactaggtgaagcaaacgataccaattttataggttttagtataattccaaattgacgtgaaaagtagtcacatcaacatataaaactgaatagatttgcagaaaatttcgtaaatacaaagcaatatttcaacacacaacaaaataattgtttacgctaatcttttttaaaactttgaccaagtctgctaatccggttcgaaggccaagtgtgtaaatccggctcgaaggaccatatgttgtttattcttttaaagaattagatgttaaataggtatcgtttggttctcctatactttatttcctgtatcttgatattcaatatttaaatttaaacttcatagatgatattatttattattcttttacggcaactaaattacttagtacaaacattgtgcttttatacaaaatttgtatatatagtaaaaacgtgtgattatcgagcagtcttaatgaattttcttaggtctgtttccgtatgagagagataaaaaaatttctatcgtgcaaaatttattaaaaatgaactcttttttatttgtatagtatatgttggtgctatttacaatttttttaagaaaatatgtggccagatcaacaaattcagtcaaaatggatccaaacttcatacttatttaatattccaacgggatttattcgctataaaaaaaatacaattcaaaatcacagattaacttgaaattttgtactgctatatttgaaaaatgttggctagagtgtaactctgcaatccactgagttgtcaagcttacttatctctgttttaatttagtcacttcaaattttcttccatatatagttttgttaaaagttttttcatttttgcatctttgtcatggtaaattatgtcgtttatactatatcatcatttatatacattaatcattctgaagcatacaaaacgtagacttttaaattctaagtgcctctctccaagtgccttcttgttgtttaatcaagttaaattagtaatcgtgttttcaaagatatgttgtgatatttcctatgtaagagaaacagtttccacttcaccgattttggatatgtttatagaaaatttctttcaatgcacactcacaaaaaaaacttagttgatgtcaggttacgctattaatgtggccagactcaatgacattgtgagaacaccaagaacatctgttcgaagtgacatctaaacaagagatatattttgaagatcgaatttttgaaagggcttttatatttaataattttttctgttactttttatccaatggtttttattgtattcgctactacacttccatcaattcttattttggatcttctgtgaaaaccatagaatatctagactgcgggttgcaatgcaaaactgtttcctcagtgcgacagagaaaagtatttgtaaacagggtatttattttctttctttcttgactggctttacaacttgaggtgagtcttagccgcatccactatggctctccatcttctacttgctgtatccatcatgaccattgcaccaaatggtcttgcacttctatttcccattgctgtaccccaatcctagatagatctgcttcaacctcatccttccatctttttctgggacggcctactaatcttctgccctctgctttctcatagaaaactgtctttaacactctgccttcctctgatcttaccacatgacctgcccatcttaactagttagcttttacatgcctggcgatgttttcagtaccatacagtcaccaattcagcattgcggcgccttctccactcttctgtcaattcatctctttgagggccaaacatcattcttagaactttccgttccaataccagcagcttatttatttcccgctaatgtagagtctatgtttcacttccatatgtaacaactgtgcgaagaattattgacaggtac

SEQ ID NO: 1457 - DNA, 3353 bp, Diabrotica virgifera
  SmartBlast Evalue=0; Info=Sterile alpha and TIR motif- containing protein 1 (Fragment) n=1 Tax=Harpegnathos saltator RepID=E2B7A2_9HYME
gtcagtgttgaacttaatactgctctgttgtactagcgatttgttgtaaaggtcatcttacatccgaacttaaaacatgtgtctgtgtcttgttacatttttttgcagataagctgtagataaacccatcatttggcagtgattaatcagttgaatataagtgttacttgagcgaacaaggaactcgagtgtgttcaagacttcaagagtctgtgtatttttgttcttgtatctgtgcgggtagtgtttgttgactgctctatatcgaaacaaccttctagtgtttttgagttttattacacggcttgattatatcaacatccatggtttttatatcgagtaatggcagatatgatagattattatctaaaatgatggcgagcgaatctcccacggacaataatgcaaatggtaccgagccgccgcttcagacgatcgtaaaaaacccatcaaggacgacagtaaccacaacttcattacagacgaactcccaatccagtacgacaacgacacgcgttagcaaaacctcgaccagcgcttcaacgaccagccaacggcgccagctcaccgatttaaaagcttccaacatgaagagcgatttagtagactttaaaaacaacataaacgacatgaaaagcagcttacccaacacccttttgcagataagaaactcgctagaaaatttagtcgacgccgaagaaaatgatcccatcgttacgtttcctgatgataccccagtgccatccgagatcggctcaccaacgaatgcagtggaatcgcttaaatttgaacagaagactacaaataactttaagaagaccacggtaatgaaagatggaatcagtgccgaaaaagaaagtgccaaaatggcggaaatgaaaatacttcaagctggtgacgtttcttacgaagaaaacaacgcagcccgggctactcgagcgagagttgaaatcgatggagtttcggcggagaaaagtcaagtcatggccaaagaagctagatctctcaaagctggagatctcagccaacaggagtccaaaaacctggctcaaacgaatatgaaagttacaacagacaagttcagtagtgaaagaacagccatggaatcccagcaacaaagacagactgttacagctagcggcttttacaatcaagaaaaacacagttctagcacaagtcacatatacacctcttcttcttcaaaaggtcttagcacatcggcaaagatcaatgcaacaagacagtttcacctattaaatggcactcccgaagaagcaatattaaacacgtcattagaagatctcgacagtctctcagctacttccgatgtccacgatatcgaaagagcaaaacacaaatattctacatatttagacgaatccattagatgccttcaaaaactagaccaaaacaaagatgcacccctagtgttagataaaatcaatgacgtcatgcgtaaagcatgggcagtaccgacctatggtcacgaacttggctatgctctatgcaatgcgctacgaaacagtgggggattggacctgataatgcagaactgcacaaaatcggataagagccttcaatttgccagcgctaaattactagagcagtgccttactgcagaaaatagagcacatgtagtagagcacggtctggataaagtcgtaaacgtagcttgtgtctgcacaaagatttcaaattctgtcgaccattcaagggtaggaaccggaatattggagcatttgtttaaacacagtgaagaaacgtgtagcgacgtcgttaggcttggtggtttggatgctttactattcgaatgcagaaaaagtgacgtagaaaccttaaggcactgtgctggagctttagcaaaccttagtttatacggtggtaccgagaatcaagaagctatgataaagcgaaaggttccgatgtggttattccccttagcattccacaccgacgataatattaagtactacgcttgccttgccataaccgtattagtagctaaccccgaaatcgaagctgaagtcttgcaatctggcactcttggtctggtcgaacctttcgtcactacacacaacccttccgaattcgcgaaatcgaatctagctcatgctcacggacaaagcaaaacctggctgaaaaatttagttcctgtcttaagctcaaaacgtgaagaagctagaaacctagccgccttccatttctgcatggaagccggaataaagaagcagcagggaaacactaacatgttctctgaaatcggtgctatcgaatcactaaaaaaagtagctagttgtcctaatgccgtcgcctcaaaatatgcagctcaagccttaaggcttatcggagaggaagtgccacataagttaagtcaacaggtgcccttatggtctgtggaggatgtagaggagtgggtgaaacagataggattcccagaagttgccattagtttcgtagaaagcagggttgatggggatttgttattgcagctaacagaagaaaatcttagggatgatattggattaacgaatggtataaaaagaaaaaggtttacacgagaacttcagcaattaaaaaagatggcagactatacgtctagagacacatcaaatatcaacaatttccttcaaacaatgggactcgaattctctatatatacctacagtttcttaaacgctgggcttgacaaaaaggattacctacgaaatatatctgaggaccagttgttaaccgaatgtggaattagtaattctattcaccggctaaggataatggaaggtatcagacaattagaaaacggccttgccaacggtatgaacgaagacaaccaagacaaatccttagatgtattcgtaagttaccgacggtccaacggttcccaactagccagtttactcaaagtccacttgcagctccgaggattcagtgtcttcatcgacgtggagaggctggaagctggaaagtttgataacaatctcctgcagagtattcaaaaagccaaacacttcttgttggtgctgacgccgaacgctctggaaagatgtataggagatattgaaagaaaagactgggtacatcgggaaatatgtgcagctctatcagctaattgtaacatcatccccatcatcgacaacttcatcttccccgaactcgaacagttgccggaagatatgagacaggtctgccacttcaacgcagttcgctggattcacgattatcaggatgcttgtgtggacaaactagaaaggtttttaaatggtacttttatagatcacacataaccgcatttggaaccattccaccatcgttttattgcatgttgtaataatttattttaataaagacttagtgct

SEQ ID NO: 1458 - DNA, 3353 bp, Diabrotica virgifera
  SmartBlast Evalue=0; Info=Sterile alpha and TIR motif- containing protein 1 (Fragment) n=1 Tax=Harpegnathos saltator RepID=E2B7A2_9HYME
gtcagtgttgaacttaatactgctctgttgtactagcgatttgttgtaaaggtcatcttacatccgaacttaaaacatgtgtctgtgtcttgttacatttttttgcagataagctgtagataaacccatcatttggcagtgattaatcagttgaatataagtgttacttgagcgaacaaggaactcgagtgtgttcaagacttcaagagtctgtgtatttttgttcttgtatctgtgcgggtagtgtttgttgactgctctatatcgaaacaaccttctagtgtttttgagttttattacacggcttgattatatcaacatccatggtttttatatcgagtaatggcagatatgatagattattatctaaaatgatggcgagcgaatctcccacggacaataatgcaaatggtaccgagccgccgcttcagacgatcgtaaaaaacccatcaaggacgacagtaaccacaacttcattacagacgaactcccaatccagtacgacaacgacacgcgttagcaaaacctcgaccagcgcttcaacgaccagccaacggcgccagctcaccgatttaaaagcttccaacatgaagagcgatttagtagactttaaaaacaacataaacgacatgaaaagcagcttacccaacacccttttgcagataagaaactcgctagaaaatttagtcgacgccgaagaaaatgatcccatcgttacgtttcctgatgataccccagtgccatccgagatcggctcaccaacgaatgcagtggaatcgcttaaatttgaacagaagactacaaataactttaagaagaccacggtaatgaaagatggaatcagtgccgaaaaagaaagtgccaaaatggcggaaatgaaaatacttcaagctggtgacgtttcttacgaagaaaacaacgcagcccgggctactcgagcgagagttgaaatcgatggagtttcggcggagaaaagtcaagtcatggccaaagaagctagatctctcaaagctggagatctcagccaacaggagtccaaaaacctggctcaaacgaatatgaaagttacaacagacaagttcagtagtgaaagaacagccatggaatcccagcaacaaagacagactgttacagctagcggcttttacaatcaagaaaaacacagttctagcacaagtcacatatacacctcttcttcttcaaaaggtcttagcacatcggcaaagatcaatgcaacaagacagtttcacctattaaatggcactcccgaagaagcaatattaaacacgtcattagaagatctcgacagtctctcagctacttccgatgtccacgatatcgaaagagcaaaacacaaatattctacatatttagacgaatccattagatgccttcaaaaactagaccaaaacaaagatgcacccctagtgttagataaaatcaatgacgtcatgcgtaaagcatgggcagtaccgacctatggtcacgaacttggctatgctctatgcaatgcgctacgaaacagtgggggattggacctgataatgcagaactgcacaaaatcggataagagccttcaatttgccagcgctaaattactagagcagtgccttactgcagaaaatagagcacatgtagtagagcacggtctggataaagtcgtaaacgtagcttgtgtctgcacaaagatttcaaattctgtcgaccattcaagggtaggaaccggaatattggagcatttgtttaaacacagtgaagaaacgtgtagcgacgtcgttaggcttggtggtttggatgctttactattcgaatgcagaaaaagtgacgtagaaaccttaaggcactgtgctggagctttagcaaaccttagtttatacggtggtaccgagaatcaagaagctatgataaagcgaaaggttccgatgtggttattccccttagcattccacaccgacgataatattaagtactacgcttgccttgccataaccgtattagtagctaaccccgaaatcgaagctgaagtcttgcaatctggcactcttggtctggtcgaacctttcgtcactacacacaacccttccgaattcgcgaaatcgaatctagctcatgctcacggacaaagcaaaacctggctgaaaaatttagttcctgtcttaagctcaaaacgtgaagaagctagaaacctagccgccttccatttctgcatggaagccggaatcaagaagcagcagggaaacactaacatgttctctgaaatcggtgctatcgaatcactcaaaaaagtagccagttgtcctaatgccgtcgcctcaaaatatgcagctcaagccctaaggctcatcggagaggaagtgcctcataagttaagtcaacaggtgcccttatggtctgtggaggatgtagaggagtgggtgaaacagataggattcccagaagttgccattagtttcgtagaaagcagagttgacggggatttgttattgcagctaacagaagaaaatcttagggatgatattggattaacgaatggtataaaaagaaaaaggtttacacgagaacttcagcaattaaaaaagatggcagactatacgtctagagacacatcaaatatcaacaatttccttcaaacaatgggactcgaattctctatatatacctacagtttcttaaacgctgggcttgacaaaaaggattacctacgaaatatatctgaggaccagttgttaaccgaatgtggaattagtaattctattcaccggctaaggataatggaaggtatcagacaattagaaaacggccttgccaacggtatgaacgaagacaaccaagacaaatccttagatgtattcgtaagttaccgacggtccaacggttcccaactagccagtttactcaaagtccacttgcagctccgaggattcagtgtcttcatcgacgtggagaggctggaagctggaaagtttgataacaatctcctgcagagtattcaaaaagccaaacacttcttgttggtgctgacgccgaacgctctggaaagatgtataggagatattgaaagaaaagactgggtacatcgggaaatatgtgcagctctatcagctaattgtaacatcatccccatcatcgacaacttcatcttccccgaactcgaacagttgccggaagatatgagacaggtctgccacttcaacgcagttcgctggattcacgattatcaggatgcttgtgtggacaaactagaaaggtttttaaatggtacttttatagatcacacataaccgcatttggaaccattccaccatcgttttattgcatgttgtaataatttattttaataaagacttagtgct

SEQ ID NO: 1459 - DNA, 3317 bp, Diabrotica virgifera
  SmartBlast Evalue=0; Info=Sterile alpha and TIR motif- containing protein 1 (Fragment) n=1 Tax=Harpegnathos saltator RepID=E2B7A2_9HYME
gtgagttggtcagggctcgagcgctaaattttcgatattcaaatttctattcggttttttagtgtaattagtgattttgataaacttctgataataagtaagtgatggcgcaacattctgaatactcattttcggttcgacgacaaaggcccgctaattttacgtttaccaatagttcgagtgaggatcgccaaaagagttataactataaggctagttccgttgaagagcttagcactacaattaaagaaagcccgaagaaatactccatgtatacgttttccagcagaagacaagataatgtgccctcattcgaagaaagaatgaaatttttcaggatggcgagcgaatctcccacggacaataatgcaaatggtaccgagccgccgcttcagacgatcgtaaaaaacccatcaaggacgacagtaaccacaacttcattgcagacgaactctcaatccagtacgacaacgacacgcgttagcaaaacctcgaccagcgcttcaacgaccagccaacggcgccagctcaccgatttaaaagcttccaacatgaagagcgacttagtagactttaaaaacaacataaacgacatgaaaagcagcttacccaacacccttttgcaaataagaaactcgctagaaaatttagtcgacgccgaagaaaatgatcccatcgttacgtttcctgatgataccccagtgccatccgagatcggctcaccaacgaatgcagtggaatcgcttaaatttgaacagaagactacaaataactttaagaagaccacggtaatgaaagatggaatcagtgccgaaaaagaaagtgccaaaatggcggaaatgaaaatacttcaagctggtgacgtttcttacgaagaaaacaacgcagcccgggctactcgagcgagagttgaaatcgatggagtttcggcggagaaaagtcaagtcatggccaaagaagctagatctctcaaagctggagatctcagccaacaggagtccaaaaacctggctcaaacgaatatgaaagttacaacagacaagttcagtagtgaaagaacagccatggaatcccagcaacaaagacagactgttacagctagcggcttttacaatcaagaaaaacacagttctagcacaagtcacatatacacctcttcttcttcaaaaggtcttagcacatcggcaaagatcaatgcaacaagacagtttcacctattaaatggcactcccgaagaagcaatattaaacacgtcattagaagatctcgacagtctctcagctacttccgatgtccacgatatcgaaagagcaaaacacaaatattctacatatttagacgaatccattagatgccttcaaaaactagaccaaaacaaagatgcacccctagtgttagataaaatcaatgacgtcatgcgtaaagcatgggcagtaccgacctatggtcacgaacttggctatgctctatgcaatgcgctacgaaacagtgggggattggacctgataatgcagaactgcacaaaatcggataagagccttcaatttgccagcgctaaattactagagcagtgccttactgcagaaaatagagcacatgtagtagagcacggtctggataaagtcgtaaacgtagcttgtgtctgcacaaagatttcaaattctgtcgaccattcaagggtaggaaccggaatattggagcatttgtttaaacacagtgaagaaacgtgtagcgacgtcgttaggcttggtggtttggatgctttactattcgaatgcagaaaaagtgacgtagaaaccttaaggcactgtgctggagctttagcaaaccttagtttatacggtggtaccgagaatcaagaagctatgataaagcgaaaggttccgatgtggttattccccttagcattccacaccgacgataatattaagtactacgcttgccttgccataaccgtattagtagctaaccccgaaatcgaagctgaagtcttgcaatctggcactcttggtctggtcgaacctttcgtcactacacacaacccttccgaattcgcgaaatcgaatctagctcatgctcacggacaaagcaaaacctggctgaaaaatttagttcctgtcttaagctcaaaacgtgaagaagctagaaacctagccgccttccatttctgcatggaagccggaataaagaagcagcagggaaacactaacatgttctctgaaatcggtgctatcgaatcactaaaaaaagtagctagttgtcctaatgccgtcgcctcaaaatatgcagctcaagccttaaggcttatcggagaggaagtgccacataagttaagtcaacaggtgcccttatggtctgtggaggatgtagaggagtgggtgaaacagataggattcccagaagttgccattagtttcgtagaaagcagggttgatggggatttgttattgcagctaacagaagaaaatcttagggatgatattggattaacgaatggtataaaaagaaaaaggtttacacgagaacttcagcaattaaaaaagatggcagactatacgtctagagacacatcaaatatcaacaatttccttcaaacaatgggactcgaattctctatatatacctacagtttcttaaacgctgggcttgacaaaaaggattacctacgaaatatatctgaggaccagttgttaaccgaatgtggaattagtaattctattcaccggctaaggataatggaaggtatcagacaattagaaaacggccttgccaacggtatgaacgaagacaaccaagacaaatccttagatgtattcgtaagttaccgacggtccaacggttcccaactagccagtttactcaaagtccacttgcagctccgaggattcagtgtcttcatcgacgtggagaggctggaagctggaaagtttgataacaatctcctgcagagtattcaaaaagccaaacacttcttgttggtgctgacgccgaacgctctggaaagatgtataggagatattgaaagaaaagactgggtacatcgggaaatatgtgcagctctatcagctaattgtaacatcatccccatcatcgacaacttcatcttccccgaactcgaacagttgccggaagatatgagacaggtctgccacttcaacgcagttcgctggattcacgattatcaggatgcttgtgtggacaaactagaaaggtttttaaatggtacttttatagatcacacataaccgcatttggaaccattccaccatcgttttattgcatgttgtaataatttattttaataaagacttagtgct

SEQ ID NO: 1460 - DNA, 3317 bp, Diabrotica virgifera
  SmartBlast Evalue=0; Info=Sterile alpha and TIR motif- containing protein 1 (Fragment) n=1 Tax=Harpegnathos saltator RepID=E2B7A2_9HYME
gtgagttggtcagggctcgagcgctaaattttcgatattcaaatttctattcggttttttagtgtaattagtgattttgataaacttctgataataagtaagtgatggcgcaacattctgaatactcattttcggttcgacgacaaaggcccgctaattttacgtttaccaatagttcgagtgaggatcgccaaaagagttataactataaggctagttccgttgaagagcttagcactacaattaaagaaagcccgaagaaatactccatgtatacgttttccagcagaagacaagataatgtgccctcattcgaagaaagaatgaaatttttcaggatggcgagcgaatctcccacggacaataatgcaaatggtaccgagccgccgcttcagacgatcgtaaaaaacccatcaaggacgacagtaaccacaacttcattgcagacgaactctcaatccagtacgacaacgacacgcgttagcaaaacctcgaccagcgcttcaacgaccagccaacggcgccagctcaccgatttaaaagcttccaacatgaagagcgacttagtagactttaaaaacaacataaacgacatgaaaagcagcttacccaacacccttttgcaaataagaaactcgctagaaaatttagtcgacgccgaagaaaatgatcccatcgttacgtttcctgatgataccccagtgccatccgagatcggctcaccaacgaatgcagtggaatcgcttaaatttgaacagaagactacaaataactttaagaagaccacggtaatgaaagatggaatcagtgccgaaaaagaaagtgccaaaatggcggaaatgaaaatacttcaagctggtgacgtttcttacgaagaaaacaacgcagcccgggctactcgagcgagagttgaaatcgatggagtttcggcggagaaaagtcaagtcatggccaaagaagctagatctctcaaagctggagatctcagccaacaggagtccaaaaacctggctcaaacgaatatgaaagttacaacagacaagttcagtagtgaaagaacagccatggaatcccagcaacaaagacagactgttacagctagcggcttttacaatcaagaaaaacacagttctagcacaagtcacatatacacctcttcttcttcaaaaggtcttagcacatcggcaaagatcaatgcaacaagacagtttcacctattaaatggcactcccgaagaagcaatattaaacacgtcattagaagatctcgacagtctctcagctacttccgatgtccacgatatcgaaagagcaaaacacaaatattctacatatttagacgaatccattagatgccttcaaaaactagaccaaaacaaagatgcacccctagtgttagataaaatcaatgacgtcatgcgtaaagcatgggcagtaccgacctatggtcacgaacttggctatgctctatgcaatgcgctacgaaacagtgggggattggacctgataatgcagaactgcacaaaatcggataagagccttcaatttgccagcgctaaattactagagcagtgccttactgcagaaaatagagcacatgtagtagagcacggtctggataaagtcgtaaacgtagcttgtgtctgcacaaagatttcaaattctgtcgaccattcaagggtaggaaccggaatattggagcatttgtttaaacacagtgaagaaacgtgtagcgacgtcgttaggcttggtggtttggatgctttactattcgaatgcagaaaaagtgacgtagaaaccttaaggcactgtgctggagctttagcaaaccttagtttatacggtggtaccgagaatcaagaagctatgataaagcgaaaggttccgatgtggttattccccttagcattccacaccgacgataatattaagtactacgcttgccttgccataaccgtattagtagctaaccccgaaatcgaagctgaagtcttgcaatctggcactcttggtctggtcgaacctttcgtcactacacacaacccttccgaattcgcgaaatcgaatctagctcatgctcacggacaaagcaaaacctggctgaaaaatttagttcctgtcttaagctcaaaacgtgaagaagctagaaacctagccgccttccatttctgcatggaagccggaatcaagaagcagcagggaaacactaacatgttctctgaaatcggtgctatcgaatcactcaaaaaagtagccagttgtcctaatgccgtcgcctcaaaatatgcagctcaagccctaaggctcatcggagaggaagtgcctcataagttaagtcaacaggtgcccttatggtctgtggaggatgtagaggagtgggtgaaacagataggattcccagaagttgccattagtttcgtagaaagcagagttgacggggatttgttattgcagctaacagaagaaaatcttagggatgatattggattaacgaatggtataaaaagaaaaaggtttacacgagaacttcagcaattaaaaaagatggcagactatacgtctagagacacatcaaatatcaacaatttccttcaaacaatgggactcgaattctctatatatacctacagtttcttaaacgctgggcttgacaaaaaggattacctacgaaatatatctgaggaccagttgttaaccgaatgtggaattagtaattctattcaccggctaaggataatggaaggtatcagacaattagaaaacggccttgccaacggtatgaacgaagacaaccaagacaaatccttagatgtattcgtaagttaccgacggtccaacggttcccaactagccagtttactcaaagtccacttgcagctccgaggattcagtgtcttcatcgacgtggagaggctggaagctggaaagtttgataacaatctcctgcagagtattcaaaaagccaaacacttcttgttggtgctgacgccgaacgctctggaaagatgtataggagatattgaaagaaaagactgggtacatcgggaaatatgtgcagctctatcagctaattgtaacatcatccccatcatcgacaacttcatcttccccgaactcgaacagttgccggaagatatgagacaggtctgccacttcaacgcagttcgctggattcacgattatcaggatgcttgtgtggacaaactagaaaggtttttaaatggtacttttatagatcacacataaccgcatttggaaccattccaccatcgttttattgcatgttgtaataatttattttaataaagacttagtgct

SEQ ID NO: 1461 - DNA, 3083 bp, Diabrotica virgifera
  SmartBlast Evalue=0; Info=Sterile alpha and TIR motif- containing protein 1 (Fragment) n=1 Tax=Harpegnathos saltator RepID=E2B7A2_9HYME
gttgtgaagtgatcgtgtacttgcctggttaattttttaaagagtaaaagtggtttggtattatttgactaatatgccaattaataaaagaatgagaatgaatgatggcgagcgaatctcccacggacaataatgcaaatggtaccgagccgccgcttcagacgatcgtaaaaaacccatcaaggacgacagtaaccacaacttcattgcagacgaactctcaatccagtacgacaacgacacgcgttagcaaaacctcgaccagcgcttcaacgaccagccaacggcgccagctcaccgatttaaaagcttccaacatgaagagcgacttagtagactttaaaaacaacataaacgacatgaaaagcagcttacccaacacccttttgcaaataagaaactcgctagaaaatttagtcgacgccgaagaaaatgatcccatcgttacgtttcctgatgataccccagtgccatccgagatcggctcaccaacgaatgcagtggaatcgcttaaatttgaacagaagactacaaataactttaagaagaccacggtaatgaaagatggaatcagtgccgaaaaagaaagtgccaaaatggcggaaatgaaaatacttcaagctggtgacgtttcttacgaagaaaacaacgcagcccgggctactcgagcgagagttgaaatcgatggagtttcggcggagaaaagtcaagtcatggccaaagaagctagatctctcaaagctggagatctcagccaacaggagtccaaaaacctggctcaaacgaatatgaaagttacaacagacaagttcagtagtgaaagaacagccatggaatcccagcaacaaagacagactgttacagctagcggcttttacaatcaagaaaaacacagttctagcacaagtcacatatacacctcttcttcttcaaaaggtcttagcacatcggcaaagatcaatgcaacaagacagtttcacctattaaatggcactcccgaagaagcaatattaaacacgtcattagaagatctcgacagtctctcagctacttccgatgtccacgatatcgaaagagcaaaacacaaatattctacatatttagacgaatccattagatgccttcaaaaactagaccaaaacaaagatgcacccctagtgttagataaaatcaatgacgtcatgcgtaaagcatgggcagtaccgacctatggtcacgaacttggctatgctctatgcaatgcgctacgaaacagtgggggattggacctgataatgcagaactgcacaaaatcggataagagccttcaatttgccagcgctaaattactagagcagtgccttactgcagaaaatagagcacatgtagtagagcacggtctggataaagtcgtaaacgtagcttgtgtctgcacaaagatttcaaattctgtcgaccattcaagggtaggaaccggaatattggagcatttgtttaaacacagtgaagaaacgtgtagcgacgtcgttaggcttggtggtttggatgctttactattcgaatgcagaaaaagtgacgtagaaaccttaaggcactgtgctggagctttagcaaaccttagtttatacggtggtaccgagaatcaagaagctatgataaagcgaaaggttccgatgtggttattccccttagcattccacaccgacgataatattaagtactacgcttgccttgccataaccgtattagtagctaaccccgaaatcgaagctgaagtcttgcaatctggcactcttggtctggtcgaacctttcgtcactacacacaacccttccgaattcgcgaaatcgaatctagctcatgctcacggacaaagcaaaacctggctgaaaaatttagttcctgtcttaagctcaaaacgtgaagaagctagaaacctagccgccttccatttctgcatggaagccggaataaagaagcagcagggaaacactaacatgttctctgaaatcggtgctatcgaatcactaaaaaaagtagctagttgtcctaatgccgtcgcctcaaaatatgcagctcaagccttaaggcttatcggagaggaagtgccacataagttaagtcaacaggtgcccttatggtctgtggaggatgtagaggagtgggtgaaacagataggattcccagaagttgccattagtttcgtagaaagcagggttgatggggatttgttattgcagctaacagaagaaaatcttagggatgatattggattaacgaatggtataaaaagaaaaaggtttacacgagaacttcagcaattaaaaaagatggcagactatacgtctagagacacatcaaatatcaacaatttccttcaaacaatgggactcgaattctctatatatacctacagtttcttaaacgctgggcttgacaaaaaggattacctacgaaatatatctgaggaccagttgttaaccgaatgtggaattagtaattctattcaccggctaaggataatggaaggtatcagacaattagaaaacggccttgccaacggtatgaacgaagacaaccaagacaaatccttagatgtattcgtaagttaccgacggtccaacggttcccaactagccagtttactcaaagtccacttgcagctccgaggattcagtgtcttcatcgacgtggagaggctggaagctggaaagtttgataacaatctcctgcagagtattcaaaaagccaaacacttcttgttggtgctgacgccgaacgctctggaaagatgtataggagatattgaaagaaaagactgggtacatcgggaaatatgtgcagctctatcagctaattgtaacatcatccccatcatcgacaacttcatcttccccgaactcgaacagttgccggaagatatgagacaggtctgccacttcaacgcagttcgctggattcacgattatcaggatgcttgtgtggacaaactagaaaggtttttaaatggtacttttatagatcacacataaccgcatttggaaccattccaccatcgttttattgcatgttgtaataatttattttaataaagacttagtgct

SEQ ID NO: 1462 - DNA, 3083 bp, Diabrotica virgifera
  SmartBlast Evalue=0; Info=Sterile alpha and TIR motif- containing protein 1 (Fragment) n=1 Tax=Harpegnathos saltator RepID=E2B7A2_9HYME
gttgtgaagtgatcgtgtacttgcctggttaattttttaaagagtaaaagtggtttggtattatttgactaatatgccaattaataaaagaatgagaatgaatgatggcgagcgaatctcccacggacaataatgcaaatggtaccgagccgccgcttcagacgatcgtaaaaaacccatcaaggacgacagtaaccacaacttcattgcagacgaactctcaatccagtacgacaacgacacgcgttagcaaaacctcgaccagcgcttcaacgaccagccaacggcgccagctcaccgatttaaaagcttccaacatgaagagcgacttagtagactttaaaaacaacataaacgacatgaaaagcagcttacccaacacccttttgcaaataagaaactcgctagaaaatttagtcgacgccgaagaaaatgatcccatcgttacgtttcctgatgataccccagtgccatccgagatcggctcaccaacgaatgcagtggaatcgcttaaatttgaacagaagactacaaataactttaagaagaccacggtaatgaaagatggaatcagtgccgaaaaagaaagtgccaaaatggcggaaatgaaaatacttcaagctggtgacgtttcttacgaagaaaacaacgcagcccgggctactcgagcgagagttgaaatcgatggagtttcggcggagaaaagtcaagtcatggccaaagaagctagatctctcaaagctggagatctcagccaacaggagtccaaaaacctggctcaaacgaatatgaaagttacaacagacaagttcagtagtgaaagaacagccatggaatcccagcaacaaagacagactgttacagctagcggcttttacaatcaagaaaaacacagttctagcacaagtcacatatacacctcttcttcttcaaaaggtcttagcacatcggcaaagatcaatgcaacaagacagtttcacctattaaatggcactcccgaagaagcaatattaaacacgtcattagaagatctcgacagtctctcagctacttccgatgtccacgatatcgaaagagcaaaacacaaatattctacatatttagacgaatccattagatgccttcaaaaactagaccaaaacaaagatgcacccctagtgttagataaaatcaatgacgtcatgcgtaaagcatgggcagtaccgacctatggtcacgaacttggctatgctctatgcaatgcgctacgaaacagtgggggattggacctgataatgcagaactgcacaaaatcggataagagccttcaatttgccagcgctaaattactagagcagtgccttactgcagaaaatagagcacatgtagtagagcacggtctggataaagtcgtaaacgtagcttgtgtctgcacaaagatttcaaattctgtcgaccattcaagggtaggaaccggaatattggagcatttgtttaaacacagtgaagaaacgtgtagcgacgtcgttaggcttggtggtttggatgctttactattcgaatgcagaaaaagtgacgtagaaaccttaaggcactgtgctggagctttagcaaaccttagtttatacggtggtaccgagaatcaagaagctatgataaagcgaaaggttccgatgtggttattccccttagcattccacaccgacgataatattaagtactacgcttgccttgccataaccgtattagtagctaaccccgaaatcgaagctgaagtcttgcaatctggcactcttggtctggtcgaacctttcgtcactacacacaacccttccgaattcgcgaaatcgaatctagctcatgctcacggacaaagcaaaacctggctgaaaaatttagttcctgtcttaagctcaaaacgtgaagaagctagaaacctagccgccttccatttctgcatggaagccggaatcaagaagcagcagggaaacactaacatgttctctgaaatcggtgctatcgaatcactcaaaaaagtagccagttgtcctaatgccgtcgcctcaaaatatgcagctcaagccctaaggctcatcggagaggaagtgcctcataagttaagtcaacaggtgcccttatggtctgtggaggatgtagaggagtgggtgaaacagataggattcccagaagttgccattagtttcgtagaaagcagagttgacggggatttgttattgcagctaacagaagaaaatcttagggatgatattggattaacgaatggtataaaaagaaaaaggtttacacgagaacttcagcaattaaaaaagatggcagactatacgtctagagacacatcaaatatcaacaatttccttcaaacaatgggactcgaattctctatatatacctacagtttcttaaacgctgggcttgacaaaaaggattacctacgaaatatatctgaggaccagttgttaaccgaatgtggaattagtaattctattcaccggctaaggataatggaaggtatcagacaattagaaaacggccttgccaacggtatgaacgaagacaaccaagacaaatccttagatgtattcgtaagttaccgacggtccaacggttcccaactagccagtttactcaaagtccacttgcagctccgaggattcagtgtcttcatcgacgtggagaggctggaagctggaaagtttgataacaatctcctgcagagtattcaaaaagccaaacacttcttgttggtgctgacgccgaacgctctggaaagatgtataggagatattgaaagaaaagactgggtacatcgggaaatatgtgcagctctatcagctaattgtaacatcatccccatcatcgacaacttcatcttccccgaactcgaacagttgccggaagatatgagacaggtctgccacttcaacgcagttcgctggattcacgattatcaggatgcttgtgtggacaaactagaaaggtttttaaatggtacttttatagatcacacataaccgcatttggaaccattccaccatcgttttattgcatgttgtaataatttattttaataaagacttagtgct

SEQ ID NO: 1463 - DNA, 1412 bp, Diabrotica virgifera
  SmartBlast Evalue=2E-11; Info=Putative uncharacterized transposon-derived protein F52C9.6 (Fragment) n=2 Tax= Camponotus floridanus RepID=E2ALS0_9HYME
atgaaaatggtcattttatattgtaagtgataatgtaaaattggcgcagtattctctgaagatcctactcgtgttttcattcgtgtttgtttagaaataaaatatctactgactactaaacctttaactaaagacgaaacgcactagtaatcttaatttgctcataataagtgttttccttctcaagtcagtgtatattacgtttaaaaaatttataaataatccaaacccattgatttcagtacaaaaggactaagtgataaaacttgtgacttacagttttgtaatttttttagtaattgggatattcttgaaaaaaatgggtttggatatattttaatcagttattgtgtctcgagtttttaaagtagtagattcataggcagctcagtaccaaaaagcgttatcaaaaaattataataaaaaataggggtacttaaatctgtgccaaattttacatatttcggggtttctcaccataaaatattttatacataaaacactgggcatttttggtatatgaacaatagagtaaaatatcgattttatatattaatatttgctttttttaatgttaatcattataatttcgacaaaaaacgactcactgccatgtgtactattaaaagattaaaaactactgtttagcaccgaatattttatcgatctgtgacatctctgcttttattctactataggcattatatcacattgtagattctagatttcaaaggggttagttggcctgacaaactattcgacactgctaagtgaaagatctcttgtgtttatcgtacatccatattttaatccaaaagttctagatttctacgaagtcagacaagacattcacggttcaaacgatgagatatcttagtgagaatacgagataactccaagttcatcttcttgactggctttacaacacgatcttgcgcttccatctttttctgggacggcatactgatcttttaccgtcttgtctctcaaaaaacactgtcttcctcagttcctaccacatgacctgtcatccggttacctttcatgtgtctgacgatgttttcagtcccatacagaattgccaattcagcattgcgccgccttctccactcttctgtcaattcatctctttgagggccaatatcattcggagaacctttcttttcaaatacaagcagcttatttctttctcgcttatgtagattccacgtttcacttccatattatgtaacaactgagcgaataattggcatgtacagtcttaatttagattgctttttagcagcttagatcttaataatgatgataggaaaataatgctctattcgcgattaaaactgaatatagagggcaggtcgaatgcatgaaaatggccgatataaatggtataaacaaacattcatttgaggagc

SEQ ID NO: 1464 - DNA, 6077 bp, Diabrotica virgifera
  SmartBlast Evalue=0; Info=Sterile alpha and TIR motif- containing protein 1 (Fragment) n=1 Tax=Harpegnathos saltator RepID=E2B7A2_9HYME
gtcagtgttgaacttaatactgctctgttgtactagcgatttgttgtaaaggtcatcttacatccgaacttaaaacatgtgtctgtgtcttgttacatttttttgcagataagctgtagataaacccatcatttggcagtgattaatcagttgaatataagtgttacttgagcgaacaaggaactcgagtgtgttcaagacttcaagagtctgtgtatttttgttcttgtatctgtgcgggtagtgtttgttgactgctctatatcgaaacaaccttctagtgtttttgagttttattacacggcttgattatatcaacatccatggtttttatatcgagtaatggcagatatgatagattattatctaaaatgatggcgagcgaatctcccacggacaataatgcaaatggtaccgagccgccgcttcagacgatcgtaaaaaacccatcaaggacgacagtaaccacaacttcattacagacgaactcccaatccagtacgacaacgacacgcgttagcaaaacctcgaccagcgcttcaacgaccagccaacggcgccagctcaccgatttaaaagcttccaacatgaagagcgatttagtagactttaaaaacaacataaacgacatgaaaagcagcttacccaacacccttttgcagataagaaactcgctagaaaatttagtcgacgccgaagaaaatgatcccatcgttacgtttcctgatgataccccagtgccatccgagatcggctcaccaacgaatgcagtggaatcgcttaaatttgaacagaagactacaaataactttaagaagaccacggtaatgaaagatggaatcagtgccgaaaaagaaagtgccaaaatggcggaaatgaaaatacttcaagctggtgacgtttcttacgaagaaaacaacgcagcccgggctactcgagcgagagttgaaatcgatggagtttcggcggagaaaagtcaagtcatggccaaagaagctagatctctcaaagctggagatctcagccaacaggagtccaaaaacctggctcaaacgaatatgaaagttacaacagacaagttcagtagtgaaagaacagccatggaatcccagcaacaaagacagactgttacagctagcggcttttacaatcaagaaaaacacagttctagcacaagtcacatatacacctcttcttcttcaaaaggtcttagcacatcggcaaagatcaatgcaacaagacagtttcacctattaaatggcactcccgaagaagcaatattaaacacgtcattagaagatctcgacagtctctcagctacttccgatgtccacgatatcgaaagagcaaaacacaaatattctacatatttagacgaatccattagatgccttcaaaaactagaccaaaacaaagatgcacccctagtgttagataaaatcaatgacgtcatgcgtaaagcatgggcagtaccgacctatggtcacgaacttggctatgctctatgcaatgcgctacgaaacagtgggggattggacctgataatgcagaactgcacaaaatcggataagagccttcaatttgccagcgctaaattactagagcagtgccttactgcagaaaatagagcacatgtagtagagcacggtctggataaagtcgtaaacgtagcttgtgtctgcacaaagatttcaaattctgtcgaccattcaagggtaggaaccggaatattggagcatttgtttaaacacagtgaagaaacgtgtagcgacgtcgttaggcttggtggtttggatgctttactattcgaatgcagaaaaagtgacgtagaaaccttaaggcactgtgctggagctttagcaaaccttagtttatacggtggtaccgagaatcaagaagctatgataaagcgaaaggttccgatgtggttattccccttagcattccacaccgacgataatattaagtactacgcttgccttgccataaccgtattagtagctaaccccgaaatcgaagctgaagtcttgcaatctggcactcttggtctggtcgaacctttcgtcactacacacaacccttccgaattcgcgaaatcgaatctagctcatgctcacggacaaagcaaaacctggctgaaaaatttagttcctgtcttaagctcaaaacgtgaagaagctagaaacctagccgccttccatttctgcatggaagccggaataaagaagcagcagggaaacactaacatgttctctgaaatcggtgctatcgaatcactaaaaaaagtagctagttgtcctaatgccgtcgcctcaaaatatgcagctcaagccttaaggcttatcggagaggaagtgccacataagttaagtcaacaggtgcccttatggtctgtggaggatgtagaggagtgggtgaaacagataggattcccagaagttgccattagtttcgtagaaagcagggttgatggggatttgttattgcagctaacagaagaaaatcttagggatgatattggattaacgaatggtataaaaagaaaaaggtttacacgagaacttcagcaattaaaaaagatggcagactatacgtctagagacacatcaaatatcaacaatttccttcaaacaatgggactcgaattctctatatatacctacagtttcttaaacgctgggcttgacaaaaaggattacctacgaaatatatctgaggaccagttgttaaccgaatgtggaattagtaattctattcaccggctaaggataatggaaggtatcagacaattagaaaacggccttgccaacggtatgaacgaagacaaccaagacaaatccttagatgtattcgtaagttaccgacggtccaacggttcccaactagccagtttactcaaagtccacttgcagctccgaggattcagtgtcttcatcgacgtggagaggctggaagctggaaagtttgataacaatctcctgcagagtattcaaaaagccaaacacttcttgttggtgctgacgccgaacgctctggaaagatgtataggagatattgaaagaaaagactgggtacatcgggaaatatgtgcagctctatcagctaattgtaacatcatccccatcatcgacaacttcatccttccccgaactcgaacagttgccggaagatatgagacaggtctgccacttcaacgcagttcggtggattcacgattatcaggatgcttgtgtggacaaactagaaaggttcatgcgaggagaagcgaatccacgcggggacaattacagagtcactttgcccaaaggcgatataactccaggaacaccttcaaatcccagtttggttaggcagccgcctaactaccaaagaatgcacagcaacgactcaggaagtggtaaaagctccgacaaagacatgaacggcaactcggggttaacgagggattgactagatggtccttatgcctcggctactcctactccactgcctagattctacaaagcaaacagtccgtcccgaaattggataatcaactccaacaacttcaaccggggtctcccgcccgtgccgtactctcggcgaggttccaacacccccgtctcgtcactagctcttaacagttacccccaccctccggcccctaaccgatctcgcagcctcgacggtctcctagactccgccgagcccatcctagcagcagctacagaagcaactaaaaacgatcaagttccgtccccgaaaaaagcgcaaagttgtgatgacattgacaaagacttgaacgacgcatccgcatacgtcgaagagactgacactagtttaagtaatacgaaggaactggattgttcggtagaaagtgatagtactgacaagtgttcgatatacagtaattctagtgattcgaaacgtaagagaaactttatggaccgatgtgtcaataaagtgcgatcttttattaagaaataaactgcatatttataaaaaaactaaactaggtgaagcaaacgataccaattttataggttttagtataattccaaattgacgtgaaaagtagtcacatcaacatataaaactgaatagatttgcagaaaatttcgtaaatacaaagcaatatttcaacacacaacaaaataattgtttacgctaatcttttttaaaactttgaccaagtctgctaatccggttcgaaggccaagtgtgtaaatccggctcgaaggaccatatgttgtttattcttttaaagaattagatgttaaataggtatcgtttggttctcctatactttatttcctgtatcttgatattcaatatttaaatttaaacttcatagatgatattatttattattcttttacggcaactaaattacttagtacaaacattgtgcttttatacaaaatttgtatatatagtaaaaacgtgtgattatcgagcagtcttaatgaattttcttaggtctgtttccgtatgagagagataaaaaaatttctatcgtgcaaaatttattaaaaatgaactcttttttatttgtatagtatatgttggtgctatttacaatttttttaagaaaatatgtggccagatcaacaaattcagtcaaaatggatccaaacttcatacttatttaatattccaacgggatttattcgctataaaaaaaatacaattcaaaatcacagattaacttgaaattttgtactgctatatttgaaaaatgttggctagagtgtaactctgcaatccactgagttgtcaagcttacttatctctgttttaatttagtcacttcaaattttcttccatatatagttttgttaaaagttttttcatttttgcatctttgtcatggtaaattatgtcgtttatactatatcatcatttatatacattaatcattctgaagcatacaaaacgtagacttttaaattctaagtgcctctctccaagtgccttcttgttgtttaatcaagttaaattagtaatcgtgttttcaaagatatgttgtgatatttcctatgtaagagaaacagtttccacttcaccgattttggatatgtttatagaaaatttctttcaatgcacactcacaaaaaaaacttagttgatgtcaggttacgctattaatgtggccagactcaatgacattgtgagaacaccaagaacatctgttcgaagtgacatctaaacaagagatatattttgaagatcgaatttttgaaagggcttttatatttaataattttttctgttactttttatccaatggtttttattgtattcgctactacacttccatcaattcttattttggatcttctgtgaaaaccatagaatatctagactgcgggttgcaatgcaaaactgtttcctcagtgcgacagagaaaagtatttgtaaacagggtatttattttctttctttcttgactggctttacaacttgaggtgagtcttagccgcatccactatggctctccatcttctacttgctgtatccatcatgaccattgcaccaaatggtcttgcacttctatttcccattgctgtaccccaatcctagatagatctgcttcaacctcatccttccatctttttctgggacggcctactaatcttctgccctctgctttctcatagaaaactgtctttaacactctgccttcctctgatcttaccacatgacctgcccatcttaactagttagcttttacatgcctggcgatgttttcagtaccatacagtcaccaattcagcattgcggcgccttctccactcttctgtcaattcatctctttgagggccaatatcattcggagaacctttcttttcaaatacaagcagcttatttctttctcgcttatgtagattccacgtttcacttccatattatgtaacaactgagcgaataattggcatgtacagtcttaatttagattgctttttagcagcttagatcttaataatgatgataggaaaataatgctctattcgcgattaaaactgaatatagagggcaggtcgaatgcatgaaaatggccgatataaatggtataaacaaacattcatttgaggagc

SEQ ID NO: 1465 - DNA, 1257 bp, Diabrotica virgifera
  SmartBlast Evalue=2E-10; Info=Putative uncharacterized transposon-derived protein F52C9.6 (Fragment) n=2 Tax= Camponotus floridanus RepID=E2ALS0_9HYME
atgaaaatggtcattttatattgtaagtgataatgtaaaattggcgcagtattctctgaagatcctactcgtgttttcattcgtgtttgtttagaaataaaatatctactgactactaaacctttaactaaagacgaaacgcactagtaatcttaatttgctcataataagtgttttccttctcaagtcagtgtatattacgtttaaaaaatttataaataatccaaacccattgatttcagtacaaaaggactaagtgataaaacttgtgacttacagttttgtaatttttttagtaattgggatattcttgaaaaaaatgggtttggatatattttaatcagttattgtgtctcgagtttttaaagtagtagattcataggcagctcagtaccaaaaagcgttatcaaaaaattataataaaaaataggggtacttaaatctgtgccaaattttacatatttcggggtttctcaccataaaatattttatacataaaacactgggcatttttggtatatgaacaatagagtaaaatatcgattttatatattaatatttgctttttttaatgttaatcattataatttcgacaaaaaacgactcactgccatgtgtactattaaaagattaaaaactactgtttagcaccgaatattttatcgatctgtgacatctctgcttttattctactataggcattatatcacattgtagattctagatttcaaaggggttagttggcctgacaaactattcgacactgctaagtgaaagatctcttgtgtttatcgtacatccatattttaatccaaaagttctagatttctacgaagtcagacaagacattcacggttcaaacgatgagatatcttagtgagaatacgagataactccaagttcatcttcttgactggctttacaacacgatcttgcgcttccatctttttctgggacggcatactgatcttttaccgtcttgtctctcaaaaaacactgtcttcctcagttcctaccacatgacctgtcatccggttacctttcatgtgtctgacgatgttttcagtcccatacagaattgccaattcagcattgcgccgccttctccactcttctgtcaattcatctctttgagggccaaacatcattcttagaactttccgttccaataccagcagcttatttatttcccgctaatgtagagtctatgtttcacttccatatgtaacaactgtgcgaagaattattgacaggtac

SEQ ID NO: 1466 - DNA, 6077 bp, Diabrotica virgifera
  SmartBlast Evalue=0; Info=Sterile alpha and TIR motif- containing protein 1 (Fragment) n=1 Tax=Harpegnathos saltator RepID=E2B7A2_9HYME
gtcagtgttgaacttaatactgctctgttgtactagcgatttgttgtaaaggtcatcttacatccgaacttaaaacatgtgtctgtgtcttgttacatttttttgcagataagctgtagataaacccatcatttggcagtgattaatcagttgaatataagtgttacttgagcgaacaaggaactcgagtgtgttcaagacttcaagagtctgtgtatttttgttcttgtatctgtgcgggtagtgtttgttgactgctctatatcgaaacaaccttctagtgtttttgagttttattacacggcttgattatatcaacatccatggtttttatatcgagtaatggcagatatgatagattattatctaaaatgatggcgagcgaatctcccacggacaataatgcaaatggtaccgagccgccgcttcagacgatcgtaaaaaacccatcaaggacgacagtaaccacaacttcattacagacgaactcccaatccagtacgacaacgacacgcgttagcaaaacctcgaccagcgcttcaacgaccagccaacggcgccagctcaccgatttaaaagcttccaacatgaagagcgatttagtagactttaaaaacaacataaacgacatgaaaagcagcttacccaacacccttttgcagataagaaactcgctagaaaatttagtcgacgccgaagaaaatgatcccatcgttacgtttcctgatgataccccagtgccatccgagatcggctcaccaacgaatgcagtggaatcgcttaaatttgaacagaagactacaaataactttaagaagaccacggtaatgaaagatggaatcagtgccgaaaaagaaagtgccaaaatggcggaaatgaaaatacttcaagctggtgacgtttcttacgaagaaaacaacgcagcccgggctactcgagcgagagttgaaatcgatggagtttcggcggagaaaagtcaagtcatggccaaagaagctagatctctcaaagctggagatctcagccaacaggagtccaaaaacctggctcaaacgaatatgaaagttacaacagacaagttcagtagtgaaagaacagccatggaatcccagcaacaaagacagactgttacagctagcggcttttacaatcaagaaaaacacagttctagcacaagtcacatatacacctcttcttcttcaaaaggtcttagcacatcggcaaagatcaatgcaacaagacagtttcacctattaaatggcactcccgaagaagcaatattaaacacgtcattagaagatctcgacagtctctcagctacttccgatgtccacgatatcgaaagagcaaaacacaaatattctacatatttagacgaatccattagatgccttcaaaaactagaccaaaacaaagatgcacccctagtgttagataaaatcaatgacgtcatgcgtaaagcatgggcagtaccgacctatggtcacgaacttggctatgctctatgcaatgcgctacgaaacagtgggggattggacctgataatgcagaactgcacaaaatcggataagagccttcaatttgccagcgctaaattactagagcagtgccttactgcagaaaatagagcacatgtagtagagcacggtctggataaagtcgtaaacgtagcttgtgtctgcacaaagatttcaaattctgtcgaccattcaagggtaggaaccggaatattggagcatttgtttaaacacagtgaagaaacgtgtagcgacgtcgttaggcttggtggtttggatgctttactattcgaatgcagaaaaagtgacgtagaaaccttaaggcactgtgctggagctttagcaaaccttagtttatacggtggtaccgagaatcaagaagctatgataaagcgaaaggttccgatgtggttattccccttagcattccacaccgacgataatattaagtactacgcttgccttgccataaccgtattagtagctaaccccgaaatcgaagctgaagtcttgcaatctggcactcttggtctggtcgaacctttcgtcactacacacaacccttccgaattcgcgaaatcgaatctagctcatgctcacggacaaagcaaaacctggctgaaaaatttagttcctgtcttaagctcaaaacgtgaagaagctagaaacctagccgccttccatttctgcatggaagccggaatcaagaagcagcagggaaacactaacatgttctctgaaatcggtgctatcgaatcactcaaaaaagtagccagttgtcctaatgccgtcgcctcaaaatatgcagctcaagccctaaggctcatcggagaggaagtgcctcataagttaagtcaacaggtgcccttatggtctgtggaggatgtagaggagtgggtgaaacagataggattcccagaagttgccattagtttcgtagaaagcagagttgacggggatttgttattgcagctaacagaagaaaatcttagggatgatattggattaacgaatggtataaaaagaaaaaggtttacacgagaacttcagcaattaaaaaagatggcagactatacgtctagagacacatcaaatatcaacaatttccttcaaacaatgggactcgaattctctatatatacctacagtttcttaaacgctgggcttgacaaaaaggattacctacgaaatatatctgaggaccagttgttaaccgaatgtggaattagtaattctattcaccggctaaggataatggaaggtatcagacaattagaaaacggccttgccaacggtatgaacgaagacaaccaagacaaatccttagatgtattcgtaagttaccgacggtccaacggttcccaactagccagtttactcaaagtccacttgcagctccgaggattcagtgtcttcatcgacgtggagaggctggaagctggaaagtttgataacaatctcctgcagagtattcaaaaagccaaacacttcttgttggtgctgacgccgaacgctctggaaagatgtataggagatattgaaagaaaagactgggtacatcgggaaatatgtgcagctctatcagctaattgtaacatcatccccatcatcgacaacttcatccttccccgaactcgaacagttgccggaagatatgagacaggtctgccacttcaacgcagttcggtggattcacgattatcaggatgcttgtgtggacaaactagaaaggttcatgcgaggagaagcgaatccacgcggggacaattacagagtcactttgcccaaaggcgatataactccaggaacaccttcaaatcccagtttggttaggcagccgcctaactaccaaagaatgcacagcaacgactcaggaagtggtaaaagctccgacaaagacatgaacggcaactcggggttaacgagggattgactagatggtccttatgcctcggctactcctactccactgcctagattctacaaagcaaacagtccgtcccgaaattggataatcaactccaacaacttcaaccggggtctcccgcccgtgccgtactctcggcgaggttccaacacccccgtctcgtcactagctcttaacagttacccccaccctccggcccctaaccgatctcgcagcctcgacggtctcctagactccgccgagcccatcctagcagcagctacagaagcaactaaaaacgatcaagttccgtccccgaaaaaagcgcaaagttgtgatgacattgacaaagacttgaacgacgcatccgcatacgtcgaagagactgacactagtttaagtaatacgaaggaactggattgttcggtagaaagtgatagtactgacaagtgttcgatatacagtaattctagtgattcgaaacgtaagagaaactttatggaccgatgtgtcaataaagtgcgatcttttattaagaaataaactgcatatttataaaaaaactaaactaggtgaagcaaacgataccaattttataggttttagtataattccaaattgacgtgaaaagtagtcacatcaacatataaaactgaatagatttgcagaaaatttcgtaaatacaaagcaatatttcaacacacaacaaaataattgtttacgctaatcttttttaaaactttgaccaagtctgctaatccggttcgaaggccaagtgtgtaaatccggctcgaaggaccatatgttgtttattcttttaaagaattagatgttaaataggtatcgtttggttctcctatactttatttcctgtatcttgatattcaatatttaaatttaaacttcatagatgatattatttattattcttttacggcaactaaattacttagtacaaacattgtgcttttatacaaaatttgtatatatagtaaaaacgtgtgattatcgagcagtcttaatgaattttcttaggtctgtttccgtatgagagagataaaaaaatttctatcgtgcaaaatttattaaaaatgaactcttttttatttgtatagtatatgttggtgctatttacaatttttttaagaaaatatgtggccagatcaacaaattcagtcaaaatggatccaaacttcatacttatttaatattccaacgggatttattcgctataaaaaaaatacaattcaaaatcacagattaacttgaaattttgtactgctatatttgaaaaatgttggctagagtgtaactctgcaatccactgagttgtcaagcttacttatctctgttttaatttagtcacttcaaattttcttccatatatagttttgttaaaagttttttcatttttgcatctttgtcatggtaaattatgtcgtttatactatatcatcatttatatacattaatcattctgaagcatacaaaacgtagacttttaaattctaagtgcctctctccaagtgccttcttgttgtttaatcaagttaaattagtaatcgtgttttcaaagatatgttgtgatatttcctatgtaagagaaacagtttccacttcaccgattttggatatgtttatagaaaatttctttcaatgcacactcacaaaaaaaacttagttgatgtcaggttacgctattaatgtggccagactcaatgacattgtgagaacaccaagaacatctgttcgaagtgacatctaaacaagagatatattttgaagatcgaatttttgaaagggcttttatatttaataattttttctgttactttttatccaatggtttttattgtattcgctactacacttccatcaattcttattttggatcttctgtgaaaaccatagaatatctagactgcgggttgcaatgcaaaactgtttcctcagtgcgacagagaaaagtatttgtaaacagggtatttattttctttctttcttgactggctttacaacttgaggtgagtcttagccgcatccactatggctctccatcttctacttgctgtatccatcatgaccattgcaccaaatggtcttgcacttctatttcccattgctgtaccccaatcctagatagatctgcttcaacctcatccttccatctttttctgggacggcctactaatcttctgccctctgctttctcatagaaaactgtctttaacactctgccttcctctgatcttaccacatgacctgcccatcttaactagttagcttttacatgcctggcgatgttttcagtaccatacagtcaccaattcagcattgcggcgccttctccactcttctgtcaattcatctctttgagggccaatatcattcggagaacctttcttttcaaatacaagcagcttatttctttctcgcttatgtagattccacgtttcacttccatattatgtaacaactgagcgaataattggcatgtacagtcttaatttagattgctttttagcagcttagatcttaataatgatgataggaaaataatgctctattcgcgattaaaactgaatatagagggcaggtcgaatgcatgaaaatggccgatataaatggtataaacaaacattcatttgaggagc

SEQ ID NO: 1467 - DNA, 6041 bp, Diabrotica virgifera
  SmartBlast Evalue=0; Info=Sterile alpha and TIR motif- containing protein 1 (Fragment) n=1 Tax=Harpegnathos saltator RepID=E2B7A2_9HYME
gtgagttggtcagggctcgagcgctaaattttcgatattcaaatttctattcggttttttagtgtaattagtgattttgataaacttctgataataagtaagtgatggcgcaacattctgaatactcattttcggttcgacgacaaaggcccgctaattttacgtttaccaatagttcgagtgaggatcgccaaaagagttataactataaggctagttccgttgaagagcttagcactacaattaaagaaagcccgaagaaatactccatgtatacgttttccagcagaagacaagataatgtgccctcattcgaagaaagaatgaaatttttcaggatggcgagcgaatctcccacggacaataatgcaaatggtaccgagccgccgcttcagacgatcgtaaaaaacccatcaaggacgacagtaaccacaacttcattgcagacgaactctcaatccagtacgacaacgacacgcgttagcaaaacctcgaccagcgcttcaacgaccagccaacggcgccagctcaccgatttaaaagcttccaacatgaagagcgacttagtagactttaaaaacaacataaacgacatgaaaagcagcttacccaacacccttttgcaaataagaaactcgctagaaaatttagtcgacgccgaagaaaatgatcccatcgttacgtttcctgatgataccccagtgccatccgagatcggctcaccaacgaatgcagtggaatcgcttaaatttgaacagaagactacaaataactttaagaagaccacggtaatgaaagatggaatcagtgccgaaaaagaaagtgccaaaatggcggaaatgaaaatacttcaagctggtgacgtttcttacgaagaaaacaacgcagcccgggctactcgagcgagagttgaaatcgatggagtttcggcggagaaaagtcaagtcatggccaaagaagctagatctctcaaagctggagatctcagccaacaggagtccaaaaacctggctcaaacgaatatgaaagttacaacagacaagttcagtagtgaaagaacagccatggaatcccagcaacaaagacagactgttacagctagcggcttttacaatcaagaaaaacacagttctagcacaagtcacatatacacctcttcttcttcaaaaggtcttagcacatcggcaaagatcaatgcaacaagacagtttcacctattaaatggcactcccgaagaagcaatattaaacacgtcattagaagatctcgacagtctctcagctacttccgatgtccacgatatcgaaagagcaaaacacaaatattctacatatttagacgaatccattagatgccttcaaaaactagaccaaaacaaagatgcacccctagtgttagataaaatcaatgacgtcatgcgtaaagcatgggcagtaccgacctatggtcacgaacttggctatgctctatgcaatgcgctacgaaacagtgggggattggacctgataatgcagaactgcacaaaatcggataagagccttcaatttgccagcgctaaattactagagcagtgccttactgcagaaaatagagcacatgtagtagagcacggtctggataaagtcgtaaacgtagcttgtgtctgcacaaagatttcaaattctgtcgaccattcaagggtaggaaccggaatattggagcatttgtttaaacacagtgaagaaacgtgtagcgacgtcgttaggcttggtggtttggatgctttactattcgaatgcagaaaaagtgacgtagaaaccttaaggcactgtgctggagctttagcaaaccttagtttatacggtggtaccgagaatcaagaagctatgataaagcgaaaggttccgatgtggttattccccttagcattccacaccgacgataatattaagtactacgcttgccttgccataaccgtattagtagctaaccccgaaatcgaagctgaagtcttgcaatctggcactcttggtctggtcgaacctttcgtcactacacacaacccttccgaattcgcgaaatcgaatctagctcatgctcacggacaaagcaaaacctggctgaaaaatttagttcctgtcttaagctcaaaacgtgaagaagctagaaacctagccgccttccatttctgcatggaagccggaataaagaagcagcagggaaacactaacatgttctctgaaatcggtgctatcgaatcactaaaaaaagtagctagttgtcctaatgccgtcgcctcaaaatatgcagctcaagccttaaggcttatcggagaggaagtgccacataagttaagtcaacaggtgcccttatggtctgtggaggatgtagaggagtgggtgaaacagataggattcccagaagttgccattagtttcgtagaaagcagggttgatggggatttgttattgcagctaacagaagaaaatcttagggatgatattggattaacgaatggtataaaaagaaaaaggtttacacgagaacttcagcaattaaaaaagatggcagactatacgtctagagacacatcaaatatcaacaatttccttcaaacaatgggactcgaattctctatatatacctacagtttcttaaacgctgggcttgacaaaaaggattacctacgaaatatatctgaggaccagttgttaaccgaatgtggaattagtaattctattcaccggctaaggataatggaaggtatcagacaattagaaaacggccttgccaacggtatgaacgaagacaaccaagacaaatccttagatgtattcgtaagttaccgacggtccaacggttcccaactagccagtttactcaaagtccacttgcagctccgaggattcagtgtcttcatcgacgtggagaggctggaagctggaaagtttgataacaatctcctgcagagtattcaaaaagccaaacacttcttgttggtgctgacgccgaacgctctggaaagatgtataggagatattgaaagaaaagactgggtacatcgggaaatatgtgcagctctatcagctaattgtaacatcatccccatcatcgacaacttcatccttccccgaactcgaacagttgccggaagatatgagacaggtctgccacttcaacgcagttcggtggattcacgattatcaggatgcttgtgtggacaaactagaaaggttcatgcgaggagaagcgaatccacgcggggacaattacagagtcactttgcccaaaggcgatataactccaggaacaccttcaaatcccagtttggttaggcagccgcctaactaccaaagaatgcacagcaacgactcaggaagtggtaaaagctccgacaaagacatgaacggcaactcggggttaacgagggattgactagatggtccttatgcctcggctactcctactccactgcctagattctacaaagcaaacagtccgtcccgaaattggataatcaactccaacaacttcaaccggggtctcccgcccgtgccgtactctcggcgaggttccaacacccccgtctcgtcactagctcttaacagttacccccaccctccggcccctaaccgatctcgcagcctcgacggtctcctagactccgccgagcccatcctagcagcagctacagaagcaactaaaaacgatcaagttccgtccccgaaaaaagcgcaaagttgtgatgacattgacaaagacttgaacgacgcatccgcatacgtcgaagagactgacactagtttaagtaatacgaaggaactggattgttcggtagaaagtgatagtactgacaagtgttcgatatacagtaattctagtgattcgaaacgtaagagaaactttatggaccgatgtgtcaataaagtgcgatcttttattaagaaataaactgcatatttataaaaaaactaaactaggtgaagcaaacgataccaattttataggttttagtataattccaaattgacgtgaaaagtagtcacatcaacatataaaactgaatagatttgcagaaaatttcgtaaatacaaagcaatatttcaacacacaacaaaataattgtttacgctaatcttttttaaaactttgaccaagtctgctaatccggttcgaaggccaagtgtgtaaatccggctcgaaggaccatatgttgtttattcttttaaagaattagatgttaaataggtatcgtttggttctcctatactttatttcctgtatcttgatattcaatatttaaatttaaacttcatagatgatattatttattattcttttacggcaactaaattacttagtacaaacattgtgcttttatacaaaatttgtatatatagtaaaaacgtgtgattatcgagcagtcttaatgaattttcttaggtctgtttccgtatgagagagataaaaaaatttctatcgtgcaaaatttattaaaaatgaactcttttttatttgtatagtatatgttggtgctatttacaatttttttaagaaaatatgtggccagatcaacaaattcagtcaaaatggatccaaacttcatacttatttaatattccaacgggatttattcgctataaaaaaaatacaattcaaaatcacagattaacttgaaattttgtactgctatatttgaaaaatgttggctagagtgtaactctgcaatccactgagttgtcaagcttacttatctctgttttaatttagtcacttcaaattttcttccatatatagttttgttaaaagttttttcatttttgcatctttgtcatggtaaattatgtcgtttatactatatcatcatttatatacattaatcattctgaagcatacaaaacgtagacttttaaattctaagtgcctctctccaagtgccttcttgttgtttaatcaagttaaattagtaatcgtgttttcaaagatatgttgtgatatttcctatgtaagagaaacagtttccacttcaccgattttggatatgtttatagaaaatttctttcaatgcacactcacaaaaaaaacttagttgatgtcaggttacgctattaatgtggccagactcaatgacattgtgagaacaccaagaacatctgttcgaagtgacatctaaacaagagatatattttgaagatcgaatttttgaaagggcttttatatttaataattttttctgttactttttatccaatggtttttattgtattcgctactacacttccatcaattcttattttggatcttctgtgaaaaccatagaatatctagactgcgggttgcaatgcaaaactgtttcctcagtgcgacagagaaaagtatttgtaaacagggtatttattttctttctttcttgactggctttacaacttgaggtgagtcttagccgcatccactatggctctccatcttctacttgctgtatccatcatgaccattgcaccaaatggtcttgcacttctatttcccattgctgtaccccaatcctagatagatctgcttcaacctcatccttccatctttttctgggacggcctactaatcttctgccctctgctttctcatagaaaactgtctttaacactctgccttcctctgatcttaccacatgacctgcccatcttaactagttagcttttacatgcctggcgatgttttcagtaccatacagtcaccaattcagcattgcggcgccttctccactcttctgtcaattcatctctttgagggccaatatcattcggagaacctttcttttcaaatacaagcagcttatttctttctcgcttatgtagattccacgtttcacttccatattatgtaacaactgagcgaataattggcatgtacagtcttaatttagattgctttttagcagcttagatcttaataatgatgataggaaaataatgctctattcgcgattaaaactgaatatagagggcaggtcgaatgcatgaaaatggccgatataaatggtataaacaaacattcatttgaggagc

SEQ ID NO: 1468 - DNA, 6041 bp, Diabrotica virgifera
  SmartBlast Evalue=0; Info=Sterile alpha and TIR motif- containing protein 1 (Fragment) n=1 Tax=Harpegnathos saltator RepID=E2B7A2_9HYME
gtgagttggtcagggctcgagcgctaaattttcgatattcaaatttctattcggttttttagtgtaattagtgattttgataaacttctgataataagtaagtgatggcgcaacattctgaatactcattttcggttcgacgacaaaggcccgctaattttacgtttaccaatagttcgagtgaggatcgccaaaagagttataactataaggctagttccgttgaagagcttagcactacaattaaagaaagcccgaagaaatactccatgtatacgttttccagcagaagacaagataatgtgccctcattcgaagaaagaatgaaatttttcaggatggcgagcgaatctcccacggacaataatgcaaatggtaccgagccgccgcttcagacgatcgtaaaaaacccatcaaggacgacagtaaccacaacttcattgcagacgaactctcaatccagtacgacaacgacacgcgttagcaaaacctcgaccagcgcttcaacgaccagccaacggcgccagctcaccgatttaaaagcttccaacatgaagagcgacttagtagactttaaaaacaacataaacgacatgaaaagcagcttacccaacacccttttgcaaataagaaactcgctagaaaatttagtcgacgccgaagaaaatgatcccatcgttacgtttcctgatgataccccagtgccatccgagatcggctcaccaacgaatgcagtggaatcgcttaaatttgaacagaagactacaaataactttaagaagaccacggtaatgaaagatggaatcagtgccgaaaaagaaagtgccaaaatggcggaaatgaaaatacttcaagctggtgacgtttcttacgaagaaaacaacgcagcccgggctactcgagcgagagttgaaatcgatggagtttcggcggagaaaagtcaagtcatggccaaagaagctagatctctcaaagctggagatctcagccaacaggagtccaaaaacctggctcaaacgaatatgaaagttacaacagacaagttcagtagtgaaagaacagccatggaatcccagcaacaaagacagactgttacagctagcggcttttacaatcaagaaaaacacagttctagcacaagtcacatatacacctcttcttcttcaaaaggtcttagcacatcggcaaagatcaatgcaacaagacagtttcacctattaaatggcactcccgaagaagcaatattaaacacgtcattagaagatctcgacagtctctcagctacttccgatgtccacgatatcgaaagagcaaaacacaaatattctacatatttagacgaatccattagatgccttcaaaaactagaccaaaacaaagatgcacccctagtgttagataaaatcaatgacgtcatgcgtaaagcatgggcagtaccgacctatggtcacgaacttggctatgctctatgcaatgcgctacgaaacagtgggggattggacctgataatgcagaactgcacaaaatcggataagagccttcaatttgccagcgctaaattactagagcagtgccttactgcagaaaatagagcacatgtagtagagcacggtctggataaagtcgtaaacgtagcttgtgtctgcacaaagatttcaaattctgtcgaccattcaagggtaggaaccggaatattggagcatttgtttaaacacagtgaagaaacgtgtagcgacgtcgttaggcttggtggtttggatgctttactattcgaatgcagaaaaagtgacgtagaaaccttaaggcactgtgctggagctttagcaaaccttagtttatacggtggtaccgagaatcaagaagctatgataaagcgaaaggttccgatgtggttattccccttagcattccacaccgacgataatattaagtactacgcttgccttgccataaccgtattagtagctaaccccgaaatcgaagctgaagtcttgcaatctggcactcttggtctggtcgaacctttcgtcactacacacaacccttccgaattcgcgaaatcgaatctagctcatgctcacggacaaagcaaaacctggctgaaaaatttagttcctgtcttaagctcaaaacgtgaagaagctagaaacctagccgccttccatttctgcatggaagccggaatcaagaagcagcagggaaacactaacatgttctctgaaatcggtgctatcgaatcactcaaaaaagtagccagttgtcctaatgccgtcgcctcaaaatatgcagctcaagccctaaggctcatcggagaggaagtgcctcataagttaagtcaacaggtgcccttatggtctgtggaggatgtagaggagtgggtgaaacagataggattcccagaagttgccattagtttcgtagaaagcagagttgacggggatttgttattgcagctaacagaagaaaatcttagggatgatattggattaacgaatggtataaaaagaaaaaggtttacacgagaacttcagcaattaaaaaagatggcagactatacgtctagagacacatcaaatatcaacaatttccttcaaacaatgggactcgaattctctatatatacctacagtttcttaaacgctgggcttgacaaaaaggattacctacgaaatatatctgaggaccagttgttaaccgaatgtggaattagtaattctattcaccggctaaggataatggaaggtatcagacaattagaaaacggccttgccaacggtatgaacgaagacaaccaagacaaatccttagatgtattcgtaagttaccgacggtccaacggttcccaactagccagtttactcaaagtccacttgcagctccgaggattcagtgtcttcatcgacgtggagaggctggaagctggaaagtttgataacaatctcctgcagagtattcaaaaagccaaacacttcttgttggtgctgacgccgaacgctctggaaagatgtataggagatattgaaagaaaagactgggtacatcgggaaatatgtgcagctctatcagctaattgtaacatcatccccatcatcgacaacttcatccttccccgaactcgaacagttgccggaagatatgagacaggtctgccacttcaacgcagttcggtggattcacgattatcaggatgcttgtgtggacaaactagaaaggttcatgcgaggagaagcgaatccacgcggggacaattacagagtcactttgcccaaaggcgatataactccaggaacaccttcaaatcccagtttggttaggcagccgcctaactaccaaagaatgcacagcaacgactcaggaagtggtaaaagctccgacaaagacatgaacggcaactcggggttaacgagggattgactagatggtccttatgcctcggctactcctactccactgcctagattctacaaagcaaacagtccgtcccgaaattggataatcaactccaacaacttcaaccggggtctcccgcccgtgccgtactctcggcgaggttccaacacccccgtctcgtcactagctcttaacagttacccccaccctccggcccctaaccgatctcgcagcctcgacggtctcctagactccgccgagcccatcctagcagcagctacagaagcaactaaaaacgatcaagttccgtccccgaaaaaagcgcaaagttgtgatgacattgacaaagacttgaacgacgcatccgcatacgtcgaagagactgacactagtttaagtaatacgaaggaactggattgttcggtagaaagtgatagtactgacaagtgttcgatatacagtaattctagtgattcgaaacgtaagagaaactttatggaccgatgtgtcaataaagtgcgatcttttattaagaaataaactgcatatttataaaaaaactaaactaggtgaagcaaacgataccaattttataggttttagtataattccaaattgacgtgaaaagtagtcacatcaacatataaaactgaatagatttgcagaaaatttcgtaaatacaaagcaatatttcaacacacaacaaaataattgtttacgctaatcttttttaaaactttgaccaagtctgctaatccggttcgaaggccaagtgtgtaaatccggctcgaaggaccatatgttgtttattcttttaaagaattagatgttaaataggtatcgtttggttctcctatactttatttcctgtatcttgatattcaatatttaaatttaaacttcatagatgatattatttattattcttttacggcaactaaattacttagtacaaacattgtgcttttatacaaaatttgtatatatagtaaaaacgtgtgattatcgagcagtcttaatgaattttcttaggtctgtttccgtatgagagagataaaaaaatttctatcgtgcaaaatttattaaaaatgaactcttttttatttgtatagtatatgttggtgctatttacaatttttttaagaaaatatgtggccagatcaacaaattcagtcaaaatggatccaaacttcatacttatttaatattccaacgggatttattcgctataaaaaaaatacaattcaaaatcacagattaacttgaaattttgtactgctatatttgaaaaatgttggctagagtgtaactctgcaatccactgagttgtcaagcttacttatctctgttttaatttagtcacttcaaattttcttccatatatagttttgttaaaagttttttcatttttgcatctttgtcatggtaaattatgtcgtttatactatatcatcatttatatacattaatcattctgaagcatacaaaacgtagacttttaaattctaagtgcctctctccaagtgccttcttgttgtttaatcaagttaaattagtaatcgtgttttcaaagatatgttgtgatatttcctatgtaagagaaacagtttccacttcaccgattttggatatgtttatagaaaatttctttcaatgcacactcacaaaaaaaacttagttgatgtcaggttacgctattaatgtggccagactcaatgacattgtgagaacaccaagaacatctgttcgaagtgacatctaaacaagagatatattttgaagatcgaatttttgaaagggcttttatatttaataattttttctgttactttttatccaatggtttttattgtattcgctactacacttccatcaattcttattttggatcttctgtgaaaaccatagaatatctagactgcgggttgcaatgcaaaactgtttcctcagtgcgacagagaaaagtatttgtaaacagggtatttattttctttctttcttgactggctttacaacttgaggtgagtcttagccgcatccactatggctctccatcttctacttgctgtatccatcatgaccattgcaccaaatggtcttgcacttctatttcccattgctgtaccccaatcctagatagatctgcttcaacctcatccttccatctttttctgggacggcctactaatcttctgccctctgctttctcatagaaaactgtctttaacactctgccttcctctgatcttaccacatgacctgcccatcttaactagttagcttttacatgcctggcgatgttttcagtaccatacagtcaccaattcagcattgcggcgccttctccactcttctgtcaattcatctctttgagggccaatatcattcggagaacctttcttttcaaatacaagcagcttatttctttctcgcttatgtagattccacgtttcacttccatattatgtaacaactgagcgaataattggcatgtacagtcttaatttagattgctttttagcagcttagatcttaataatgatgataggaaaataatgctctattcgcgattaaaactgaatatagagggcaggtcgaatgcatgaaaatggccgatataaatggtataaacaaacattcatttgaggagc

SEQ ID NO: 1469 - DNA, 5922 bp, Diabrotica virgifera
  SmartBlast Evalue=0; Info=Sterile alpha and TIR motif- containing protein 1 (Fragment) n=1 Tax=Harpegnathos saltator RepID=E2B7A2_9HYME
gtcagtgttgaacttaatactgctctgttgtactagcgatttgttgtaaaggtcatcttacatccgaacttaaaacatgtgtctgtgtcttgttacatttttttgcagataagctgtagataaacccatcatttggcagtgattaatcagttgaatataagtgttacttgagcgaacaaggaactcgagtgtgttcaagacttcaagagtctgtgtatttttgttcttgtatctgtgcgggtagtgtttgttgactgctctatatcgaaacaaccttctagtgtttttgagttttattacacggcttgattatatcaacatccatggtttttatatcgagtaatggcagatatgatagattattatctaaaatgatggcgagcgaatctcccacggacaataatgcaaatggtaccgagccgccgcttcagacgatcgtaaaaaacccatcaaggacgacagtaaccacaacttcattacagacgaactcccaatccagtacgacaacgacacgcgttagcaaaacctcgaccagcgcttcaacgaccagccaacggcgccagctcaccgatttaaaagcttccaacatgaagagcgatttagtagactttaaaaacaacataaacgacatgaaaagcagcttacccaacacccttttgcagataagaaactcgctagaaaatttagtcgacgccgaagaaaatgatcccatcgttacgtttcctgatgataccccagtgccatccgagatcggctcaccaacgaatgcagtggaatcgcttaaatttgaacagaagactacaaataactttaagaagaccacggtaatgaaagatggaatcagtgccgaaaaagaaagtgccaaaatggcggaaatgaaaatacttcaagctggtgacgtttcttacgaagaaaacaacgcagcccgggctactcgagcgagagttgaaatcgatggagtttcggcggagaaaagtcaagtcatggccaaagaagctagatctctcaaagctggagatctcagccaacaggagtccaaaaacctggctcaaacgaatatgaaagttacaacagacaagttcagtagtgaaagaacagccatggaatcccagcaacaaagacagactgttacagctagcggcttttacaatcaagaaaaacacagttctagcacaagtcacatatacacctcttcttcttcaaaaggtcttagcacatcggcaaagatcaatgcaacaagacagtttcacctattaaatggcactcccgaagaagcaatattaaacacgtcattagaagatctcgacagtctctcagctacttccgatgtccacgatatcgaaagagcaaaacacaaatattctacatatttagacgaatccattagatgccttcaaaaactagaccaaaacaaagatgcacccctagtgttagataaaatcaatgacgtcatgcgtaaagcatgggcagtaccgacctatggtcacgaacttggctatgctctatgcaatgcgctacgaaacagtgggggattggacctgataatgcagaactgcacaaaatcggataagagccttcaatttgccagcgctaaattactagagcagtgccttactgcagaaaatagagcacatgtagtagagcacggtctggataaagtcgtaaacgtagcttgtgtctgcacaaagatttcaaattctgtcgaccattcaagggtaggaaccggaatattggagcatttgtttaaacacagtgaagaaacgtgtagcgacgtcgttaggcttggtggtttggatgctttactattcgaatgcagaaaaagtgacgtagaaaccttaaggcactgtgctggagctttagcaaaccttagtttatacggtggtaccgagaatcaagaagctatgataaagcgaaaggttccgatgtggttattccccttagcattccacaccgacgataatattaagtactacgcttgccttgccataaccgtattagtagctaaccccgaaatcgaagctgaagtcttgcaatctggcactcttggtctggtcgaacctttcgtcactacacacaacccttccgaattcgcgaaatcgaatctagctcatgctcacggacaaagcaaaacctggctgaaaaatttagttcctgtcttaagctcaaaacgtgaagaagctagaaacctagccgccttccatttctgcatggaagccggaataaagaagcagcagggaaacactaacatgttctctgaaatcggtgctatcgaatcactaaaaaaagtagctagttgtcctaatgccgtcgcctcaaaatatgcagctcaagccttaaggcttatcggagaggaagtgccacataagttaagtcaacaggtgcccttatggtctgtggaggatgtagaggagtgggtgaaacagataggattcccagaagttgccattagtttcgtagaaagcagggttgatggggatttgttattgcagctaacagaagaaaatcttagggatgatattggattaacgaatggtataaaaagaaaaaggtttacacgagaacttcagcaattaaaaaagatggcagactatacgtctagagacacatcaaatatcaacaatttccttcaaacaatgggactcgaattctctatatatacctacagtttcttaaacgctgggcttgacaaaaaggattacctacgaaatatatctgaggaccagttgttaaccgaatgtggaattagtaattctattcaccggctaaggataatggaaggtatcagacaattagaaaacggccttgccaacggtatgaacgaagacaaccaagacaaatccttagatgtattcgtaagttaccgacggtccaacggttcccaactagccagtttactcaaagtccacttgcagctccgaggattcagtgtcttcatcgacgtggagaggctggaagctggaaagtttgataacaatctcctgcagagtattcaaaaagccaaacacttcttgttggtgctgacgccgaacgctctggaaagatgtataggagatattgaaagaaaagactgggtacatcgggaaatatgtgcagctctatcagctaattgtaacatcatccccatcatcgacaacttcatccttccccgaactcgaacagttgccggaagatatgagacaggtctgccacttcaacgcagttcggtggattcacgattatcaggatgcttgtgtggacaaactagaaaggttcatgcgaggagaagcgaatccacgcggggacaattacagagtcactttgcccaaaggcgatataactccaggaacaccttcaaatcccagtttggttaggcagccgcctaactaccaaagaatgcacagcaacgactcaggaagtggtaaaagctccgacaaagacatgaacggcaactcggggttaacgagggattgactagatggtccttatgcctcggctactcctactccactgcctagattctacaaagcaaacagtccgtcccgaaattggataatcaactccaacaacttcaaccggggtctcccgcccgtgccgtactctcggcgaggttccaacacccccgtctcgtcactagctcttaacagttacccccaccctccggcccctaaccgatctcgcagcctcgacggtctcctagactccgccgagcccatcctagcagcagctacagaagcaactaaaaacgatcaagttccgtccccgaaaaaagcgcaaagttgtgatgacattgacaaagacttgaacgacgcatccgcatacgtcgaagagactgacactagtttaagtaatacgaaggaactggattgttcggtagaaagtgatagtactgacaagtgttcgatatacagtaattctagtgattcgaaacgtaagagaaactttatggaccgatgtgtcaataaagtgcgatcttttattaagaaataaactgcatatttataaaaaaactaaactaggtgaagcaaacgataccaattttataggttttagtataattccaaattgacgtgaaaagtagtcacatcaacatataaaactgaatagatttgcagaaaatttcgtaaatacaaagcaatatttcaacacacaacaaaataattgtttacgctaatcttttttaaaactttgaccaagtctgctaatccggttcgaaggccaagtgtgtaaatccggctcgaaggaccatatgttgtttattcttttaaagaattagatgttaaataggtatcgtttggttctcctatactttatttcctgtatcttgatattcaatatttaaatttaaacttcatagatgatattatttattattcttttacggcaactaaattacttagtacaaacattgtgcttttatacaaaatttgtatatatagtaaaaacgtgtgattatcgagcagtcttaatgaattttcttaggtctgtttccgtatgagagagataaaaaaatttctatcgtgcaaaatttattaaaaatgaactcttttttatttgtatagtatatgttggtgctatttacaatttttttaagaaaatatgtggccagatcaacaaattcagtcaaaatggatccaaacttcatacttatttaatattccaacgggatttattcgctataaaaaaaatacaattcaaaatcacagattaacttgaaattttgtactgctatatttgaaaaatgttggctagagtgtaactctgcaatccactgagttgtcaagcttacttatctctgttttaatttagtcacttcaaattttcttccatatatagttttgttaaaagttttttcatttttgcatctttgtcatggtaaattatgtcgtttatactatatcatcatttatatacattaatcattctgaagcatacaaaacgtagacttttaaattctaagtgcctctctccaagtgccttcttgttgtttaatcaagttaaattagtaatcgtgttttcaaagatatgttgtgatatttcctatgtaagagaaacagtttccacttcaccgattttggatatgtttatagaaaatttctttcaatgcacactcacaaaaaaaacttagttgatgtcaggttacgctattaatgtggccagactcaatgacattgtgagaacaccaagaacatctgttcgaagtgacatctaaacaagagatatattttgaagatcgaatttttgaaagggcttttatatttaataattttttctgttactttttatccaatggtttttattgtattcgctactacacttccatcaattcttattttggatcttctgtgaaaaccatagaatatctagactgcgggttgcaatgcaaaactgtttcctcagtgcgacagagaaaagtatttgtaaacagggtatttattttctttctttcttgactggctttacaacttgaggtgagtcttagccgcatccactatggctctccatcttctacttgctgtatccatcatgaccattgcaccaaatggtcttgcacttctatttcccattgctgtaccccaatcctagatagatctgcttcaacctcatccttccatctttttctgggacggcctactaatcttctgccctctgctttctcatagaaaactgtctttaacactctgccttcctctgatcttaccacatgacctgcccatcttaactagttagcttttacatgcctggcgatgttttcagtaccatacagtcaccaattcagcattgcggcgccttctccactcttctgtcaattcatctctttgagggccaaacatcattcttagaactttccgttccaataccagcagcttatttatttcccgctaatgtagagtctatgtttcacttccatatgtaacaactgtgcgaagaattattgacaggtac

SEQ ID NO: 1470 - DNA, 5922 bp, Diabrotica virgifera
  SmartBlast Evalue=0; Info=Sterile alpha and TIR motif- containing protein 1 (Fragment) n=1 Tax=Harpegnathos saltator RepID=E2B7A2_9HYME
gtcagtgttgaacttaatactgctctgttgtactagcgatttgttgtaaaggtcatcttacatccgaacttaaaacatgtgtctgtgtcttgttacatttttttgcagataagctgtagataaacccatcatttggcagtgattaatcagttgaatataagtgttacttgagcgaacaaggaactcgagtgtgttcaagacttcaagagtctgtgtatttttgttcttgtatctgtgcgggtagtgtttgttgactgctctatatcgaaacaaccttctagtgtttttgagttttattacacggcttgattatatcaacatccatggtttttatatcgagtaatggcagatatgatagattattatctaaaatgatggcgagcgaatctcccacggacaataatgcaaatggtaccgagccgccgcttcagacgatcgtaaaaaacccatcaaggacgacagtaaccacaacttcattacagacgaactcccaatccagtacgacaacgacacgcgttagcaaaacctcgaccagcgcttcaacgaccagccaacggcgccagctcaccgatttaaaagcttccaacatgaagagcgatttagtagactttaaaaacaacataaacgacatgaaaagcagcttacccaacacccttttgcagataagaaactcgctagaaaatttagtcgacgccgaagaaaatgatcccatcgttacgtttcctgatgataccccagtgccatccgagatcggctcaccaacgaatgcagtggaatcgcttaaatttgaacagaagactacaaataactttaagaagaccacggtaatgaaagatggaatcagtgccgaaaaagaaagtgccaaaatggcggaaatgaaaatacttcaagctggtgacgtttcttacgaagaaaacaacgcagcccgggctactcgagcgagagttgaaatcgatggagtttcggcggagaaaagtcaagtcatggccaaagaagctagatctctcaaagctggagatctcagccaacaggagtccaaaaacctggctcaaacgaatatgaaagttacaacagacaagttcagtagtgaaagaacagccatggaatcccagcaacaaagacagactgttacagctagcggcttttacaatcaagaaaaacacagttctagcacaagtcacatatacacctcttcttcttcaaaaggtcttagcacatcggcaaagatcaatgcaacaagacagtttcacctattaaatggcactcccgaagaagcaatattaaacacgtcattagaagatctcgacagtctctcagctacttccgatgtccacgatatcgaaagagcaaaacacaaatattctacatatttagacgaatccattagatgccttcaaaaactagaccaaaacaaagatgcacccctagtgttagataaaatcaatgacgtcatgcgtaaagcatgggcagtaccgacctatggtcacgaacttggctatgctctatgcaatgcgctacgaaacagtgggggattggacctgataatgcagaactgcacaaaatcggataagagccttcaatttgccagcgctaaattactagagcagtgccttactgcagaaaatagagcacatgtagtagagcacggtctggataaagtcgtaaacgtagcttgtgtctgcacaaagatttcaaattctgtcgaccattcaagggtaggaaccggaatattggagcatttgtttaaacacagtgaagaaacgtgtagcgacgtcgttaggcttggtggtttggatgctttactattcgaatgcagaaaaagtgacgtagaaaccttaaggcactgtgctggagctttagcaaaccttagtttatacggtggtaccgagaatcaagaagctatgataaagcgaaaggttccgatgtggttattccccttagcattccacaccgacgataatattaagtactacgcttgccttgccataaccgtattagtagctaaccccgaaatcgaagctgaagtcttgcaatctggcactcttggtctggtcgaacctttcgtcactacacacaacccttccgaattcgcgaaatcgaatctagctcatgctcacggacaaagcaaaacctggctgaaaaatttagttcctgtcttaagctcaaaacgtgaagaagctagaaacctagccgccttccatttctgcatggaagccggaatcaagaagcagcagggaaacactaacatgttctctgaaatcggtgctatcgaatcactcaaaaaagtagccagttgtcctaatgccgtcgcctcaaaatatgcagctcaagccctaaggctcatcggagaggaagtgcctcataagttaagtcaacaggtgcccttatggtctgtggaggatgtagaggagtgggtgaaacagataggattcccagaagttgccattagtttcgtagaaagcagagttgacggggatttgttattgcagctaacagaagaaaatcttagggatgatattggattaacgaatggtataaaaagaaaaaggtttacacgagaacttcagcaattaaaaaagatggcagactatacgtctagagacacatcaaatatcaacaatttccttcaaacaatgggactcgaattctctatatatacctacagtttcttaaacgctgggcttgacaaaaaggattacctacgaaatatatctgaggaccagttgttaaccgaatgtggaattagtaattctattcaccggctaaggataatggaaggtatcagacaattagaaaacggccttgccaacggtatgaacgaagacaaccaagacaaatccttagatgtattcgtaagttaccgacggtccaacggttcccaactagccagtttactcaaagtccacttgcagctccgaggattcagtgtcttcatcgacgtggagaggctggaagctggaaagtttgataacaatctcctgcagagtattcaaaaagccaaacacttcttgttggtgctgacgccgaacgctctggaaagatgtataggagatattgaaagaaaagactgggtacatcgggaaatatgtgcagctctatcagctaattgtaacatcatccccatcatcgacaacttcatccttccccgaactcgaacagttgccggaagatatgagacaggtctgccacttcaacgcagttcggtggattcacgattatcaggatgcttgtgtggacaaactagaaaggttcatgcgaggagaagcgaatccacgcggggacaattacagagtcactttgcccaaaggcgatataactccaggaacaccttcaaatcccagtttggttaggcagccgcctaactaccaaagaatgcacagcaacgactcaggaagtggtaaaagctccgacaaagacatgaacggcaactcggggttaacgagggattgactagatggtccttatgcctcggctactcctactccactgcctagattctacaaagcaaacagtccgtcccgaaattggataatcaactccaacaacttcaaccggggtctcccgcccgtgccgtactctcggcgaggttccaacacccccgtctcgtcactagctcttaacagttacccccaccctccggcccctaaccgatctcgcagcctcgacggtctcctagactccgccgagcccatcctagcagcagctacagaagcaactaaaaacgatcaagttccgtccccgaaaaaagcgcaaagttgtgatgacattgacaaagacttgaacgacgcatccgcatacgtcgaagagactgacactagtttaagtaatacgaaggaactggattgttcggtagaaagtgatagtactgacaagtgttcgatatacagtaattctagtgattcgaaacgtaagagaaactttatggaccgatgtgtcaataaagtgcgatcttttattaagaaataaactgcatatttataaaaaaactaaactaggtgaagcaaacgataccaattttataggttttagtataattccaaattgacgtgaaaagtagtcacatcaacatataaaactgaatagatttgcagaaaatttcgtaaatacaaagcaatatttcaacacacaacaaaataattgtttacgctaatcttttttaaaactttgaccaagtctgctaatccggttcgaaggccaagtgtgtaaatccggctcgaaggaccatatgttgtttattcttttaaagaattagatgttaaataggtatcgtttggttctcctatactttatttcctgtatcttgatattcaatatttaaatttaaacttcatagatgatattatttattattcttttacggcaactaaattacttagtacaaacattgtgcttttatacaaaatttgtatatatagtaaaaacgtgtgattatcgagcagtcttaatgaattttcttaggtctgtttccgtatgagagagataaaaaaatttctatcgtgcaaaatttattaaaaatgaactcttttttatttgtatagtatatgttggtgctatttacaatttttttaagaaaatatgtggccagatcaacaaattcagtcaaaatggatccaaacttcatacttatttaatattccaacgggatttattcgctataaaaaaaatacaattcaaaatcacagattaacttgaaattttgtactgctatatttgaaaaatgttggctagagtgtaactctgcaatccactgagttgtcaagcttacttatctctgttttaatttagtcacttcaaattttcttccatatatagttttgttaaaagttttttcatttttgcatctttgtcatggtaaattatgtcgtttatactatatcatcatttatatacattaatcattctgaagcatacaaaacgtagacttttaaattctaagtgcctctctccaagtgccttcttgttgtttaatcaagttaaattagtaatcgtgttttcaaagatatgttgtgatatttcctatgtaagagaaacagtttccacttcaccgattttggatatgtttatagaaaatttctttcaatgcacactcacaaaaaaaacttagttgatgtcaggttacgctattaatgtggccagactcaatgacattgtgagaacaccaagaacatctgttcgaagtgacatctaaacaagagatatattttgaagatcgaatttttgaaagggcttttatatttaataattttttctgttactttttatccaatggtttttattgtattcgctactacacttccatcaattcttattttggatcttctgtgaaaaccatagaatatctagactgcgggttgcaatgcaaaactgtttcctcagtgcgacagagaaaagtatttgtaaacagggtatttattttctttctttcttgactggctttacaacttgaggtgagtcttagccgcatccactatggctctccatcttctacttgctgtatccatcatgaccattgcaccaaatggtcttgcacttctatttcccattgctgtaccccaatcctagatagatctgcttcaacctcatccttccatctttttctgggacggcctactaatcttctgccctctgctttctcatagaaaactgtctttaacactctgccttcctctgatcttaccacatgacctgcccatcttaactagttagcttttacatgcctggcgatgttttcagtaccatacagtcaccaattcagcattgcggcgccttctccactcttctgtcaattcatctctttgagggccaaacatcattcttagaactttccgttccaataccagcagcttatttatttcccgctaatgtagagtctatgtttcacttccatatgtaacaactgtgcgaagaattattgacaggtac

SEQ ID NO: 1471 - DNA, 5886 bp, Diabrotica virgifera
  SmartBlast Evalue=0; Info=Sterile alpha and TIR motif- containing protein 1 (Fragment) n=1 Tax=Harpegnathos saltator RepID=E2B7A2_9HYME
gtgagttggtcagggctcgagcgctaaattttcgatattcaaatttctattcggttttttagtgtaattagtgattttgataaacttctgataataagtaagtgatggcgcaacattctgaatactcattttcggttcgacgacaaaggcccgctaattttacgtttaccaatagttcgagtgaggatcgccaaaagagttataactataaggctagttccgttgaagagcttagcactacaattaaagaaagcccgaagaaatactccatgtatacgttttccagcagaagacaagataatgtgccctcattcgaagaaagaatgaaatttttcaggatggcgagcgaatctcccacggacaataatgcaaatggtaccgagccgccgcttcagacgatcgtaaaaaacccatcaaggacgacagtaaccacaacttcattgcagacgaactctcaatccagtacgacaacgacacgcgttagcaaaacctcgaccagcgcttcaacgaccagccaacggcgccagctcaccgatttaaaagcttccaacatgaagagcgacttagtagactttaaaaacaacataaacgacatgaaaagcagcttacccaacacccttttgcaaataagaaactcgctagaaaatttagtcgacgccgaagaaaatgatcccatcgttacgtttcctgatgataccccagtgccatccgagatcggctcaccaacgaatgcagtggaatcgcttaaatttgaacagaagactacaaataactttaagaagaccacggtaatgaaagatggaatcagtgccgaaaaagaaagtgccaaaatggcggaaatgaaaatacttcaagctggtgacgtttcttacgaagaaaacaacgcagcccgggctactcgagcgagagttgaaatcgatggagtttcggcggagaaaagtcaagtcatggccaaagaagctagatctctcaaagctggagatctcagccaacaggagtccaaaaacctggctcaaacgaatatgaaagttacaacagacaagttcagtagtgaaagaacagccatggaatcccagcaacaaagacagactgttacagctagcggcttttacaatcaagaaaaacacagttctagcacaagtcacatatacacctcttcttcttcaaaaggtcttagcacatcggcaaagatcaatgcaacaagacagtttcacctattaaatggcactcccgaagaagcaatattaaacacgtcattagaagatctcgacagtctctcagctacttccgatgtccacgatatcgaaagagcaaaacacaaatattctacatatttagacgaatccattagatgccttcaaaaactagaccaaaacaaagatgcacccctagtgttagataaaatcaatgacgtcatgcgtaaagcatgggcagtaccgacctatggtcacgaacttggctatgctctatgcaatgcgctacgaaacagtgggggattggacctgataatgcagaactgcacaaaatcggataagagccttcaatttgccagcgctaaattactagagcagtgccttactgcagaaaatagagcacatgtagtagagcacggtctggataaagtcgtaaacgtagcttgtgtctgcacaaagatttcaaattctgtcgaccattcaagggtaggaaccggaatattggagcatttgtttaaacacagtgaagaaacgtgtagcgacgtcgttaggcttggtggtttggatgctttactattcgaatgcagaaaaagtgacgtagaaaccttaaggcactgtgctggagctttagcaaaccttagtttatacggtggtaccgagaatcaagaagctatgataaagcgaaaggttccgatgtggttattccccttagcattccacaccgacgataatattaagtactacgcttgccttgccataaccgtattagtagctaaccccgaaatcgaagctgaagtcttgcaatctggcactcttggtctggtcgaacctttcgtcactacacacaacccttccgaattcgcgaaatcgaatctagctcatgctcacggacaaagcaaaacctggctgaaaaatttagttcctgtcttaagctcaaaacgtgaagaagctagaaacctagccgccttccatttctgcatggaagccggaataaagaagcagcagggaaacactaacatgttctctgaaatcggtgctatcgaatcactaaaaaaagtagctagttgtcctaatgccgtcgcctcaaaatatgcagctcaagccttaaggcttatcggagaggaagtgccacataagttaagtcaacaggtgcccttatggtctgtggaggatgtagaggagtgggtgaaacagataggattcccagaagttgccattagtttcgtagaaagcagggttgatggggatttgttattgcagctaacagaagaaaatcttagggatgatattggattaacgaatggtataaaaagaaaaaggtttacacgagaacttcagcaattaaaaaagatggcagactatacgtctagagacacatcaaatatcaacaatttccttcaaacaatgggactcgaattctctatatatacctacagtttcttaaacgctgggcttgacaaaaaggattacctacgaaatatatctgaggaccagttgttaaccgaatgtggaattagtaattctattcaccggctaaggataatggaaggtatcagacaattagaaaacggccttgccaacggtatgaacgaagacaaccaagacaaatccttagatgtattcgtaagttaccgacggtccaacggttcccaactagccagtttactcaaagtccacttgcagctccgaggattcagtgtcttcatcgacgtggagaggctggaagctggaaagtttgataacaatctcctgcagagtattcaaaaagccaaacacttcttgttggtgctgacgccgaacgctctggaaagatgtataggagatattgaaagaaaagactgggtacatcgggaaatatgtgcagctctatcagctaattgtaacatcatccccatcatcgacaacttcatccttccccgaactcgaacagttgccggaagatatgagacaggtctgccacttcaacgcagttcggtggattcacgattatcaggatgcttgtgtggacaaactagaaaggttcatgcgaggagaagcgaatccacgcggggacaattacagagtcactttgcccaaaggcgatataactccaggaacaccttcaaatcccagtttggttaggcagccgcctaactaccaaagaatgcacagcaacgactcaggaagtggtaaaagctccgacaaagacatgaacggcaactcggggttaacgagggattgactagatggtccttatgcctcggctactcctactccactgcctagattctacaaagcaaacagtccgtcccgaaattggataatcaactccaacaacttcaaccggggtctcccgcccgtgccgtactctcggcgaggttccaacacccccgtctcgtcactagctcttaacagttacccccaccctccggcccctaaccgatctcgcagcctcgacggtctcctagactccgccgagcccatcctagcagcagctacagaagcaactaaaaacgatcaagttccgtccccgaaaaaagcgcaaagttgtgatgacattgacaaagacttgaacgacgcatccgcatacgtcgaagagactgacactagtttaagtaatacgaaggaactggattgttcggtagaaagtgatagtactgacaagtgttcgatatacagtaattctagtgattcgaaacgtaagagaaactttatggaccgatgtgtcaataaagtgcgatcttttattaagaaataaactgcatatttataaaaaaactaaactaggtgaagcaaacgataccaattttataggttttagtataattccaaattgacgtgaaaagtagtcacatcaacatataaaactgaatagatttgcagaaaatttcgtaaatacaaagcaatatttcaacacacaacaaaataattgtttacgctaatcttttttaaaactttgaccaagtctgctaatccggttcgaaggccaagtgtgtaaatccggctcgaaggaccatatgttgtttattcttttaaagaattagatgttaaataggtatcgtttggttctcctatactttatttcctgtatcttgatattcaatatttaaatttaaacttcatagatgatattatttattattcttttacggcaactaaattacttagtacaaacattgtgcttttatacaaaatttgtatatatagtaaaaacgtgtgattatcgagcagtcttaatgaattttcttaggtctgtttccgtatgagagagataaaaaaatttctatcgtgcaaaatttattaaaaatgaactcttttttatttgtatagtatatgttggtgctatttacaatttttttaagaaaatatgtggccagatcaacaaattcagtcaaaatggatccaaacttcatacttatttaatattccaacgggatttattcgctataaaaaaaatacaattcaaaatcacagattaacttgaaattttgtactgctatatttgaaaaatgttggctagagtgtaactctgcaatccactgagttgtcaagcttacttatctctgttttaatttagtcacttcaaattttcttccatatatagttttgttaaaagttttttcatttttgcatctttgtcatggtaaattatgtcgtttatactatatcatcatttatatacattaatcattctgaagcatacaaaacgtagacttttaaattctaagtgcctctctccaagtgccttcttgttgtttaatcaagttaaattagtaatcgtgttttcaaagatatgttgtgatatttcctatgtaagagaaacagtttccacttcaccgattttggatatgtttatagaaaatttctttcaatgcacactcacaaaaaaaacttagttgatgtcaggttacgctattaatgtggccagactcaatgacattgtgagaacaccaagaacatctgttcgaagtgacatctaaacaagagatatattttgaagatcgaatttttgaaagggcttttatatttaataattttttctgttactttttatccaatggtttttattgtattcgctactacacttccatcaattcttattttggatcttctgtgaaaaccatagaatatctagactgcgggttgcaatgcaaaactgtttcctcagtgcgacagagaaaagtatttgtaaacagggtatttattttctttctttcttgactggctttacaacttgaggtgagtcttagccgcatccactatggctctccatcttctacttgctgtatccatcatgaccattgcaccaaatggtcttgcacttctatttcccattgctgtaccccaatcctagatagatctgcttcaacctcatccttccatctttttctgggacggcctactaatcttctgccctctgctttctcatagaaaactgtctttaacactctgccttcctctgatcttaccacatgacctgcccatcttaactagttagcttttacatgcctggcgatgttttcagtaccatacagtcaccaattcagcattgcggcgccttctccactcttctgtcaattcatctctttgagggccaaacatcattcttagaactttccgttccaataccagcagcttatttatttcccgctaatgtagagtctatgtttcacttccatatgtaacaactgtgcgaagaattattgacaggtac

SEQ ID NO: 1472 - DNA, 5886 bp, Diabrotica virgifera
  SmartBlast Evalue=0; Info=Sterile alpha and TIR motif- containing protein 1 (Fragment) n=1 Tax=Harpegnathos saltator RepID=E2B7A2_9HYME
gtgagttggtcagggctcgagcgctaaattttcgatattcaaatttctattcggttttttagtgtaattagtgattttgataaacttctgataataagtaagtgatggcgcaacattctgaatactcattttcggttcgacgacaaaggcccgctaattttacgtttaccaatagttcgagtgaggatcgccaaaagagttataactataaggctagttccgttgaagagcttagcactacaattaaagaaagcccgaagaaatactccatgtatacgttttccagcagaagacaagataatgtgccctcattcgaagaaagaatgaaatttttcaggatggcgagcgaatctcccacggacaataatgcaaatggtaccgagccgccgcttcagacgatcgtaaaaaacccatcaaggacgacagtaaccacaacttcattgcagacgaactctcaatccagtacgacaacgacacgcgttagcaaaacctcgaccagcgcttcaacgaccagccaacggcgccagctcaccgatttaaaagcttccaacatgaagagcgacttagtagactttaaaaacaacataaacgacatgaaaagcagcttacccaacacccttttgcaaataagaaactcgctagaaaatttagtcgacgccgaagaaaatgatcccatcgttacgtttcctgatgataccccagtgccatccgagatcggctcaccaacgaatgcagtggaatcgcttaaatttgaacagaagactacaaataactttaagaagaccacggtaatgaaagatggaatcagtgccgaaaaagaaagtgccaaaatggcggaaatgaaaatacttcaagctggtgacgtttcttacgaagaaaacaacgcagcccgggctactcgagcgagagttgaaatcgatggagtttcggcggagaaaagtcaagtcatggccaaagaagctagatctctcaaagctggagatctcagccaacaggagtccaaaaacctggctcaaacgaatatgaaagttacaacagacaagttcagtagtgaaagaacagccatggaatcccagcaacaaagacagactgttacagctagcggcttttacaatcaagaaaaacacagttctagcacaagtcacatatacacctcttcttcttcaaaaggtcttagcacatcggcaaagatcaatgcaacaagacagtttcacctattaaatggcactcccgaagaagcaatattaaacacgtcattagaagatctcgacagtctctcagctacttccgatgtccacgatatcgaaagagcaaaacacaaatattctacatatttagacgaatccattagatgccttcaaaaactagaccaaaacaaagatgcacccctagtgttagataaaatcaatgacgtcatgcgtaaagcatgggcagtaccgacctatggtcacgaacttggctatgctctatgcaatgcgctacgaaacagtgggggattggacctgataatgcagaactgcacaaaatcggataagagccttcaatttgccagcgctaaattactagagcagtgccttactgcagaaaatagagcacatgtagtagagcacggtctggataaagtcgtaaacgtagcttgtgtctgcacaaagatttcaaattctgtcgaccattcaagggtaggaaccggaatattggagcatttgtttaaacacagtgaagaaacgtgtagcgacgtcgttaggcttggtggtttggatgctttactattcgaatgcagaaaaagtgacgtagaaaccttaaggcactgtgctggagctttagcaaaccttagtttatacggtggtaccgagaatcaagaagctatgataaagcgaaaggttccgatgtggttattccccttagcattccacaccgacgataatattaagtactacgcttgccttgccataaccgtattagtagctaaccccgaaatcgaagctgaagtcttgcaatctggcactcttggtctggtcgaacctttcgtcactacacacaacccttccgaattcgcgaaatcgaatctagctcatgctcacggacaaagcaaaacctggctgaaaaatttagttcctgtcttaagctcaaaacgtgaagaagctagaaacctagccgccttccatttctgcatggaagccggaatcaagaagcagcagggaaacactaacatgttctctgaaatcggtgctatcgaatcactcaaaaaagtagccagttgtcctaatgccgtcgcctcaaaatatgcagctcaagccctaaggctcatcggagaggaagtgcctcataagttaagtcaacaggtgcccttatggtctgtggaggatgtagaggagtgggtgaaacagataggattcccagaagttgccattagtttcgtagaaagcagagttgacggggatttgttattgcagctaacagaagaaaatcttagggatgatattggattaacgaatggtataaaaagaaaaaggtttacacgagaacttcagcaattaaaaaagatggcagactatacgtctagagacacatcaaatatcaacaatttccttcaaacaatgggactcgaattctctatatatacctacagtttcttaaacgctgggcttgacaaaaaggattacctacgaaatatatctgaggaccagttgttaaccgaatgtggaattagtaattctattcaccggctaaggataatggaaggtatcagacaattagaaaacggccttgccaacggtatgaacgaagacaaccaagacaaatccttagatgtattcgtaagttaccgacggtccaacggttcccaactagccagtttactcaaagtccacttgcagctccgaggattcagtgtcttcatcgacgtggagaggctggaagctggaaagtttgataacaatctcctgcagagtattcaaaaagccaaacacttcttgttggtgctgacgccgaacgctctggaaagatgtataggagatattgaaagaaaagactgggtacatcgggaaatatgtgcagctctatcagctaattgtaacatcatccccatcatcgacaacttcatccttccccgaactcgaacagttgccggaagatatgagacaggtctgccacttcaacgcagttcggtggattcacgattatcaggatgcttgtgtggacaaactagaaaggttcatgcgaggagaagcgaatccacgcggggacaattacagagtcactttgcccaaaggcgatataactccaggaacaccttcaaatcccagtttggttaggcagccgcctaactaccaaagaatgcacagcaacgactcaggaagtggtaaaagctccgacaaagacatgaacggcaactcggggttaacgagggattgactagatggtccttatgcctcggctactcctactccactgcctagattctacaaagcaaacagtccgtcccgaaattggataatcaactccaacaacttcaaccggggtctcccgcccgtgccgtactctcggcgaggttccaacacccccgtctcgtcactagctcttaacagttacccccaccctccggcccctaaccgatctcgcagcctcgacggtctcctagactccgccgagcccatcctagcagcagctacagaagcaactaaaaacgatcaagttccgtccccgaaaaaagcgcaaagttgtgatgacattgacaaagacttgaacgacgcatccgcatacgtcgaagagactgacactagtttaagtaatacgaaggaactggattgttcggtagaaagtgatagtactgacaagtgttcgatatacagtaattctagtgattcgaaacgtaagagaaactttatggaccgatgtgtcaataaagtgcgatcttttattaagaaataaactgcatatttataaaaaaactaaactaggtgaagcaaacgataccaattttataggttttagtataattccaaattgacgtgaaaagtagtcacatcaacatataaaactgaatagatttgcagaaaatttcgtaaatacaaagcaatatttcaacacacaacaaaataattgtttacgctaatcttttttaaaactttgaccaagtctgctaatccggttcgaaggccaagtgtgtaaatccggctcgaaggaccatatgttgtttattcttttaaagaattagatgttaaataggtatcgtttggttctcctatactttatttcctgtatcttgatattcaatatttaaatttaaacttcatagatgatattatttattattcttttacggcaactaaattacttagtacaaacattgtgcttttatacaaaatttgtatatatagtaaaaacgtgtgattatcgagcagtcttaatgaattttcttaggtctgtttccgtatgagagagataaaaaaatttctatcgtgcaaaatttattaaaaatgaactcttttttatttgtatagtatatgttggtgctatttacaatttttttaagaaaatatgtggccagatcaacaaattcagtcaaaatggatccaaacttcatacttatttaatattccaacgggatttattcgctataaaaaaaatacaattcaaaatcacagattaacttgaaattttgtactgctatatttgaaaaatgttggctagagtgtaactctgcaatccactgagttgtcaagcttacttatctctgttttaatttagtcacttcaaattttcttccatatatagttttgttaaaagttttttcatttttgcatctttgtcatggtaaattatgtcgtttatactatatcatcatttatatacattaatcattctgaagcatacaaaacgtagacttttaaattctaagtgcctctctccaagtgccttcttgttgtttaatcaagttaaattagtaatcgtgttttcaaagatatgttgtgatatttcctatgtaagagaaacagtttccacttcaccgattttggatatgtttatagaaaatttctttcaatgcacactcacaaaaaaaacttagttgatgtcaggttacgctattaatgtggccagactcaatgacattgtgagaacaccaagaacatctgttcgaagtgacatctaaacaagagatatattttgaagatcgaatttttgaaagggcttttatatttaataattttttctgttactttttatccaatggtttttattgtattcgctactacacttccatcaattcttattttggatcttctgtgaaaaccatagaatatctagactgcgggttgcaatgcaaaactgtttcctcagtgcgacagagaaaagtatttgtaaacagggtatttattttctttctttcttgactggctttacaacttgaggtgagtcttagccgcatccactatggctctccatcttctacttgctgtatccatcatgaccattgcaccaaatggtcttgcacttctatttcccattgctgtaccccaatcctagatagatctgcttcaacctcatccttccatctttttctgggacggcctactaatcttctgccctctgctttctcatagaaaactgtctttaacactctgccttcctctgatcttaccacatgacctgcccatcttaactagttagcttttacatgcctggcgatgttttcagtaccatacagtcaccaattcagcattgcggcgccttctccactcttctgtcaattcatctctttgagggccaaacatcattcttagaactttccgttccaataccagcagcttatttatttcccgctaatgtagagtctatgtttcacttccatatgtaacaactgtgcgaagaattattgacaggtac

SEQ ID NO: 1473 - DNA, 5807 bp, Diabrotica virgifera
  SmartBlast Evalue=0; Info=Sterile alpha and TIR motif- containing protein 1 (Fragment) n=1 Tax=Harpegnathos saltator RepID=E2B7A2_9HYME
gttgtgaagtgatcgtgtacttgcctggttaattttttaaagagtaaaagtggtttggtattatttgactaatatgccaattaataaaagaatgagaatgaatgatggcgagcgaatctcccacggacaataatgcaaatggtaccgagccgccgcttcagacgatcgtaaaaaacccatcaaggacgacagtaaccacaacttcattgcagacgaactctcaatccagtacgacaacgacacgcgttagcaaaacctcgaccagcgcttcaacgaccagccaacggcgccagctcaccgatttaaaagcttccaacatgaagagcgacttagtagactttaaaaacaacataaacgacatgaaaagcagcttacccaacacccttttgcaaataagaaactcgctagaaaatttagtcgacgccgaagaaaatgatcccatcgttacgtttcctgatgataccccagtgccatccgagatcggctcaccaacgaatgcagtggaatcgcttaaatttgaacagaagactacaaataactttaagaagaccacggtaatgaaagatggaatcagtgccgaaaaagaaagtgccaaaatggcggaaatgaaaatacttcaagctggtgacgtttcttacgaagaaaacaacgcagcccgggctactcgagcgagagttgaaatcgatggagtttcggcggagaaaagtcaagtcatggccaaagaagctagatctctcaaagctggagatctcagccaacaggagtccaaaaacctggctcaaacgaatatgaaagttacaacagacaagttcagtagtgaaagaacagccatggaatcccagcaacaaagacagactgttacagctagcggcttttacaatcaagaaaaacacagttctagcacaagtcacatatacacctcttcttcttcaaaaggtcttagcacatcggcaaagatcaatgcaacaagacagtttcacctattaaatggcactcccgaagaagcaatattaaacacgtcattagaagatctcgacagtctctcagctacttccgatgtccacgatatcgaaagagcaaaacacaaatattctacatatttagacgaatccattagatgccttcaaaaactagaccaaaacaaagatgcacccctagtgttagataaaatcaatgacgtcatgcgtaaagcatgggcagtaccgacctatggtcacgaacttggctatgctctatgcaatgcgctacgaaacagtgggggattggacctgataatgcagaactgcacaaaatcggataagagccttcaatttgccagcgctaaattactagagcagtgccttactgcagaaaatagagcacatgtagtagagcacggtctggataaagtcgtaaacgtagcttgtgtctgcacaaagatttcaaattctgtcgaccattcaagggtaggaaccggaatattggagcatttgtttaaacacagtgaagaaacgtgtagcgacgtcgttaggcttggtggtttggatgctttactattcgaatgcagaaaaagtgacgtagaaaccttaaggcactgtgctggagctttagcaaaccttagtttatacggtggtaccgagaatcaagaagctatgataaagcgaaaggttccgatgtggttattccccttagcattccacaccgacgataatattaagtactacgcttgccttgccataaccgtattagtagctaaccccgaaatcgaagctgaagtcttgcaatctggcactcttggtctggtcgaacctttcgtcactacacacaacccttccgaattcgcgaaatcgaatctagctcatgctcacggacaaagcaaaacctggctgaaaaatttagttcctgtcttaagctcaaaacgtgaagaagctagaaacctagccgccttccatttctgcatggaagccggaataaagaagcagcagggaaacactaacatgttctctgaaatcggtgctatcgaatcactaaaaaaagtagctagttgtcctaatgccgtcgcctcaaaatatgcagctcaagccttaaggcttatcggagaggaagtgccacataagttaagtcaacaggtgcccttatggtctgtggaggatgtagaggagtgggtgaaacagataggattcccagaagttgccattagtttcgtagaaagcagggttgatggggatttgttattgcagctaacagaagaaaatcttagggatgatattggattaacgaatggtataaaaagaaaaaggtttacacgagaacttcagcaattaaaaaagatggcagactatacgtctagagacacatcaaatatcaacaatttccttcaaacaatgggactcgaattctctatatatacctacagtttcttaaacgctgggcttgacaaaaaggattacctacgaaatatatctgaggaccagttgttaaccgaatgtggaattagtaattctattcaccggctaaggataatggaaggtatcagacaattagaaaacggccttgccaacggtatgaacgaagacaaccaagacaaatccttagatgtattcgtaagttaccgacggtccaacggttcccaactagccagtttactcaaagtccacttgcagctccgaggattcagtgtcttcatcgacgtggagaggctggaagctggaaagtttgataacaatctcctgcagagtattcaaaaagccaaacacttcttgttggtgctgacgccgaacgctctggaaagatgtataggagatattgaaagaaaagactgggtacatcgggaaatatgtgcagctctatcagctaattgtaacatcatccccatcatcgacaacttcatccttccccgaactcgaacagttgccggaagatatgagacaggtctgccacttcaacgcagttcggtggattcacgattatcaggatgcttgtgtggacaaactagaaaggttcatgcgaggagaagcgaatccacgcggggacaattacagagtcactttgcccaaaggcgatataactccaggaacaccttcaaatcccagtttggttaggcagccgcctaactaccaaagaatgcacagcaacgactcaggaagtggtaaaagctccgacaaagacatgaacggcaactcggggttaacgagggattgactagatggtccttatgcctcggctactcctactccactgcctagattctacaaagcaaacagtccgtcccgaaattggataatcaactccaacaacttcaaccggggtctcccgcccgtgccgtactctcggcgaggttccaacacccccgtctcgtcactagctcttaacagttacccccaccctccggcccctaaccgatctcgcagcctcgacggtctcctagactccgccgagcccatcctagcagcagctacagaagcaactaaaaacgatcaagttccgtccccgaaaaaagcgcaaagttgtgatgacattgacaaagacttgaacgacgcatccgcatacgtcgaagagactgacactagtttaagtaatacgaaggaactggattgttcggtagaaagtgatagtactgacaagtgttcgatatacagtaattctagtgattcgaaacgtaagagaaactttatggaccgatgtgtcaataaagtgcgatcttttattaagaaataaactgcatatttataaaaaaactaaactaggtgaagcaaacgataccaattttataggttttagtataattccaaattgacgtgaaaagtagtcacatcaacatataaaactgaatagatttgcagaaaatttcgtaaatacaaagcaatatttcaacacacaacaaaataattgtttacgctaatcttttttaaaactttgaccaagtctgctaatccggttcgaaggccaagtgtgtaaatccggctcgaaggaccatatgttgtttattcttttaaagaattagatgttaaataggtatcgtttggttctcctatactttatttcctgtatcttgatattcaatatttaaatttaaacttcatagatgatattatttattattcttttacggcaactaaattacttagtacaaacattgtgcttttatacaaaatttgtatatatagtaaaaacgtgtgattatcgagcagtcttaatgaattttcttaggtctgtttccgtatgagagagataaaaaaatttctatcgtgcaaaatttattaaaaatgaactcttttttatttgtatagtatatgttggtgctatttacaatttttttaagaaaatatgtggccagatcaacaaattcagtcaaaatggatccaaacttcatacttatttaatattccaacgggatttattcgctataaaaaaaatacaattcaaaatcacagattaacttgaaattttgtactgctatatttgaaaaatgttggctagagtgtaactctgcaatccactgagttgtcaagcttacttatctctgttttaatttagtcacttcaaattttcttccatatatagttttgttaaaagttttttcatttttgcatctttgtcatggtaaattatgtcgtttatactatatcatcatttatatacattaatcattctgaagcatacaaaacgtagacttttaaattctaagtgcctctctccaagtgccttcttgttgtttaatcaagttaaattagtaatcgtgttttcaaagatatgttgtgatatttcctatgtaagagaaacagtttccacttcaccgattttggatatgtttatagaaaatttctttcaatgcacactcacaaaaaaaacttagttgatgtcaggttacgctattaatgtggccagactcaatgacattgtgagaacaccaagaacatctgttcgaagtgacatctaaacaagagatatattttgaagatcgaatttttgaaagggcttttatatttaataattttttctgttactttttatccaatggtttttattgtattcgctactacacttccatcaattcttattttggatcttctgtgaaaaccatagaatatctagactgcgggttgcaatgcaaaactgtttcctcagtgcgacagagaaaagtatttgtaaacagggtatttattttctttctttcttgactggctttacaacttgaggtgagtcttagccgcatccactatggctctccatcttctacttgctgtatccatcatgaccattgcaccaaatggtcttgcacttctatttcccattgctgtaccccaatcctagatagatctgcttcaacctcatccttccatctttttctgggacggcctactaatcttctgccctctgctttctcatagaaaactgtctttaacactctgccttcctctgatcttaccacatgacctgcccatcttaactagttagcttttacatgcctggcgatgttttcagtaccatacagtcaccaattcagcattgcggcgccttctccactcttctgtcaattcatctctttgagggccaatatcattcggagaacctttcttttcaaatacaagcagcttatttctttctcgcttatgtagattccacgtttcacttccatattatgtaacaactgagcgaataattggcatgtacagtcttaatttagattgctttttagcagcttagatcttaataatgatgataggaaaataatgctctattcgcgattaaaactgaatatagagggcaggtcgaatgcatgaaaatggccgatataaatggtataaacaaacattcatttgaggagc

SEQ ID NO: 1474 - DNA, 1372 bp, Diabrotica virgifera
  SmartBlast Evalue=2E-18; Info=Endonuclease-reverse transcriptase n=1 Tax=Bombyx mori RepID=D5LB38_BOMMO
tagtacggtctcgttggttatcttgtccgtccatgatatccttaggattcgcctgtatagccacatctcgaatattcaagtttttctgcatcgctttcatgagtgtccaggattcaactccgtagtataatattgagaagatataacatcgtagagccttacttttatctccagattaaggttgtggcttttaaagagtttgcccatgttgttgaatgtactcatttcttctttacgtgccatctctgagacgaaggttggcaatcatcattgctattctaacttttgacactacaacccgaaagagttcagttgagctacatctaaaccattctctgagatttctaaatcaggacattttgcttctacctatgctgcgccttccttgaatctttccctgcattattaatttaggaattcatatctgtcaccacgtgttacatgatccagatattgtagttttcttattttgatggaatccagtatctccctgctgttctttattcttcttagtactctttattggttgttctgtctgttcaggagattctcagcattcttcgatatgtccacatttcaaatgattccaatctattgagacattgtttattaagagtccatgtctccacaccatagaaaagaacaaaaaacataacactttagtacagtggaaccccgataagtcggcacccgataacacggaggttcggctaatccagaccgattttcatcagacaaacatttcaacaataaaatgaatgtactatagttcttgagagataatgggtatttgtgtaatttgaactatacgatggtaaaaatgactcatggcacacggcggcagagcgacgttcattgtctcggattatcggaaacaacaggcacctgtattctttatttatctcaaactgtcttagcattgtttaaaaaggcctaaaagactatttaaaaaattcctttttaaacaatggtcttagtctcactgttcttaaataacataacatcgttctgattgtgaccgtattgtgtgtagtacagtcatattgttcgcttccgttctgtaatcgtgcttcagatgtttgtgttttttgtctacgtaatggcaacaaaacgtaaaaatgttgtagtgacaatggaaaagaaagtagaagcattaggtaggattgataaaggcgaatctttaaaaacaattgcagcatcatatggtgtcggtacatctacagtatcggattggaagaaaaatagaactaaaatcgaagaattttgttttaagatgataacaaaagacagtttggacaatcggtgcaaagctaagaaagctaaaaatgagactctcgacgacgctttgtatgtgtggttttgtgcggaacgg

SEQ ID NO: 1475 - DNA, 1216 bp, Diabrotica virgifera
  SmartBlast Evalue=1E-57; Info=Endonuclease-reverse transcriptase n=1 Tax=Bombyx mori RepID=D5LB38_BOMMO
gtttgtgtttaaggttttacctatgaattagcaattttcagaataaatagatatatgaatgtatgtgatatgttgcaatttattttacggactcgaaaaagcggaacaagagtttgaaaatacaaaagaaatttgaaaaaattgcaaattatcatgttttggccaaatgattattgttaaaggatatcacttatttcttcctattctggaattatttgacttttttgtggaatttcttcttcctcttcttctttatgtcatctttatgtcttcactatgtcttcatctgcgatgaaggttggcaatcatcactgctattttaacttttgacactacatcccgaaagagttcagttgagctgcatacaaaccaaaacatttttcttctacctatgttgcaccttccttgaatctttccctgcattattagttttaggaattcatatctgtcaccacgtgttacatgatccagatattgaagttttcttattttcatggaatccagtatctccctgctgttctgtattcttcttagaacttcctcatgggttattctgtctgtccaggagattctcagcattcttcgatacgtccacatctcaaatgcttccaatctattgaggcatgtttattgagagtccatgtctccacaccatacaaaagaacagaaaatacataacattttagtactcgctttctaagatttaggttgaggtctctactacataatatttgtttcatattagttgaatgcacttctagccttttctattctaactctgatttctttggtataatcgtttgtttcactaatgtttgtccctaaatagttataattctgaactcgttctatcgtcttattatttacgtgtagattgatgtttctaatatttttctttgatataaccatgaatttcgttttctttatgtttagtgacagaccaaattcttcactcattacaaccatcttatctacaattctttgtagatctgtaatattttctgctattagtattgtatcatcagcatatctaatctcacatatgggtaggccatttatttttatgcctgctacttcatcttctaatgcttttttgaatatttcctctgagtatgcattaaacagtgatggcgacaagacacagccctgtctaacacctacttttgatttttattttatgggtgtttaaattatttattcttatgacagcttcttg

SEQ ID NO: 1476 - DNA, 1195 bp, Diabrotica virgifera
  SmartBlast Evalue=8E-57; Info=Endonuclease-reverse transcriptase n=1 Tax=Bombyx mori RepID=D5LB38_BOMMO
tagtacggtctcgttggttatcttgtccgtccatgatatccttaggattcgcctgtatagccacatctcgaatattcaagtttttctgcatcgctttcatgagtgtccaggattcaactccgtagtataatattgagaagatataacatcgtagagccttacttttatctccagattaaggttgtggcttttaaagagtttgcccatgttgttgaatgtactcatttcttctttacgtgccatctctgagacgaaggttggcaatcatcattgctattctaacttttgacactacaacccgaaagagttcagttgagctacatctaaaccattctctgagatttctaaatcaggacattttgcttctacctatgctgcgccttccttgaatctttccctgcattattaatttaggaattcatatctgtcaccacgtgttacatgatccagatattgaagttttcttattttcatggaatccagtatctccctgctgttctgtattcttcttagaacttcctcatgggttattctgtctgtccaggagattctcagcattcttcgatacgtccacatctcaaatgcttccaatctattgaggcatgtttattgagagtccatgtctccacaccatacaaaagaacagaaaatacataacattttagtactcgctttctaagatttaggttgaggtctctactacataatatttgtttcatattagttgaatgcacttctagccttttctattctaactctgatttctttggtataatcgtttgtttcactaatgtttgtccctaaatagttataattctgaactcgttctatcgtcttattatttacgtgtagattgatgtttctaatatttttctttgatataaccatgaatttcgttttctttatgtttagtgacagaccaaattcttcactcattacaaccatcttatctacaattctttgtagatctgtaatattttctgctattagtattgtatcatcagcatatctaatctcacatatgggtaggccatttatttttatgcctgctacttcatcttctaatgcttttttgaatatttcctctgagtatgcattaaacagtgatggcgacaagacacagccctgtctaacacctacttttgatttttattttatgggtgtttaaattatttattcttatgacagcttcttg

SEQ ID NO: 1477 - DNA, 1054 bp, Diabrotica virgifera
  SmartBlast Evalue=4E-22; Info=Endonuclease-reverse transcriptase n=1 Tax=Bombyx mori RepID=D5LB38_BOMMO
gtttgtgtttaaggttttacctatgaattagcaattttcagaataaatagatatatgaatgtatgtgatatgttgcaatttattttacggactcgaaaaagcggaacaagagtttgaaaatacaaaagaaatttgaaaaaattgcaaattatcatgttttggccaaatgattattgttaaaggatatcacttatttcttcctattctggaattatttgacttttttgtggaatttcttcttcctcttcttctttatgtcatctttatgtcttcactatgtcttcatctgcgatgaaggttggcaatcatcactgctattttaacttttgacactacatcccgaaagagttcagttgagctgcatacaaaccaaaacatttttcttctacctatgttgcaccttccttgaatctttccctgcattattagttttaggaattcatatctgtcaccacgtgttacatgatccagatattgtggttttcttattttggtggaatccactatctccctgttgtgcctatttttcttagtacttttcattggttattctgtctgcccaggagattctcagcattcttcgatatgtccacatttcaaatggtttcaatctattgaaacattgtttaataagagtccacgtctccacaacatacacaagaatagaaaatgcataacactttataagatttaggctgaggtctctattacaaaatatttgtttcatattattgaatgcatttaacaatgaattaatataacttgattccacaaaaatactaatttgtgacatgcaaaagtgacttgtactaacacttatcactatttgaccataaaaaatgaaaaatgtatttggatcattgtgtgataacaatacttacgataatctgatcacgcataaccaaaaaatgtgcacttatcattgaataaccaatgctgtcaattaaattatatccgtcgtgcatttagcagcctctaactaaacgaaaacgaatgttgttttgattacatttcacaattaacacaaaatgaccaattatgcagttagcaccgt

SEQ ID NO: 1478 - DNA, 1033 bp, Diabrotica virgifera
  SmartBlast Evalue=3E-19; Info=Endonuclease-reverse transcriptase n=1 Tax=Bombyx mori RepID=D5LB38_BOMMO
tagtacggtctcgttggttatcttgtccgtccatgatatccttaggattcgcctgtatagccacatctcgaatattcaagtttttctgcatcgctttcatgagtgtccaggattcaactccgtagtataatattgagaagatataacatcgtagagccttacttttatctccagattaaggttgtggcttttaaagagtttgcccatgttgttgaatgtactcatttcttctttacgtgccatctctgagacgaaggttggcaatcatcattgctattctaacttttgacactacaacccgaaagagttcagttgagctacatctaaaccattctctgagatttctaaatcaggacattttgcttctacctatgctgcgccttccttgaatctttccctgcattattaatttaggaattcatatctgtcaccacgtgttacatgatccagatattgtggttttcttattttggtggaatccactatctccctgttgtgcctatttttcttagtacttttcattggttattctgtctgcccaggagattctcagcattcttcgatatgtccacatttcaaatggtttcaatctattgaaacattgtttaataagagtccacgtctccacaacatacacaagaatagaaaatgcataacactttataagatttaggctgaggtctctattacaaaatatttgtttcatattattgaatgcatttaacaatgaattaatataacttgattccacaaaaatactaatttgtgacatgcaaaagtgacttgtactaacacttatcactatttgaccataaaaaatgaaaaatgtatttggatcattgtgtgataacaatacttacgataatctgatcacgcataaccaaaaaatgtgcacttatcattgaataaccaatgctgtcaattaaattatatccgtcgtgcatttagcagcctctaactaaacgaaaacgaatgttgttttgattacatttcacaattaacacaaaatgaccaattatgcagttagcaccgt

SEQ ID NO: 1479 - DNA, 1786 bp, Diabrotica virgifera
  SmartBlast Evalue=2E-18; Info=Endonuclease-reverse transcriptase n=1 Tax=Bombyx mori RepID=D5LB38_BOMMO
gtttgtgtttaaggttttacctatgaattagcaattttcagaataaatagatatatgaatgtatgtgatatgttgcaatttattttacggactcgaaaaagcggaacaagagtttgaaaatacaaaagaaatttgaaaaaattgcaaattatcatgttttggccaaatgattattgttaaaggatatcacttatttcttcctattctggaattatttgacttttttgtggaatttcttcttcctcttcttctttatgtcatctttatgtcttcactatgtcttcatctgcgatgaaggttggcaatcatcactgctattttaacttttgacactacatcccgaaagagttcagttgagctgcatacaaaccaaaacatttttcttctacctatgttgcaccttccttgaatctttccctgcattattagttttaggaattcatatctgtcaccacgtgttacatgatccagatattgtagttttcttattttgatggaatccagtatctccctgctgttctttattcttcttagtactctttattggttgttctgtctgttcaggagattctcagcattcttcgatatgtccacatttcaaatgattccaatctattgagacattgtttattaagagtccatgtctccacaccatagaaaagaacaaaaaacataacactttagtacagtggaaccccgataagtcggcacccgataacacggaggttcggctaatccagaccgattttcatcagacaaacatttcaacaataaaatgaatgtactatagttcttgagagataatgggtatttgtgtaatttgaactatacgatggtaaaaatgactcatggcacacggcggcagagcgacgttcattgtctcggattatcggaaacaacaggcacctgtattctttatttatctcaaactgtcttagcattgtttaaaaaggcctaaaagactatttaaaaaattcctttttaaacaatggtcttagtctcactgttcttaaataacataacatcgttctgattgtgaccgtattgtgtgtagtacagtcatattgttcgcttccgttctgtaatcgtgcttcagatgtttgtgttttttgtctacgtaatggcaacaaaacgtaaaaatgttgtagtgacaatggaaaagaaagtagaagcattaggtaggattgataaaggcgaatctttaaaaacaattgcagcatcatatggtgtcggtacatctacagtatcggattggaagaaaaatagaactaaaatcgaagaattttgtttcaaaatgataacaaaagacagtttggacaatcggtgcaaagctaataaagctaaaaatgagactctcgacgacgctttgtatgtgtggttttgtgcggaatgggaacgtggtttaccagtgtctggaccaattattcacgaaacagcactcaatttcaacctgattttgaaccaaatttcactggagtcaaggtgatggaaaaaaacgtcattgaatacgccaactatctatcgctgctaagtataccttatacctattttattaatttttaccatattctccggctaacccggattttcgataatccggatcggccgcggtcccgattaatccgacttatcgaggttccactgtattattgttgtcaattaaaaaacttcttattactgtttagtatgtgtattagttattttcagacctacaaaaaagaagtattacacaaattttctgctgagcaaccatttggacattgaacactttaaatattgacagctt

SEQ ID NO: 1480 - DNA, 1765 bp, Diabrotica virgifera
  SmartBlast Evalue=3E-18; Info=Endonuclease-reverse transcriptase n=1 Tax=Bombyx mori RepID=D5LB38_BOMMO
tagtacggtctcgttggttatcttgtccgtccatgatatccttaggattcgcctgtatagccacatctcgaatattcaagtttttctgcatcgctttcatgagtgtccaggattcaactccgtagtataatattgagaagatataacatcgtagagccttacttttatctccagattaaggttgtggcttttaaagagtttgcccatgttgttgaatgtactcatttcttctttacgtgccatctctgagacgaaggttggcaatcatcattgctattctaacttttgacactacaacccgaaagagttcagttgagctacatctaaaccattctctgagatttctaaatcaggacattttgcttctacctatgctgcgccttccttgaatctttccctgcattattaatttaggaattcatatctgtcaccacgtgttacatgatccagatattgtagttttcttattttgatggaatccagtatctccctgctgttctttattcttcttagtactctttattggttgttctgtctgttcaggagattctcagcattcttcgatatgtccacatttcaaatgattccaatctattgagacattgtttattaagagtccatgtctccacaccatagaaaagaacaaaaaacataacactttagtacagtggaaccccgataagtcggcacccgataacacggaggttcggctaatccagaccgattttcatcagacaaacatttcaacaataaaatgaatgtactatagttcttgagagataatgggtatttgtgtaatttgaactatacgatggtaaaaatgactcatggcacacggcggcagagcgacgttcattgtctcggattatcggaaacaacaggcacctgtattctttatttatctcaaactgtcttagcattgtttaaaaaggcctaaaagactatttaaaaaattcctttttaaacaatggtcttagtctcactgttcttaaataacataacatcgttctgattgtgaccgtattgtgtgtagtacagtcatattgttcgcttccgttctgtaatcgtgcttcagatgtttgtgttttttgtctacgtaatggcaacaaaacgtaaaaatgttgtagtgacaatggaaaagaaagtagaagcattaggtaggattgataaaggcgaatctttaaaaacaattgcagcatcatatggtgtcggtacatctacagtatcggattggaagaaaaatagaactaaaatcgaagaattttgtttcaaaatgataacaaaagacagtttggacaatcggtgcaaagctaataaagctaaaaatgagactctcgacgacgctttgtatgtgtggttttgtgcggaatgggaacgtggtttaccagtgtctggaccaattattcacgaaacagcactcaatttcaacctgattttgaaccaaatttcactggagtcaaggtgatggaaaaaaacgtcattgaatacgccaactatctatcgctgctaagtataccttatacctattttattaatttttaccatattctccggctaacccggattttcgataatccggatcggccgcggtcccgattaatccgacttatcgaggttccactgtattattgttgtcaattaaaaaacttcttattactgtttagtatgtgtattagttattttcagacctacaaaaaagaagtattacacaaattttctgctgagcaaccatttggacattgaacactttaaatattgacagctt

SEQ ID NO: 1481 - DNA, 1577 bp, Diabrotica virgifera
  SmartBlast Evalue=2E-18; Info=Endonuclease-reverse transcriptase n=1 Tax=Bombyx mori RepID=D5LB38_BOMMO
gtttgtgtttaaggttttacctatgaattagcaattttcagaataaatagatatatgaatgtatgtgatatgttgcaatttattttacggactcgaaaaagcggaacaagagtttgaaaatacaaaagaaatttgaaaaaattgcaaattatcatgttttggccaaatgattattgttaaaggatatcacttatttcttcctattctggaattatttgacttttttgtggaatttcttcttcctcttcttctttatgtcatctttatgtcttcactatgtcttcatctgcgatgaaggttggcaatcatcactgctattttaacttttgacactacatcccgaaagagttcagttgagctgcatacaaaccaaaacatttttcttctacctatgttgcaccttccttgaatctttccctgcattattagttttaggaattcatatctgtcaccacgtgttacatgatccagatattgtagttttcttattttgatggaatccagtatctccctgctgttctttattcttcttagtactctttattggttgttctgtctgttcaggagattctcagcattcttcgatatgtccacatttcaaatgattccaatctattgagacattgtttattaagagtccatgtctccacaccatagaaaagaacaaaaaacataacactttagtacagtggaaccccgataagtcggcacccgataacacggaggttcggctaatccagaccgattttcatcagacaaacatttcaacaataaaatgaatgtactatagttcttgagagataatgggtatttgtgtaatttgaactatacgatggtaaaaatgactcatggcacacggcggcagagcgacgttcattgtctcggattatcggaaacaacaggcacctgtattctttatttatctcaaactgtcttagcattgtttaaaaaggcctaaaagactatttaaaaaattcctttttaaacaatggtcttagtctcactgttcttaaataacataacatcgttctgattgtgaccgtattgtgtgtagtacagtcatattgttcgcttccgttctgtaatcgtgcttcagatgtttgtgttttttgtctacgtaatggcaacaaaacgtaaaaatgttgtagtgacaatggaaaagaaagtagaagcattaggtaggattgataaaggcgaatctttaaaaacaattgcagcatcatatggtgtcggtacatctacagtatcggattggaagaaaaatagaactaaaatcgaagaattttgtttcaaaatgataacaaaagacagtttggacaatcggtgcaaagctaataaagctaaaaatgagactctcgacgacgctttgtatgtgtggttttgtgcggaacgcgaacgtggtttaccagtgtctggaccaattattcaggaatcagcactcaagctgattaagagaaatgaacatactctatactctatacaactatacataatttagacgtgtactgtgcatatatatttttcatgttatttcaattataacggagtttatctgtaagtataccgtattttattaa

SEQ ID NO: 1482 - DNA, 1556 bp, Diabrotica virgifera
  SmartBlast Evalue=3E-18; Info=Endonuclease-reverse transcriptase n=1 Tax=Bombyx mori RepID=D5LB38_BOMMO
tagtacggtctcgttggttatcttgtccgtccatgatatccttaggattcgcctgtatagccacatctcgaatattcaagtttttctgcatcgctttcatgagtgtccaggattcaactccgtagtataatattgagaagatataacatcgtagagccttacttttatctccagattaaggttgtggcttttaaagagtttgcccatgttgttgaatgtactcatttcttctttacgtgccatctctgagacgaaggttggcaatcatcattgctattctaacttttgacactacaacccgaaagagttcagttgagctacatctaaaccattctctgagatttctaaatcaggacattttgcttctacctatgctgcgccttccttgaatctttccctgcattattaatttaggaattcatatctgtcaccacgtgttacatgatccagatattgtagttttcttattttgatggaatccagtatctccctgctgttctttattcttcttagtactctttattggttgttctgtctgttcaggagattctcagcattcttcgatatgtccacatttcaaatgattccaatctattgagacattgtttattaagagtccatgtctccacaccatagaaaagaacaaaaaacataacactttagtacagtggaaccccgataagtcggcacccgataacacggaggttcggctaatccagaccgattttcatcagacaaacatttcaacaataaaatgaatgtactatagttcttgagagataatgggtatttgtgtaatttgaactatacgatggtaaaaatgactcatggcacacggcggcagagcgacgttcattgtctcggattatcggaaacaacaggcacctgtattctttatttatctcaaactgtcttagcattgtttaaaaaggcctaaaagactatttaaaaaattcctttttaaacaatggtcttagtctcactgttcttaaataacataacatcgttctgattgtgaccgtattgtgtgtagtacagtcatattgttcgcttccgttctgtaatcgtgcttcagatgtttgtgttttttgtctacgtaatggcaacaaaacgtaaaaatgttgtagtgacaatggaaaagaaagtagaagcattaggtaggattgataaaggcgaatctttaaaaacaattgcagcatcatatggtgtcggtacatctacagtatcggattggaagaaaaatagaactaaaatcgaagaattttgtttcaaaatgataacaaaagacagtttggacaatcggtgcaaagctaataaagctaaaaatgagactctcgacgacgctttgtatgtgtggttttgtgcggaacgcgaacgtggtttaccagtgtctggaccaattattcaggaatcagcactcaagctgattaagagaaatgaacatactctatactctatacaactatacataatttagacgtgtactgtgcatatatatttttcatgttatttcaattataacggagtttatctgtaagtataccgtattttattaa

SEQ ID NO: 1483 - DNA, 1629 bp, Diabrotica virgifera
  SmartBlast Evalue=2E-18; Info=Endonuclease-reverse transcriptase n=1 Tax=Bombyx mori RepID=D5LB38_BOMMO
gtttgtgtttaaggttttacctatgaattagcaattttcagaataaatagatatatgaatgtatgtgatatgttgcaatttattttacggactcgaaaaagcggaacaagagtttgaaaatacaaaagaaatttgaaaaaattgcaaattatcatgttttggccaaatgattattgttaaaggatatcacttatttcttcctattctggaattatttgacttttttgtggaatttcttcttcctcttcttctttatgtcatctttatgtcttcactatgtcttcatctgcgatgaaggttggcaatcatcactgctattttaacttttgacactacatcccgaaagagttcagttgagctgcatacaaaccaaaacatttttcttctacctatgttgcaccttccttgaatctttccctgcattattagttttaggaattcatatctgtcaccacgtgttacatgatccagatattgtagttttcttattttgatggaatccagtatctccctgctgttctttattcttcttagtactctttattggttgttctgtctgttcaggagattctcagcattcttcgatatgtccacatttcaaatgattccaatctattgagacattgtttattaagagtccatgtctccacaccatagaaaagaacaaaaaacataacactttagtacagtggaaccccgataagtcggcacccgataacacggaggttcggctaatccagaccgattttcatcagacaaacatttcaacaataaaatgaatgtactatagttcttgagagataatgggtatttgtgtaatttgaactatacgatggtaaaaatgactcatggcacacggcggcagagcgacgttcattgtctcggattatcggaaacaacaggcacttagcattgtttaaaaaagactaaaagactatttaaaaaaattcttttttaaacaatggtcttagtctccactgttcttaaataacataacatcgttctgattgtgaccgtattgtgtgtagtacagtcgtattgttcgcttccgttctgtaatcgtgcttcagataggtttgtgtttgcgtgtttttatgtcaacgttatggcaacaaaacgtaaaaatattgtagtgacaatggaaaagaaactagaagcattaggtagtattgataaaggcgaatctttcgcagcatcacatggtgttggtacatctacagtatcggattggaagaaaaatagaactaaaattgaagaatttcgtttcaaaatgataacaaaatttggagtttggacagtttggacaatcggtgcaaagctaataaagctaaaaatgagactctcgacgacgctttgtatgtgtggttttgtgcggaacgcgaacgtggtttaccagtgtctggacctattattcaataatcagcactcaatataaataaaatgttgcctaattgtgaaccaaatttcactgcgtgtcaaggttggctggatagatgaaaaaacgtcatggaatacgccaactatttatcactggagaaagtcttatctgcggacaacaacgctgctcatgactataaaaacaagtttttggattttgtgagagaagaaacagtatactctatataacta

SEQ ID NO: 1484 - DNA, 1608 bp, Diabrotica virgifera
  SmartBlast Evalue=3E-18; Info=Endonuclease-reverse transcriptase n=1 Tax=Bombyx mori RepID=D5LB38_BOMMO
tagtacggtctcgttggttatcttgtccgtccatgatatccttaggattcgcctgtatagccacatctcgaatattcaagtttttctgcatcgctttcatgagtgtccaggattcaactccgtagtataatattgagaagatataacatcgtagagccttacttttatctccagattaaggttgtggcttttaaagagtttgcccatgttgttgaatgtactcatttcttctttacgtgccatctctgagacgaaggttggcaatcatcattgctattctaacttttgacactacaacccgaaagagttcagttgagctacatctaaaccattctctgagatttctaaatcaggacattttgcttctacctatgctgcgccttccttgaatctttccctgcattattaatttaggaattcatatctgtcaccacgtgttacatgatccagatattgtagttttcttattttgatggaatccagtatctccctgctgttctttattcttcttagtactctttattggttgttctgtctgttcaggagattctcagcattcttcgatatgtccacatttcaaatgattccaatctattgagacattgtttattaagagtccatgtctccacaccatagaaaagaacaaaaaacataacactttagtacagtggaaccccgataagtcggcacccgataacacggaggttcggctaatccagaccgattttcatcagacaaacatttcaacaataaaatgaatgtactatagttcttgagagataatgggtatttgtgtaatttgaactatacgatggtaaaaatgactcatggcacacggcggcagagcgacgttcattgtctcggattatcggaaacaacaggcacttagcattgtttaaaaaagactaaaagactatttaaaaaaattcttttttaaacaatggtcttagtctccactgttcttaaataacataacatcgttctgattgtgaccgtattgtgtgtagtacagtcgtattgttcgcttccgttctgtaatcgtgcttcagataggtttgtgtttgcgtgtttttatgtcaacgttatggcaacaaaacgtaaaaatattgtagtgacaatggaaaagaaactagaagcattaggtagtattgataaaggcgaatctttcgcagcatcacatggtgttggtacatctacagtatcggattggaagaaaaatagaactaaaattgaagaatttcgtttcaaaatgataacaaaatttggagtttggacagtttggacaatcggtgcaaagctaataaagctaaaaatgagactctcgacgacgctttgtatgtgtggttttgtgcggaacgcgaacgtggtttaccagtgtctggacctattattcaataatcagcactcaatataaataaaatgttgcctaattgtgaaccaaatttcactgcgtgtcaaggttggctggatagatgaaaaaacgtcatggaatacgccaactatttatcactggagaaagtcttatctgcggacaacaacgctgctcatgactataaaaacaagtttttggattttgtgagagaagaaacagtatactctatataacta

SEQ ID NO: 1485 - DNA, 1430 bp, Diabrotica virgifera
  SmartBlast Evalue=2E-18; Info=Endonuclease-reverse transcriptase n=1 Tax=Bombyx mori RepID=D5LB38_BOMMO
gtttgtgtttaaggttttacctatgaattagcaattttcagaataaatagatatatgaatgtatgtgatatgttgcaatttattttacggactcgaaaaagcggaacaagagtttgaaaatacaaaagaaatttgaaaaaattgcaaattatcatgttttggccaaatgattattgttaaaggatatcacttatttcttcctattctggaattatttgacttttttgtggaatttcttcttcctcttcttctttatgtcatctttatgtcttcactatgtcttcatctgcgatgaaggttggcaatcatcactgctattttaacttttgacactacatcccgaaagagttcagttgagctgcatacaaaccaaaacatttttcttctacctatgttgcaccttccttgaatctttccctgcattattagttttaggaattcatatctgtcaccacgtgttacatgatccagatattgtagttttcttattttgatggaatccagtatctccctgctgttctttattcttcttagtactctttattggttgttctgtctgttcaggagattctcagcattcttcgatatgtccacatttcaaatgattccaatctattgagacattgtttattaagagtccatgtctccacaccatagaaaagaacaaaaaacataacactttagtacagtggaaccccgataagtcggcacccgataacacggaggttcggctaatccagaccgattttcatcagacaaacatttcaacaataaaatgaatgtactatagttcttgagagataatgggtatttgtgtaatttgaactatacgatggtaaaaatgactcatggcacacggcggcagagcgacgttcattgtctcggattatcggaaacaacaggcacctgtattctttatttatctcaaactgtcttagcattgtttaaaaaggcctaaaagactatttaaaaaattcctttttaaacaatggtcttagtctcactgttcttaaataacataacatcgttctgattgtgaccgtattgtgtgtagtacagtcatattgttcgcttccgttctgtaatcgtgcttcagatgtttgtgttttttgtctacgtaatggcaacaaaacgtaaaaatgttgtagtgacaatggaaaagaaagtagaagcattaggtaggattgataaaggcgaatctttaaaaacaattgcagcatcatatggtgtcggtacatctacagtatcggattggaagaaaaatagaactaaaatcgaagaattttgtttcaaaatgataaaacagtttggacaatcggtgcaaagctaataaagctaaaaatgagactctcaacaatgctttgtatgtgtggttttgtgcggaacgcgaacgtgatttaccagtgtctggtttaagaaacagcactcaa

SEQ ID NO: 1486 - DNA, 1409 bp, Diabrotica virgifera
  SmartBlast Evalue=2E-18; Info=Endonuclease-reverse transcriptase n=1 Tax=Bombyx mori RepID=D5LB38_BOMMO
tagtacggtctcgttggttatcttgtccgtccatgatatccttaggattcgcctgtatagccacatctcgaatattcaagtttttctgcatcgctttcatgagtgtccaggattcaactccgtagtataatattgagaagatataacatcgtagagccttacttttatctccagattaaggttgtggcttttaaagagtttgcccatgttgttgaatgtactcatttcttctttacgtgccatctctgagacgaaggttggcaatcatcattgctattctaacttttgacactacaacccgaaagagttcagttgagctacatctaaaccattctctgagatttctaaatcaggacattttgcttctacctatgctgcgccttccttgaatctttccctgcattattaatttaggaattcatatctgtcaccacgtgttacatgatccagatattgtagttttcttattttgatggaatccagtatctccctgctgttctttattcttcttagtactctttattggttgttctgtctgttcaggagattctcagcattcttcgatatgtccacatttcaaatgattccaatctattgagacattgtttattaagagtccatgtctccacaccatagaaaagaacaaaaaacataacactttagtacagtggaaccccgataagtcggcacccgataacacggaggttcggctaatccagaccgattttcatcagacaaacatttcaacaataaaatgaatgtactatagttcttgagagataatgggtatttgtgtaatttgaactatacgatggtaaaaatgactcatggcacacggcggcagagcgacgttcattgtctcggattatcggaaacaacaggcacctgtattctttatttatctcaaactgtcttagcattgtttaaaaaggcctaaaagactatttaaaaaattcctttttaaacaatggtcttagtctcactgttcttaaataacataacatcgttctgattgtgaccgtattgtgtgtagtacagtcatattgttcgcttccgttctgtaatcgtgcttcagatgtttgtgttttttgtctacgtaatggcaacaaaacgtaaaaatgttgtagtgacaatggaaaagaaagtagaagcattaggtaggattgataaaggcgaatctttaaaaacaattgcagcatcatatggtgtcggtacatctacagtatcggattggaagaaaaatagaactaaaatcgaagaattttgtttcaaaatgataaaacagtttggacaatcggtgcaaagctaataaagctaaaaatgagactctcaacaatgctttgtatgtgtggttttgtgcggaacgcgaacgtgatttaccagtgtctggtttaagaaacagcactcaa

SEQ ID NO: 1487 - DNA, 1393 bp, Diabrotica virgifera
  SmartBlast Evalue=2E-18; Info=Endonuclease-reverse transcriptase n=1 Tax=Bombyx mori RepID=D5LB38_BOMMO
gtttgtgtttaaggttttacctatgaattagcaattttcagaataaatagatatatgaatgtatgtgatatgttgcaatttattttacggactcgaaaaagcggaacaagagtttgaaaatacaaaagaaatttgaaaaaattgcaaattatcatgttttggccaaatgattattgttaaaggatatcacttatttcttcctattctggaattatttgacttttttgtggaatttcttcttcctcttcttctttatgtcatctttatgtcttcactatgtcttcatctgcgatgaaggttggcaatcatcactgctattttaacttttgacactacatcccgaaagagttcagttgagctgcatacaaaccaaaacatttttcttctacctatgttgcaccttccttgaatctttccctgcattattagttttaggaattcatatctgtcaccacgtgttacatgatccagatattgtagttttcttattttgatggaatccagtatctccctgctgttctttattcttcttagtactctttattggttgttctgtctgttcaggagattctcagcattcttcgatatgtccacatttcaaatgattccaatctattgagacattgtttattaagagtccatgtctccacaccatagaaaagaacaaaaaacataacactttagtacagtggaaccccgataagtcggcacccgataacacggaggttcggctaatccagaccgattttcatcagacaaacatttcaacaataaaatgaatgtactatagttcttgagagataatgggtatttgtgtaatttgaactatacgatggtaaaaatgactcatggcacacggcggcagagcgacgttcattgtctcggattatcggaaacaacaggcacctgtattctttatttatctcaaactgtcttagcattgtttaaaaaggcctaaaagactatttaaaaaattcctttttaaacaatggtcttagtctcactgttcttaaataacataacatcgttctgattgtgaccgtattgtgtgtagtacagtcatattgttcgcttccgttctgtaatcgtgcttcagatgtttgtgttttttgtctacgtaatggcaacaaaacgtaaaaatgttgtagtgacaatggaaaagaaagtagaagcattaggtaggattgataaaggcgaatctttaaaaacaattgcagcatcatatggtgtcggtacatctacagtatcggattggaagaaaaatagaactaaaatcgaagaattttgttttaagatgataacaaaagacagtttggacaatcggtgcaaagctaagaaagctaaaaatgagactctcgacgacgctttgtatgtgtggttttgtgcggaacgg

SEQ ID NO: 1488 - DNA, 917 bp, Diabrotica virgifera
tgtttacatttaaatataattaatctattaatctaagcgccatctacacgataattgtcaatgtatcagaagtggaacagaaggaaactactattcgccagtcaatacgtcaaaataataagcaaaatcttaaaaaaataataatctaattacttctgtacattgtaaatattacacgataagaattaaataataaatttgaaacagttatttgctattatcgtaataattttctcattaaatttccggcaaaagttgcacacataatccgctagttggcgataccagcgaagctcatagcgaatagttctacaacacggttcttagacattactacggttgcctaaatcgactaaccaatgaacattaagggtgagattacgtcacgagagtttactgtcatttgaatcgtaatatgatttttttcgaatcctgagaaaaccaagtattttagaaaaattaaacgcaggatgcaagattacattattaccgagggcggaaagccccttagaataaacaagcagattctattgaatgaaatatttgaaattaaatatcacacttctcttttattttcagccctgtaacttattaaaataaacattatagaagttttgtaaactatttgtagagttatatataaacaatatttttattttatcatctattgtttaaaaagaatacagttgataagataccctcagttgcggagaaaggattaataataaagatttttttattcagtcaatggtgtgagcactctcagttaaatagtaacgtgtggccttacttttacacgcatacctattgtggcaaatgtatcatatttttcaaaattttggaatgcatttaaatcgtagaacaattttaacatttgattttaatacagattttaattctctacaagtattctctca

SEQ ID NO: 1489 - DNA, 862 bp, Diabrotica virgifera
tgtttacatttaaatataattaatctattaatctaagcgccatctacacgataattgtcaatgtatcagaagtggaacagaaggaaactactattcgccagtcaatacgtcaaaataataagcaaaatcttaaaaaaataataatctaattacttctgtacattgtaaatattacacgataagaattaaataataaatttgaaacagttatttgctattatcgtaataattttctcattaaatttccggcaaaagttgcacacataatccgctagttggcgataccagcgaagctcatagcgaatagttctacaacacggttcttagacattactacggttgcctaaatcgactaaccaatgaacattaagggtgagattacgtcacgagagtttactgtcatttgaatcgtaatatgatttttttcgaatcctgagaaaaccaagtattttagaaaaattaaacgcaggatgcaagattacattattaccgagggcggaaagccccttagaataaacaagcagattctattgaatgaaatatttgaaattaaatatcacacttctcttttattttcagccctgtaacttattaaaataaacattatagaagttttcagggtctttcagtcctcggtaataatgtggtctttcattctgagtttgaatttttcaaaaatatttattagttttctcaggattcgaaaaaaatgaatacaattaaaacacattgagaattttgacatgcgtcaaaattttgcattaactcaatgtaaaattctgaactgttgaattccagcttccctaataattattttacatcaaaagacattagaaactagtagaggattgaaatctgtatt

SEQ ID NO: 1490 - DNA, 720 bp, Diabrotica virgifera
aaccagaaaattaaattactatccacttaacatcgacagttaaatccaaaacctctacaacttaaagttaaaatctacaacttttcagaagagagaaaaaatttaggtacttagtacacacggttcttagacattactacggttgcctaaatcgactaaccaatgaacattaagggtgagattacgtcacgagagtttactgtcatttgaatcgtaatatgatttttttcgaatcctgagaaaaccaagtattttagaaaaattaaacgcaggatgcaagattacattattaccgagggcggaaagccccttagaataaacaagcagattctattgaatgaaatatttgaaattaaatatcacacttctcttttattttcagccctgtaacttattaaaataaacattatagaagttttgtaaactatttgtagagttatatataaacaatatttttattttatcatctattgtttaaaaagaatacagttgataagataccctcagttgcggagaaaggattaataataaagatttttttattcagtcaatggtgtgagcactctcagttaaatagtaacgtgtggccttacttttacacgcatacctattgtggcaaatgtatcatatttttcaaaattttggaatgcatttaaatcgtagaacaattttaacatttgattttaatacagattttaattctctacaagtattctctca

SEQ ID NO: 1491 - DNA, 665 bp, Diabrotica virgifera
aaccagaaaattaaattactatccacttaacatcgacagttaaatccaaaacctctacaacttaaagttaaaatctacaacttttcagaagagagaaaaaatttaggtacttagtacacacggttcttagacattactacggttgcctaaatcgactaaccaatgaacattaagggtgagattacgtcacgagagtttactgtcatttgaatcgtaatatgatttttttcgaatcctgagaaaaccaagtattttagaaaaattaaacgcaggatgcaagattacattattaccgagggcggaaagccccttagaataaacaagcagattctattgaatgaaatatttgaaattaaatatcacacttctcttttattttcagccctgtaacttattaaaataaacattatagaagttttcagggtctttcagtcctcggtaataatgtggtctttcattctgagtttgaatttttcaaaaatatttattagttttctcaggattcgaaaaaaatgaatacaattaaaacacattgagaattttgacatgcgtcaaaattttgcattaactcaatgtaaaattctgaactgttgaattccagcttccctaataattattttacatcaaaagacattagaaactagtagaggattgaaatctgtatt

SEQ ID NO: 1492 - DNA, 2393 bp, Diabrotica virgifera
  SmartBlast Evalue=9E-71; Info=Actin-related protein 2/3 complex subunit 3 n=2 Tax=Formicidae RepID=E2ALF1_9HYME
tgtttacatttaaatataattaatctattaatctaagcgccatctacacgataattgtcaatgtatcagaagtggaacagaaggaaactactattcgccagtcaatacgtcaaaataataagcaaaatcttaaaaaaataataatctaattacttctgtacattgtaaatattacacgataagaattaaataataaatttgaaacagttatttgctattatcgtaataattttctcattaaatttccggcaaaagttgcacacataatccgctagttggcgataccagcgaagctcatagcgaatagttctacaacacggttcttagacattactacggttgcctaaatcgactaaccaatgaacattaagggtgagattacgtcacgagagtttactgtcatttgaatcgtaatatgatttttttcgaatcctgagaaaaccaagtattttagaaaaattaaacgcaggatgcaagattacattattaccgagggcggaaagccccttagaataaacaagcagattctattgaatgaaatatttgaaattaaatatcacacttctcttttattttcagccctgtaacttattaaaataaacattatagaagttttcatggactttcagccctcggtaataatgtagtctttcattctgagtttaaatttttcaaaaatatttattagttttctcaggattcgaaaaaaatgaatacaattaaaacacattgagaattttgacatgcgtcaaaattttatattaactctgtaaaattcttaactgttgaattccagcttccccaataattattgtacatcaaaagacattagaaactatttgtagaggattaaaatctgtattggaaataactgttaaaaattttgtaaaaatgtaatacattttagttttcagcccaaacttaggccacacacaatgcaataatgttcacatttttgaactgtcaatatttttattttatcatctattgcatctattgtttaaaaacaatatagttgataagataccctcagttgcggagaaaggattaataataaagatttttttattcagtcaatggtgtgagcactgtcagttaaatagtaacgtgtggccttacttttacacgcatacctattgtggcaaatttatcatatttttcaaaattttggaatgcatttaaatcgtagaacaaacttttgattttaatacagattttaattctctacaagtattctctcatgacttttgatgtaaaataattagggaagcaggaattcaacaattcagaattttacattgagtttcctatggccatttttacgattcaccacccagtataagataaaatgtgtactatttgtctaattatttcataataacacaaataatacacatatatacacaataacacacattcaatgatcgaaaataatttaaaaatatgggaatgtaaactcttgtgacgtaaagtcaaaaatataagtctccccaccaccgtcggacaagacaaccgtaataaagtctaataaccgtgcttagtacatgttttttttctcttttttcttttctgttgaaaagcatgttttgtcatgatttttccaaaacaataaattattaaataccaagaaagaaaaagcatgtactaagcagataagttttttgctctcctgaaaagctgtagattttgacttataggttttggaatttagctgtcaattatgttctaagtatttattggcctggtccagacagtgacttgtccataaacttctttttggcaaagcacagccaccacttgcttggtttcttatcttctccaaaaaccttatcacaaactctcattcccacttcctgtctgagttgcgtcaaatacgccttcaagacatcaccatcattttgatttgctggtttactgtaaactgaattgagtggaaaacctggatcccctggtatatcaaacctagatatggcaagtgatcgcatctcgttctgggcttgaactttagtactacatttctgcagcttcttcaagcattctgttatgtagagagtaatgtatatcaacaatctatcagcctcggacttaatttcgtaggttctgaagaaaacattggctttgaaatagaagagtgattcatcaatgatatcctgttcttgctcattactttgtactggaccaggccctttgaatcgagtctttattggcagaattgctatgttgcctacaattgaggagggctccaaaaaactggaatgataagccggcatttttatagttctgcgttgagttatttacatacgaaatatttttataaaacaattcaggaaataaataactaaaagctacaattttgacgctatttttaaggttaatgtttagtctggttgacg

SEQ ID NO: 1493 - DNA, 2196 bp, Diabrotica virgifera
  SmartBlast Evalue=8E-71; Info=Actin-related protein 2/3 complex subunit 3 n=2 Tax=Formicidae RepID=E2ALF1_9HYME
aaccagaaaattaaattactatccacttaacatcgacagttaaatccaaaacctctacaacttaaagttaaaatctacaacttttcagaagagagaaaaaatttaggtacttagtacacacggttcttagacattactacggttgcctaaatcgactaaccaatgaacattaagggtgagattacgtcacgagagtttactgtcatttgaatcgtaatatgatttttttcgaatcctgagaaaaccaagtattttagaaaaattaaacgcaggatgcaagattacattattaccgagggcggaaagccccttagaataaacaagcagattctattgaatgaaatatttgaaattaaatatcacacttctcttttattttcagccctgtaacttattaaaataaacattatagaagttttcatggactttcagccctcggtaataatgtagtctttcattctgagtttaaatttttcaaaaatatttattagttttctcaggattcgaaaaaaatgaatacaattaaaacacattgagaattttgacatgcgtcaaaattttatattaactctgtaaaattcttaactgttgaattccagcttccccaataattattgtacatcaaaagacattagaaactatttgtagaggattaaaatctgtattggaaataactgttaaaaattttgtaaaaatgtaatacattttagttttcagcccaaacttaggccacacacaatgcaataatgttcacatttttgaactgtcaatatttttattttatcatctattgcatctattgtttaaaaacaatatagttgataagataccctcagttgcggagaaaggattaataataaagatttttttattcagtcaatggtgtgagcactgtcagttaaatagtaacgtgtggccttacttttacacgcatacctattgtggcaaatttatcatatttttcaaaattttggaatgcatttaaatcgtagaacaaacttttgattttaatacagattttaattctctacaagtattctctcatgacttttgatgtaaaataattagggaagcaggaattcaacaattcagaattttacattgagtttcctatggccatttttacgattcaccacccagtataagataaaatgtgtactatttgtctaattatttcataataacacaaataatacacatatatacacaataacacacattcaatgatcgaaaataatttaaaaatatgggaatgtaaactcttgtgacgtaaagtcaaaaatataagtctccccaccaccgtcggacaagacaaccgtaataaagtctaataaccgtgcttagtacatgttttttttctcttttttcttttctgttgaaaagcatgttttgtcatgatttttccaaaacaataaattattaaataccaagaaagaaaaagcatgtactaagcagataagttttttgctctcctgaaaagctgtagattttgacttataggttttggaatttagctgtcaattatgttctaagtatttattggcctggtccagacagtgacttgtccataaacttctttttggcaaagcacagccaccacttgcttggtttcttatcttctccaaaaaccttatcacaaactctcattcccacttcctgtctgagttgcgtcaaatacgccttcaagacatcaccatcattttgatttgctggtttactgtaaactgaattgagtggaaaacctggatcccctggtatatcaaacctagatatggcaagtgatcgcatctcgttctgggcttgaactttagtactacatttctgcagcttcttcaagcattctgttatgtagagagtaatgtatatcaacaatctatcagcctcggacttaatttcgtaggttctgaagaaaacattggctttgaaatagaagagtgattcatcaatgatatcctgttcttgctcattactttgtactggaccaggccctttgaatcgagtctttattggcagaattgctatgttgcctacaattgaggagggctccaaaaaactggaatgataagccggcatttttatagttctgcgttgagttatttacatacgaaatatttttataaaacaattcaggaaataaataactaaaagctacaattttgacgctatttttaaggttaatgtttagtctggttgacg

SEQ ID NO: 1494 - DNA, 1703 bp, Diabrotica virgifera
tgtttacatttaaatataattaatctattaatctaagcgccatctacacgataattgtcaatgtatcagaagtggaacagaaggaaactactattcgccagtcaatacgtcaaaataataagcaaaatcttaaaaaaataataatctaattacttctgtacattgtaaatattacacgataagaattaaataataaatttgaaacagttatttgctattatcgtaataattttctcattaaatttccggcaaaagttgcacacataatccgctagttggcgataccagcgaagctcatagcgaatagttctacaacacggttcttagacattactacggttgcctaaatcgactaaccaatgaacattaagggtgagattacgtcacgagagtttactgtcatttgaatcgtaatatgatttttttcgaatcctgagaaaaccaagtattttagaaaaattaaacgcaggatgcaagattacattattaccgagggcggaaagccccttagaataaacaagcagattctattgaatgaaatatttgaaattaaatatcacacttctcttttattttcagccctgtaacttattaaaataaacattatagaagttttcatggactttcagccctcggtaataatgtagtctttcattctgagtttaaatttttcaaaaatatttattagttttctcaggattcgaaaaaaatgaatacaattaaaacacattgagaattttgacatgcgtcaaaattttatattaactctgtaaaattcttaactgttgaattccagcttccccaataattattgtacatcaaaagacattagaaactatttgtagaggattaaaatctgtattggaaataactgttaaaaattttgtaaaaatgtaatacattttagttttcagcccaaacttaggccacacacaatgcaataatgttcacatttttgaactgtcaatatttttattttatcatctattgcatctattgtttaaaaacaatatagttgataagataccctcagttgcggagaaaggattaataataaagatttttttattcagtcaatggtgtgagcactgtcagttaaatagtaacgtgtggccttacttttacacgcatacctattgtggcaaatgtatcatatttttcaaaattttggaatgcatttaaatcgtagaacaaacttttgattttaatacagattttaattctctacaagtattctctcatgacttttgatgtaaaataattagggaagcaggaattcaacaattcagaattttacattgagtttcctatggccctttttacgattcaccacccggtataagataaaatgtgtactatttgtcttattatttcataataacacaaataatacacatatatacacaataacacacattcaatgatcgaaaataatttaaaaatatgggaatgtaaactcttgtgacgtaaagtcaaaaatataagtctccccaccaccgtcggacaagacaaccgtaataaagtctaataaccgtggtttctgatagtacaaacgtcactgtcagtgtcgaattaccgacgcactgttgcctcacttttgaaagttcccagaactttcgcaatcttggaccgcgtttgttgctacctgttcgtacactcctttatttacctattctagagttctaaacatatcttctagagct

SEQ ID NO: 1495 - DNA, 1506 bp, Diabrotica virgifera
aaccagaaaattaaattactatccacttaacatcgacagttaaatccaaaacctctacaacttaaagttaaaatctacaacttttcagaagagagaaaaaatttaggtacttagtacacacggttcttagacattactacggttgcctaaatcgactaaccaatgaacattaagggtgagattacgtcacgagagtttactgtcatttgaatcgtaatatgatttttttcgaatcctgagaaaaccaagtattttagaaaaattaaacgcaggatgcaagattacattattaccgagggcggaaagccccttagaataaacaagcagattctattgaatgaaatatttgaaattaaatatcacacttctcttttattttcagccctgtaacttattaaaataaacattatagaagttttcatggactttcagccctcggtaataatgtagtctttcattctgagtttaaatttttcaaaaatatttattagttttctcaggattcgaaaaaaatgaatacaattaaaacacattgagaattttgacatgcgtcaaaattttatattaactctgtaaaattcttaactgttgaattccagcttccccaataattattgtacatcaaaagacattagaaactatttgtagaggattaaaatctgtattggaaataactgttaaaaattttgtaaaaatgtaatacattttagttttcagcccaaacttaggccacacacaatgcaataatgttcacatttttgaactgtcaatatttttattttatcatctattgcatctattgtttaaaaacaatatagttgataagataccctcagttgcggagaaaggattaataataaagatttttttattcagtcaatggtgtgagcactgtcagttaaatagtaacgtgtggccttacttttacacgcatacctattgtggcaaatgtatcatatttttcaaaattttggaatgcatttaaatcgtagaacaaacttttgattttaatacagattttaattctctacaagtattctctcatgacttttgatgtaaaataattagggaagcaggaattcaacaattcagaattttacattgagtttcctatggccctttttacgattcaccacccggtataagataaaatgtgtactatttgtcttattatttcataataacacaaataatacacatatatacacaataacacacattcaatgatcgaaaataatttaaaaatatgggaatgtaaactcttgtgacgtaaagtcaaaaatataagtctccccaccaccgtcggacaagacaaccgtaataaagtctaataaccgtggtttctgatagtacaaacgtcactgtcagtgtcgaattaccgacgcactgttgcctcacttttgaaagttcccagaactttcgcaatcttggaccgcgtttgttgctacctgttcgtacactcctttatttacctattctagagttctaaacatatcttctagagct

SEQ ID NO: 1496 - DNA, 1620 bp, Diabrotica virgifera
  SmartBlast Evalue=6E-71; Info=Actin-related protein 2/3 complex subunit 3 n=2 Tax=Formicidae RepID=E2ALF1_9HYME
acatcaaaagacatgagcaaccatttgtagaggattgaaatatgtattgaaaaaaactgttaaaattgttctaccaattaaacacatttaaaaatttgtaataatataatacatttttcagtttttcggccgaatattaggtcacacacagtgcaataatgtgtcacaatgaagttattattttcacatttttgaactgtcaatatttttattttatcatttattgtttaaaaacaatacagttgataagataccctcagttgcggagaaaggattaataataaagatttttttattcagtcaatggtgtgagcactgtcagttaaatagtaacgtgtggccttacttttacacgcatacctattgtggcaaatttatcatatttttcaaaattttggaatgcatttaaatcgtagaacaaacttttgattttaatacagattttaattctctacaagtattctctcatgacttttgatgtaaaataattagggaagcaggaattcaacaattcagaattttacattgagtttcctatggccatttttacgattcaccacccagtataagataaaatgtgtactatttgtctaattatttcataataacacaaataatacacatatatacacaataacacacattcaatgatcgaaaataatttaaaaatatgggaatgtaaactcttgtgacgtaaagtcaaaaatataagtctccccaccaccgtcggacaagacaaccgtaataaagtctaataaccgtgcttagtacatgttttttttctcttttttcttttctgttgaaaagcatgttttgtcatgatttttccaaaacaataaattattaaataccaagaaagaaaaagcatgtactaagcagataagttttttgctctcctgaaaagctgtagattttgacttataggttttggaatttagctgtcaattatgttctaagtatttattggcctggtccagacagtgacttgtccataaacttctttttggcaaagcacagccaccacttgcttggtttcttatcttctccaaaaaccttatcacaaactctcattcccacttcctgtctgagttgcgtcaaatacgccttcaagacatcaccatcattttgatttgctggtttactgtaaactgaattgagtggaaaacctggatcccctggtatatcaaacctagatatggcaagtgatcgcatctcgttctgggcttgaactttagtactacatttctgcagcttcttcaagcattctgttatgtagagagtaatgtatatcaacaatctatcagcctcggacttaatttcgtaggttctgaagaaaacattggctttgaaatagaagagtgattcatcaatgatatcctgttcttgctcattactttgtactggaccaggccctttgaatcgagtctttattggcagaattgctatgttgcctacaattgaggagggctccaaaaaactggaatgataagccggcatttttatagttctgcgttgagttatttacatacgaaatatttttataaaacaattcaggaaataaataactaaaagctacaattttgacgctatttttaaggttaatgtttagtctggttgacg

SEQ ID NO: 1497 - DNA, 1572 bp, Diabrotica virgifera
  SmartBlast Evalue=5E-71; Info=Actin-related protein 2/3 complex subunit 3 n=2 Tax=Formicidae RepID=E2ALF1_9HYME
gaagaggattgaaatctgtattggtaataactgttaaaattggtctacgtaattaaacatattccaaaattttgtaaaaatgtaatacattttagttttcagcccaaacttaggccacacacaatgcaataatgttcacatttttgaactgtcaatatttttattttatcatttattgtttaaaaacaatacagttgataagataccctcagttgcggagaaaggattaataataaagatttttttattcagtcaatggtgtgagcactgtcagttaaatagtaacgtgtggccttacttttacacgcatacctattgtggcaaatttatcatatttttcaaaattttggaatgcatttaaatcgtagaacaaacttttgattttaatacagattttaattctctacaagtattctctcatgacttttgatgtaaaataattagggaagcaggaattcaacaattcagaattttacattgagtttcctatggccatttttacgattcaccacccagtataagataaaatgtgtactatttgtctaattatttcataataacacaaataatacacatatatacacaataacacacattcaatgatcgaaaataatttaaaaatatgggaatgtaaactcttgtgacgtaaagtcaaaaatataagtctccccaccaccgtcggacaagacaaccgtaataaagtctaataaccgtgcttagtacatgttttttttctcttttttcttttctgttgaaaagcatgttttgtcatgatttttccaaaacaataaattattaaataccaagaaagaaaaagcatgtactaagcagataagttttttgctctcctgaaaagctgtagattttgacttataggttttggaatttagctgtcaattatgttctaagtatttattggcctggtccagacagtgacttgtccataaacttctttttggcaaagcacagccaccacttgcttggtttcttatcttctccaaaaaccttatcacaaactctcattcccacttcctgtctgagttgcgtcaaatacgccttcaagacatcaccatcattttgatttgctggtttactgtaaactgaattgagtggaaaacctggatcccctggtatatcaaacctagatatggcaagtgatcgcatctcgttctgggcttgaactttagtactacatttctgcagcttcttcaagcattctgttatgtagagagtaatgtatatcaacaatctatcagcctcggacttaatttcgtaggttctgaagaaaacattggctttgaaatagaagagtgattcatcaatgatatcctgttcttgctcattactttgtactggaccaggccctttgaatcgagtctttattggcagaattgctatgttgcctacaattgaggagggctccaaaaaactggaatgataagccggcatttttatagttctgcgttgagttatttacatacgaaatatttttataaaacaattcaggaaataaataactaaaagctacaattttgacgctatttttaaggttaatgtttagtctggttgacg

SEQ ID NO: 1498 - DNA, 1054 bp, Diabrotica virgifera
  SmartBlast Evalue=3E-71; Info=Actin-related protein 2/3 complex subunit 3 n=2 Tax=Formicidae RepID=E2ALF1_9HYME
aaacattgtaagaaagaataatataaataaatttttaaagcataaaactgtttacataatatatttgcattgctttgaaaagcagttaaccacaaaattaaattactatccacttaacatcgacagttaaatccaaaacctctacaacttaaagttaaaatctacaacttttcaggagagagaaaaaatttaggtacttagtacatgttttttctttctcttctttcttttctgttaaaaagcatgttttgtcatgatttttccaaaacaataaattattaaataccaagaaagaaaaagcatgtactaagcagataagttttttgctctcctgaaaagctgcagattctgacttatagttttggaatttagctgtcaattatgttctaagtatttattggcctggtccagacagtgacttgtccataaacttctttttggcaaagcacagccaccacttgcttggtttcttatcttctccaaaaaccttatcacaaactctcattcccacttcctgtctgagttgcgtcaaatacgccttcaagacatcaccatcattttgatttgctggtttactgtaaactgaattgagtggaaaacctggatcccctggtatatcaaacctagatatggcaagtgatcgcatctcgttctgggcttgaactttagtactacatttctgcagcttcttcaagcattctgttatgtagagagtaatgtatatcaacaatctatcagcctcggacttaatttcgtaggttctgaagaaaacattggctttgaaatagaagagtgattcatcaatgatatcctgttcttgctcattactttgtactggaccaggccctttgaatcgagtctttattggcagaattgctatgttgcctacaattgaggagggctccaaaaaactggaatgataagccggcatttttatagttctgcgttgagttatttacatacgaaatatttttataaaacaattcaggaaataaataactaaaagctacaattttgacgctatttttaaggttaatgtttagtctggttgacg

SEQ ID NO: 1499 - DNA, 930 bp, Diabrotica virgifera
acatcaaaagacatgagcaaccatttgtagaggattgaaatatgtattgaaaaaaactgttaaaattgttctaccaattaaacacatttaaaaatttgtaataatataatacatttttcagtttttcggccgaatattaggtcacacacagtgcaataatgtgtcacaatgaagttattattttcacatttttgaactgtcaatatttttattttatcatttattgtttaaaaacaatacagttgataagataccctcagttgcggagaaaggattaataataaagatttttttattcagtcaatggtgtgagcactgtcagttaaatagtaacgtgtggccttacttttacacgcatacctattgtggcaaatgtatcatatttttcaaaattttggaatgcatttaaatcgtagaacaaacttttgattttaatacagattttaattctctacaagtattctctcatgacttttgatgtaaaataattagggaagcaggaattcaacaattcagaattttacattgagtttcctatggccctttttacgattcaccacccggtataagataaaatgtgtactatttgtcttattatttcataataacacaaataatacacatatatacacaataacacacattcaatgatcgaaaataatttaaaaatatgggaatgtaaactcttgtgacgtaaagtcaaaaatataagtctccccaccaccgtcggacaagacaaccgtaataaagtctaataaccgtggtttctgatagtacaaacgtcactgtcagtgtcgaattaccgacgcactgttgcctcacttttgaaagttcccagaactttcgcaatcttggaccgcgtttgttgctacctgttcgtacactcctttatttacctattctagagttctaaacatatcttctagagct

SEQ ID NO: 1500 - DNA, 882 bp, Diabrotica virgifera
gaagaggattgaaatctgtattggtaataactgttaaaattggtctacgtaattaaacatattccaaaattttgtaaaaatgtaatacattttagttttcagcccaaacttaggccacacacaatgcaataatgttcacatttttgaactgtcaatatttttattttatcatttattgtttaaaaacaatacagttgataagataccctcagttgcggagaaaggattaataataaagatttttttattcagtcaatggtgtgagcactgtcagttaaatagtaacgtgtggccttacttttacacgcatacctattgtggcaaatgtatcatatttttcaaaattttggaatgcatttaaatcgtagaacaaacttttgattttaatacagattttaattctctacaagtattctctcatgacttttgatgtaaaataattagggaagcaggaattcaacaattcagaattttacattgagtttcctatggccctttttacgattcaccacccggtataagataaaatgtgtactatttgtcttattatttcataataacacaaataatacacatatatacacaataacacacattcaatgatcgaaaataatttaaaaatatgggaatgtaaactcttgtgacgtaaagtcaaaaatataagtctccccaccaccgtcggacaagacaaccgtaataaagtctaataaccgtggtttctgatagtacaaacgtcactgtcagtgtcgaattaccgacgcactgttgcctcacttttgaaagttcccagaactttcgcaatcttggaccgcgtttgttgctacctgttcgtacactcctttatttacctattctagagttctaaacatatcttctagagct

SEQ ID NO: 1501 - DNA, 1225 bp, Diabrotica virgifera
  SmartBlast Evalue=6E-32; Info=Reverse transcriptase n=1 Tax= Schistosoma mansoni RepID=Q7RTK8_SCHMA
gatattgtcaatatttatgagttgcgctcctgggacgaccctactgaaagatagttcattcgattacatgaaatcaaccccaactcaagaatatccgtcacaaaaaaattatagcatgtgatctgtctttaaaaagacaaccaaatgcaacgacagtaaaattctcgcgttagagacttcatagtaaatcacaagggaaaaccaggaaaaaccctgtgatactatcccgacatcgtaagtatttggtcttacattaatttactctcaaaaaataataccaaattctgacttgtaacatgtttaaattataaataatattaataatactagatatataagtaatactaaaatataaaatatgtactagctcgatattattgacttactaatcttggtattttctttctattgacttcctctttcagtatgggtaaccacatcctactgcattctaccgaggaatttgcgacacaattggtttcatttagcataattagagccgcttctttgatttttctctttttactatctgtttctttcaggactatacttgaatctctccactgaactctatgttcattatcccatgcgtgttgacatatttgagatctctcaaattctctatttttaatataagattgatgttcacttattctaacgtctaatggtcttgatgtttcacctaaataaaattgttcgcattcacaaggtattttataaatacaattctttgttctttcttgttcattgttaggtttagttttagatagaatagatctcaatgtgtttgttgttttgaatgttgttgaaatgttgaatttatttcctattgttttaagtttctcggatagtccttttatatatggtattgatattttcctcgtattatttcttgtgaatgttgtaggatcccgttctaagttgttctgttccattcgatccaatcttgacaattccttatttataaacgataaaggataatcattttttaataaaacagatgttaacaattgtttttcttctaaaaatgaattttcgttagaacaagtaattttggctctatcatataaggattttatgattccctttttaacgttgatgttgtgatttgatttgtaattgagatatctgttggtatgtgttggttttctatacacttgagtctcatatccagtatccttctttgagactcaaacatcgaggaaaggcagactgttattatatt

SEQ ID NO: 1502 - DNA, 980 bp, Diabrotica virgifera
  SmartBlast Evalue=3E-32; Info=Reverse transcriptase n=1 Tax= Schistosoma mansoni RepID=Q7RTK8_SCHMA
gacattgtaagtatttggttttacattcagtttactctcaaaactaacaccaaagtttgattttacatgtatgctattttaaattataaataatattaataatatatagatatgtactattctccatatgttattgacttctcatcgtggtattttctttctattgactttctcttttagtatgggtaaacacatcctactgcattctaccgaggaatttgcgacacaattggtttcatttagcataattagagccgcttctttgatttttctctttttactatctgtttctttcaggactatacttgaatctctccactgaactctatgttcattatcccatgcgtgttgacatatttgagatctatcaaattctctatttttaatataagactgatgttcacttattctaacgtctaatggtcttgatgtttcacctaaataaaattgttcgcattcacaaggtattttataaatacaattctttgttctttcttgttcattgttaggtttagttttagatagaatagatctcaatgtgtttgttgttttgaatgttgttgaaatgttgaatttatttcctattgttttaagtttctcggatagtccttttatatatggtattgatattttcctcgtattatttcttgtgaatgttgtaggatcccgttctaagttgttctgttccattcgatccaatcttgacaattccttatttataaacgataaaggataatcattttttaataaaacagatgttaacaattgtttttcttctaaaaatgaattttcgttagaacaagtaattttggctctatcatataaggattttatgattccctttttaacgttgatgttgtgatttgatttgtaattgagatatctgttggtatgtgttggttttctatacacttgagtctcatatccagtatccttctttgagactcaaacatcgaggaaaggcagactgttattatatt

SEQ ID NO: 1503 - DNA, 2508 bp, Diabrotica virgifera
  SmartBlast Evalue=2E-37; Info=Reverse transcriptase n=1 Tax= Schistosoma mansoni RepID=Q7RTK8_SCHMA
gaatagaggtagcccgacaggggtttattaaaatgaaaagcttattttgtaacagtagcattaatatcagccttagatgtcattttctgcattgctatgtgtggtcaatacttttgtatggaacggaggcctggacacaacacaacactgatgaacaagttggacgcctttgaactctggctttatagaagagacttgaaaataccttggacaacccacaccaccaacgaatatgttctgaggagaataggtacagatagggaactgctaaaaatcattaaagtcaaaaaagttagctacctgggacacataatgagaaacgaaaagtaccgtctcacgcaactgaccatcccgggagaggataagagactggaccggccttgattcaacatctttgtttagagccgcattggacagatacagatttgccagtgtatcgctaaactccactaaaggagaaagcaccacaagaagaagaactttcgccttgtcatggtgatgacatgtgagcaataaattacaaaaaaagttttgacagttttgtggtttgacaaaagtttgaattttaaaatgtcaaaatggtgcaatggtgcatctcactcgcactcacattgatagctgcatcaatacgctcctagcgctcattgttaatagttaaaaataaccgcttagtaataaaataataacaaaaacttcttcagtatcttgtaggggggtcgttaaaattttatttggtgactttcataataataatttttaactgagttattaagccttgaaaatggccattttcgtattttgcaaatttcaaatcgcgtataactcgagaacaagaaaattttacggagaaatcacaaaagacctcttttgctccgaatgacccaaatgatgtaaagaaaattgtcctaaataattttttttgtgagcttgtttaaaaaaattgttcaaacaacccttcgaccacagtaccacctgacaccctgtcgattcgttatttggtcgaagagaacctcttttttagtaagtttgtgcaaaaaaatcgaacggaataatccacctaacggggacgacgatacagcctagactaatttgaacatattcagtaacatttaatttctaggatgggctgtttgtgtgaatcagaatcaacttttactaaatggcattgggaagagtatacttttcctagttggagtctacttttactagtaaatgttgaatataaatcttcattttatatttataatcaacttttactgaaaccagccgttagagtcgactccaactagttggagtcaactccaactggataatcaacttgaactgtaacatatacataatactaaaatataaaatatgtactaactcgatatgttattgacttactaatctggtattttctttctattgacttcctctttcagtatgggtaaccacatcctactgcattctaccgaggaatttgcgacacaattggtttcatttagcataattagagccgcttctttgatttttctctttttactatctgcttctttcaggactatacttgaatctctccactgaactctatgttcattatcccatgcgtgttgacatatttgagatctctcaaattctctatttttaatataagattgatgttcacttattctaacgtctaatggtcttgatgtttcacctaaataaaattgttcgcattcacaaggtattttataaatacaattctttgttctttcttgttcattgttaggtttagttttagatagaatagatctcaatgtgtttgttgttttgaatgttgttgaaatgttgaatttatttcctattgttttaagtttctcggatagtccttttatatatggtattgatattttcctcgtattatttcttgtgaatgttgtaggatcccgttctaagttgttctgttccattcgatccaatcttgacaattccttatttataaacgataaaggataatcattttttaataaaacagatgttaacaattgtttttcttctaaaaaggaattttcgttagaacaagtaattttggctctatcatataaggatttaatgattccctttttaacgttgatgttgtgatttgacttgtaattgagatatctgttggtgtgtgttggttttctatacacttgagtctcatatccaatatccttctttgagatcaaaacatcgaggaaaggtaggctgttattgtattccttttccattgtaaattttattgtctcttcttgatcgtttataatattcaggaatgtatccaacaattctgatccatgaggccatattgaaaacacatcatctacatagattgagtttttaatttagtttattttagcaacattccgtattccgacaacggcacccgacttgggcgtcgaaacgttaacaaaaccattttcttcattctaactgtggcccatttcccatataaataattaactattcttgtacattatgctattgattgaaattgtacaagaa

SEQ ID NO: 1504 - DNA, 2224 bp, Diabrotica virgifera
  SmartBlast Evalue=2E-31; Info=Reverse transcriptase n=1 Tax= Schistosoma mansoni RepID=Q7RTK8_SCHMA
gaatagaggtagcccgacaggggtttattaaaatgaaaagcttattttgtaacagtagcattaatatcagccttagatgtcattttctgcattgctatgtgtggtcaatacttttgtatggaacggaggcctggacacaacacaacactgatgaacaagttggacgcctttgaactctggctttatagaagagacttgaaaataccttggacaacccacaccaccaacgaatatgttctgaggagaataggtacagatagggaactgctaaaaatcattaaagtcaaaaaagttagctacctgggacacataatgagaaacgaaaagtaccgtctcacgcaactgaccatcccgggagaggataagagactggaccggccttgattcaacatctttgtttagagccgcattggacagatacagatttgccagtgtatcgctaaactccactaaaggagaaagcaccacaagaagaagaactttcgccttgtcatggtgatgacatgtgagcaataaattacaaaaaaagttttgacagttttgtggtttgacaaaagtttgaattttaaaatgtcaaaatggtgcaatggtgcatctcactcgcactcacattgatagctgcatcaatacgctcctagcgctcattgttaatagttaaaaataaccgcttagtaataaaataataacaaaaacttcttcagtatcttgtaggggggtcgttaaaattttatttggtgactttcataataataatttttaactgagttattaagccttgaaaatggccattttcgtattttgcaaatttcaaatcgcgtataactcgagaacaagaaaattttacggagaaatcacaaaagacctcttttgctccgaatgacccaaatgatgtaaagaaaattgtcctaaataattttttttgtgagcttgtttaaaaaaattgttcaaacaacccttcgaccacagtaccacctgacaccctgtcgattcgttatttggtcgaagagaacctcttttttagtaagtttgtgcaaaaaaatcgaacggaataatccacctaacggggacgacgatacagcctagactaatttgaacatattcagtaacatttaatttctaggatgggctgtttgtgtgaatcagaatcaacttttactaaatggcattgggaagagtatacttttcctagttggagtctacttttactagtaaatgttgaatataaatcttcattttatatttataatcaacttttactgaaaccagccgttagagtcgactccaactagttggagtcaactccaactggataatcaacttgaactgtaacatatacataatactaaaatataaaatatgtactaactcgatatgttattgacttactaatctggtattttctttctattgacttcctctttcagtatgggtaaccacatcctactgcattctaccgaggaatttgcgacacaattggtttcatttagcataattagagccgcttctttgatttttctctttttactatctgcttctttcaggactatacttgaatctctccactgaactctatgttcattatcccatgcgtgttgacatatttgagatctctcaaattctctatttttaatataagattgatgttcacttattctaacgtctaatggtcttgatgtttcacctaaataaaattgttcgcattcacaaggtattttataaatacaattctttgttctttcttgttcattgttaggtttagttttagatagaatagatctcaatgtgtttgttgttttgaatgttgttgaaatgttgaatttatttcctattgttttaagtttctcggatagtccttttatatatggtattgatattttcctcgtattatttcttgtgaatgttgtaggatcccgttctaagttgttctgttccattcgatccaatcttgacaattccttatttataaacgataaaggataatcattttttaataaaacagatgttaacaattgtttttcttctaaaaatgaattttcgttagaacaagtaattttggctctatcatataaggattttatgattccctttttaacgttgatgttgtgatttgatttgtaattgagatatctgttggtatgtgttggttttctatacacttgagtctcatatccagtatccttctttgagactcaaacatcgaggaaaggcagactgttattatatt

SEQ ID NO: 1505 - DNA, 2187 bp, Diabrotica virgifera
aaagatgaacgaaaacctgctacgaaacatttgaatattgttcgaactttttctcgaatcacttgacaattgacatttcaatttgcattaaattttatattatttttaattcaatagtacattagtagcttaaagaatcatccagagtacaatacaaggtactatgctgttatacgcattcataagttagtacatagtacttttagcaaatgtgctttagaaaacttgcaatcttttgcgaaataaacaatcatgagtaatttcttaaatctacccttcgaagaaccgaatttgtaagactacataaggtttgacagtacatttataaatttgttaaactatttaaaatgagctgaatttgttcatacgttaaaattcgaattctgttctgagtcccttaagtactaaattttgtttatttttatttaaagtataactacgaatctgggggcttttattagatacatccaacgcccgccccttagtgtcaacttttattcatttccctggctattatttggatatctttggtcagttgtgagagatcgatttcttagtatctcctactgtctctactagtttttctaataaagctatgtaaagggattctggatatcgatctaggcgattttttcatctaatcttttattcttctttccttgctcgggatcggcttctgcaattgttttacaaatgtcccattcctcgcaattaaaacatctatttttatttcgagcttttgttgaagattttgcagtatgtttaaaatttgggataaatagattgttgcttatctgcgtgagttcttcattttctcgaaatcttatttcttttaattttgggctaaatctggaaatgcttttggccgctttctactactgtaatcagagaacttgtatttcgacaacctgtagtacatctatagctataccaattcgttctagaaaatcttaaggtgcctgagggtacgccaaatgctgcaatcttttgatatcggcttcaaattcttgcacactttcgttgtttttggtatcgaacttttagatgactttagaaacctggtttagatgctgctggccatatactgtctctaaaacttgaacgagagaggtataactgtcctcgaagcgacactaccaataaagatgacatttctgtctcagtccaaccattcgttctagctgcagcttcgaattgaaaacgttcaacgatgtaagatgatgaagctgtgtgttcagattcgacattagctaccgagacaatgttagataaaagagcttgggtgttaatttttctttctaacgcaacttattgtctttctaaattagattttaaatcgttttcttgttgttttaaaaccttttgatattcttctaatttgtgtattcttctagtaatttgaattacatctaactgaaaattttcgtgaacatgagataaaccgcttatggtttatagctatacttttctacgcatctccttctattcatcttgtctacgcttctccttcagatcttcgtcttattgtccactcttctccttcatctccttacgcttctccttttcctatttctctttttctacgcttctcttctttaattttaaataccatgctgaaaaaatccaaataaaatgtatggatgagcgaaagaaaagcagtactatcgaaaatcagcgatgaaagaaggcaagaatatttttggatttgcatttggttgtctttttaaagacagatcacatgctatgattttttgtggcggatattcttgagttgggattgatttcatgtaatcgaatgaactatcttttagtaaagtcgtcccaggaacgcaactcatcaatattggcaatatcattttaaagtcgtctactttaaaatgtataatacgtgtctgaattgccgatataaatgagtcagattaaataaattattagaagaattttttactaagcaacaacatttttatttatttagtattattttgtattttgacaacgacacccgacttgggcgtcgaaacgttaataaaatcatttttaggtaaaattgtggcttatttcccatttgaatatacttgattataaaaatgccacaagaaaatagcttcagaacaactagaatacttataaacaagcccatctagatgaaaaacattcgacaaaaaacaactaaaaaagggtttaata

SEQ ID NO: 1506 - DNA, 1814 bp, Diabrotica virgifera
  SmartBlast Evalue=4E-36; Info=Reverse transcriptase n=1 Tax= Schistosoma mansoni RepID=Q7RTK8_SCHMA
ttcttgtacaatttcaatcaatagcataatgtacaagaatagttaattatttatatgggaaatgggccacagttagaatgaagaaaatggttttgttaacgtttcgacgcccaagtcgggtgccgttgtcggaatacggaatgttgctaaaataaactaaattaaaaactcaatctatgtagatgatgtgttttcaatatggcctcatggatcagaattgttggatacattcctgaatattataaacgatcaagaagagacaataaaatttacaatggaaaaggaatacaataacagcctacctttcctcgatgttttgatctcaaagaaggatattggatatgagactcaagtgtatagaaaaccaacacacaccaacagatatctcaattacaagtcaaatcacaacatcaacgttaaaaagggaatcattaaatccttatatgatagagccaaaattacttgttctaacgaaaattcctttttagaagaaaaacaattgttaacatctgttttattaaaaaatgattatcctttatcgtttataaataaggaattgtcaagattggatcgaatggaacagaacaacttagaacgggatcctacaacattcacaagaaataatacgaggaaaatatcaataccatatataaaaggactatccgagaaacttaaaacaataggaaataaattcaacatttcaacaacattcaaaacaacaaacacattgagatctattctatctaaaactaaacctaacaatgaacaagaaagaacaaagaattgtatttataaaataccttgtgaatgcgaacaattttatttaggtgaaacatcaagaccattagacgttagaataagtgaacatcagtcttatattaaaaatagagaatttgatagatctcaaatatgtcaacacgcatgggataatgaacatagagttcagtggagagattcaagtatagtcctgaaagaacagatagtaaaaagagaaaaatcaaagaagcggctctaattatgctaaatgaaaccaattgtgtcgcaaattcctcggtagaatgcagtaggatgtggttacccatattaaaggaggaagtcaatagaaagaaaataccacaattagtaaatcagtaacatatcgagttagtacatatttagtattttagtttatttaaaatttaaaatatcaagtcagaatttggtattagttttgagagtaaactaaatgtaaacacaaatacttacgatgtcgggatagtatcacgaggtttttcctggttttccctcgtgatttactatggaatctctaacgcgagaatttcagtgccaccgttgcatttggttgtctttttaaagacagatcacatgctatgattttttgtggcggatattcttgagttgggattgatttcatgtaatcgaatgaactatcttttagtaaagtcgtcccaggaacgcaactcatcaatattggcaatatcattttaaagtcgtctactttaaaatgtataatacgtgtctgaattgccgatataaatgagtcagattaaataaattattagaagaattttttactaagcaacaacatttttatttatttagtattattttgtattttgacaacgacacccgacttgggcgtcgaaacgttaataaaatcatttttaggtaaaattgtggcttatttcccatttgaatatacttgattataaaaatgccacaagaaaatagcttcagaacaactagaatacttataaacaagcccatctagatgaaaaacattcgacaaaaaacaactaaaaaagggtttaata

SEQ ID NO: 1507 - DNA, 1584 bp, Diabrotica virgifera
  SmartBlast Evalue=6E-38; Info=Reverse transcriptase n=1 Tax= Schistosoma mansoni RepID=Q7RTK8_SCHMA
ttcttgtacaatttcaatcaatagcataatgtacaagaatagttaattatttatatgggaaatgggccacagttagaatgaagaaaatggttttgttaacgtttcgacgcccaagtcgggtgccgttgtcggaatacggaatgttgctaaaataaactaaattaaaaactcaatctatgtagatgatgtgttttcaatatggcctcatggatcagaattgttggatacattcctgaatattataaacgatcaagaagagacaataaaatttacaatggaaaaggaatacaataacagcctacctttcctcgatgttttgatctcaaagaaggatattggatatgagactcaagtgtatagaaaaccaacacacaccaacagatatctcaattacaagtcaaatcacaacatcaacgttaaaaagggaatcattaaatccttatatgatagagccaaaattacttgttctaacgaaaattcctttttagaagaaaaacaattgttaacatctgttttattaaaaaatgattatcctttatcgtttataaataaggaattgtcaagattggatcgaatggaacagaacaacttagaacgggatcctacaacattcacaagaaataatacgaggaaaatatcaataccatatataaaaggactatccgagaaacttaaaacaataggaaataaattcaacatttcaacaacattcaaaacaacaaacacattgagatctattctatctaaaactaaacctaacaatgaacaagaaagaacaaagaattgtatttataaaataccttgtgaatgcgaacaattttatttaggtgaaacatcaagaccattagacgttagaataagtgaacatcaatcttatattaaaaatagagaatttgagagatctcaaatatgtcaacacgcatgggataatgaacatagagttcagtggagagattcaagtatagtcctgaaagaatcagatagtaaaaagagaaaaatcaaagaagcggctctaattatgctaaatgaaaccaattgtgtcgcaaattcctcggtagaatgcagtaggatgtggttacccatactgaaagaggaagtcaatagaaagaaaataccaagattagtaagtcaataatatcgagctagtacatattttatattttagtattacttatatatctagtattattaatattatttataatttaaacatgttacaagtcagaatttggtattattttttgagagtaaattaatgtaagaccaaatacttacgatgtcgggatagtatcacagggtttttcctggttttcccttgtgatttactatgaagtctctaacgcgagaattttactgtcgttgcatttggttgtctttttaaagacatatcacatgctataattttttatgacggatattcttgagttggggttaatttcatgtaatcgaatgaactatctttcagtaagtcgtcccaggaacgcaactcataaatattggcaatatcattttaaagtcttctactttaaaatgtataatatatgtctgaattgccaatataaatgagtgagattaaataaatta

SEQ ID NO: 1508 - DNA, 1530 bp, Diabrotica virgifera
  SmartBlast Evalue=3E-30; Info=Reverse transcriptase n=1 Tax= Schistosoma mansoni RepID=Q7RTK8_SCHMA
aatataataacagtctgcctttcctcgatgtttgagtctcaaagaaggatactggatatgagactcaagtgtatagaaaaccaacacataccaacagatatctcaattacaaatcaaatcacaacatcaacgttaaaaagggaatcataaaatccttatatgatagagccaaaattacttgttctaacgaaaattcatttttagaagaaaaacaattgttaacatctgttttattaaaaaatgattatcctttatcgtttataaataaggaattgtcaagattggatcgaatggaacagaacaacttagaacgggatcctacaacattcacaagaaataatacgaggaaaatatcaataccatatataaaaggactatccgagaaacttaaaacaataggaaataaattcaacatttcaacaacattcaaaacaacaaacacattgagatctattctatctaaaactaaacctaacaatgaacaagaaagaacaaagaattgtatttataaaataccttgtgaatgcgaacaattttatttaggtgaaacatcaagaccattagacgttagaataagtgaacatcagtcttatattaaaaatagagaatttgatagatctcaaatatgtcaacacgcatgggataatgaacatagagttcagtggagagattcaagtatagtcctgaaagaacagatagtaaaaagagaaaaatcaaagaagcggctctaattatgctaaatgaaaccaattgtgtcgcaaattcctcggtagaatgcagtaggatgtggttacccatattaaaggaggaagtcaatagaaagaaaataccacaattagtaaatcagtaacatatcgagttagtacatatttagtattttagtttatttaaaatttaaaatatcaagtcagaatttggtattagttttgagagtaaactaaatgtaaacacaaatacttacgatgtcgggatagtatcacgaggtttttcctggttttccctcgtgatttactatggaatctctaacgcgagaatttcagtgccaccgttgcatttggttgtctttttaaagacagatcacatgctatgattttttgtggcggatattcttgagttgggattgatttcatgtaatcgaatgaactatcttttagtaaagtcgtcccaggaacgcaactcatcaatattggcaatatcattttaaagtcgtctactttaaaatgtataatacgtgtctgaattgccgatataaatgagtcagattaaataaattattagaagaattttttactaagcaacaacatttttatttatttagtattattttgtattttgacaacgacacccgacttgggcgtcgaaacgttaataaaatcatttttaggtaaaattgtggcttatttcccatttgaatatacttgattataaaaatgccacaagaaaatagcttcagaacaactagaatacttataaacaagcccatctagatgaaaaacattcgacaaaaaacaactaaaaaagggtttaata

SEQ ID NO: 1509 - DNA, 1509 bp, Diabrotica virgifera
  SmartBlast Evalue=6E-38; Info=Reverse transcriptase n=1 Tax= Schistosoma mansoni RepID=Q7RTK8_SCHMA
ttcttgtacaatttcaatcaatagcataatgtacaagaatagttaattatttatatgggaaatgggccacagttagaatgaagaaaatggttttgttaacgtttcgacgcccaagtcgggtgccgttgtcggaatacggaatgttgctaaaataaactaaattaaaaactcaatctatgtagatgatgtgttttcaatatggcctcatggatcagaattgttggatacattcctgaatattataaacgatcaagaagagacaataaaatttacaatggaaaaggaatacaataacagcctacctttcctcgatgttttgatctcaaagaaggatattggatatgagactcaagtgtatagaaaaccaacacacaccaacagatatctcaattacaagtcaaatcacaacatcaacgttaaaaagggaatcattaaatccttatatgatagagccaaaattacttgttctaacgaaaattcctttttagaagaaaaacaattgttaacatctgttttattaaaaaatgattatcctttatcgtttataaataaggaattgtcaagattggatcgaatggaacagaacaacttagaacgggatcctacaacattcacaagaaataatacgaggaaaatatcaataccatatataaaaggactatccgagaaacttaaaacaataggaaataaattcaacatttcaacaacattcaaaacaacaaacacattgagatctattctatctaaaactaaacctaacaatgaacaagaaagaacaaagaattgtatttataaaataccttgtgaatgcgaacaattttatttaggtgaaacatcaagaccattagacgttagaataagtgaacatcaatcttatattaaaaatagagaatttgagagatctcaaatatgtcaacacgcatgggataatgaacatagagttcagtggagagattcaagtatagtcctgaaagaatcagatagtaaaaagagaaaaatcaaagaagcggctctaattatgctaaatgaaaccaattgtgtcgcaaattcctcggtagaatgcagtaggatgtggttacccatactgaaagaggaagtcaatagaaagaaaataccaagattagtaagtcaataatatcgagctagtacatattttatattttagtattacttatatatctagtattattaatattatttataatttaaacatgttacaagtcagaatttggtattattttttgagagtaaattaatgtaagaccaaatacttacgatgtcgggatagtatcacagggtttttcctggttttcccttgtgatttactatgaagtctctaacgcgagaattttactgtcgttgcatttggttgtctttttaaagacagatcacatgctataatttttttgtgacggatattcttgagttggggttgatttcatgtaatcgaatgaactatctttcagtagggtcgtcccaggagcgcaactcataaatattgacaatatc

SEQ ID NO: 1510 - DNA, 1300 bp, Diabrotica virgifera
  SmartBlast Evalue=5E-32; Info=Reverse transcriptase n=1 Tax= Schistosoma mansoni RepID=Q7RTK8_SCHMA
aatataataacagtctgcctttcctcgatgtttgagtctcaaagaaggatactggatatgagactcaagtgtatagaaaaccaacacataccaacagatatctcaattacaaatcaaatcacaacatcaacgttaaaaagggaatcataaaatccttatatgatagagccaaaattacttgttctaacgaaaattcatttttagaagaaaaacaattgttaacatctgttttattaaaaaatgattatcctttatcgtttataaataaggaattgtcaagattggatcgaatggaacagaacaacttagaacgggatcctacaacattcacaagaaataatacgaggaaaatatcaataccatatataaaaggactatccgagaaacttaaaacaataggaaataaattcaacatttcaacaacattcaaaacaacaaacacattgagatctattctatctaaaactaaacctaacaatgaacaagaaagaacaaagaattgtatttataaaataccttgtgaatgcgaacaattttatttaggtgaaacatcaagaccattagacgttagaataagtgaacatcaatcttatattaaaaatagagaatttgagagatctcaaatatgtcaacacgcatgggataatgaacatagagttcagtggagagattcaagtatagtcctgaaagaatcagatagtaaaaagagaaaaatcaaagaagcggctctaattatgctaaatgaaaccaattgtgtcgcaaattcctcggtagaatgcagtaggatgtggttacccatactgaaagaggaagtcaatagaaagaaaataccaagattagtaagtcaataatatcgagctagtacatattttatattttagtattacttatatatctagtattattaatattatttataatttaaacatgttacaagtcagaatttggtattattttttgagagtaaattaatgtaagaccaaatacttacgatgtcgggatagtatcacagggtttttcctggttttcccttgtgatttactatgaagtctctaacgcgagaattttactgtcgttgcatttggttgtctttttaaagacatatcacatgctataattttttatgacggatattcttgagttggggttaatttcatgtaatcgaatgaactatctttcagtaagtcgtcccaggaacgcaactcataaatattggcaatatcattttaaagtcttctactttaaaatgtataatatatgtctgaattgccaatataaatgagtgagattaaataaatta

SEQ ID NO: 1511 - DNA, 1264 bp, Diabrotica virgifera
  SmartBlast Evalue=5E-38; Info=Reverse transcriptase n=1 Tax= Schistosoma mansoni RepID=Q7RTK8_SCHMA
gacattgtaagtatttggttttacattcagtttactctcaaaactaacaccaaagtttgattttacatgtatgctattttaaattataaataatattaataatatatagatatgtactattctccatatgttattgacttctcatcgtggtattttctttctattgactttctcttttagtatgggtaaacacatcctactgcattctaccgaggaatttgcgacacaattggtttcatttagcataattagagccgcttctttgatttttctctttttactatctgtttctttcaggactatacttgaatctctccactgaactctatgttcattatcccatgcgtgttgacatatttgagatctatcaaattctctatttttaatataagactgatgttcacttattctaacgtctaatggtcttgatgtttcacctaaataaaattgttcgcattcacaaggtattttataaatacaattctttgttctttcttgttcattgttaggtttagttttagatagaatagatctcaatgtgtttgttgttttgaatgttgttgaaatgttgaatttatttcctattgttttaagtttctcggatagtccttttatatatggtattgatattttcctcgtattatttcttgtgaatgttgtaggatcccgttctaagttgttctgttccattcgatccaatcttgacaattccttatttataaacgataaaggataatcattttttaataaaacagatgttaacaattgtttttcttctaaaaaggaattttcgttagaacaagtaattttggctctatcatataaggatttaatgattccctttttaacgttgatgttgtgatttgacttgtaattgagatatctgttggtgtgtgttggttttctatacacttgagtctcatatccaatatccttctttgagatcaaaacatcgaggaaaggtaggctgttattgtattccttttccattgtaaattttattgtctcttcttgatcgtttataatattcaggaatgtatccaacaattctgatccatgaggccatattgaaaacacatcatctacatagattgagtttttaatttagtttattttagcaacattccgtattccgacaacggcacccgacttgggcgtcgaaacgttaacaaaaccattttcttcattctaactgtggcccatttcccatataaataattaactattcttgtacattatgctattgattgaaattgtacaagaa

SEQ ID NO: 1512 - DNA, 612 bp, Diabrotica virgifera
tacctatacaaagtacctacctactgagaattacaattttccatttgattaccggtactcaaatacaaaagtaacaaaagtaatcatagtactcaaagtaacgaatactgtaaatgattacttgttatgtcggaatccctatacaaaatacctacctactgataattacgattttccatatgattaccggtactcaaatacaaaagtaatcatagaaatcaaagtaacgaatactgtaaatgattactttatacaaaagtaacggtctgtagttacagagtcccctttctcaagtaaagttaaagcacgaactttctctgcatttgtgaatttctttcgactcacatttttcacttcaatttagaatttaatatctcaaactttcctcagtaagtgaaaagaagttctcactcctatcggagattggaaatcagcaacgctatcctgaccttatttacagctgacctaaagagttcattagtggtgcagccaaaccactttctccaatttcgcaaccatgacattcttctacagcctgggttccattttccttctgggaaagaagaaagaagttaaaccttcacaactcgtacaaagtaagtatgtacagta

SEQ ID NO: 1513 - DNA, 1632 bp, Diabrotica virgifera
  SmartBlast Evalue=3E-15; Info=Histone-lysine N- methyltransferase SETMAR (Fragment) n=2 Tax=Camponotus floridanus RepID=E2A795_9HYME
gtcggtaattagattgtcgtttttggaagggaaatagcacagctaaataaaagagcacttggatgttgtaaggtgactcttctccttctacggcgatcgtcaaaaattggtttaacgagtttcaccgtggttgcacgtcggtttttgatgagtcactccctggtgccacaaaaacgtctaccttggaagataacatgcaagaaatctacgatctggtactggcagaccgcagacttaaggtgcgcgggaaagctaacacatcacgcatctcgaaagatttcgttggtcatatcctgcatgaaagtttgggaaaaaaagctgtcggtgcgatggctgtcgcgttttctcacttctgacaataagcgcaaccattagtgatgttgaaaaagtaactattcgttacaaagtactcgttacttacgaataccgaaagtaacgattactatacagagaggcaaatcgttactttgattactctgattacttcgtaccaatcgtatcagagcgagtaacgactattgtatctactttgattactctgattacttcgtaccaatcgtatcagagcgagtaacgactattgtatctactttgattactctgattacttcgtaccaatcgtatcagagcgagtaacgactattgtatctacaacctagtacacttgattactttctagtttatagactgaccggaaaatgtggaaatgataatatttctacaattgttatatctgagataatgttatatcggaatacttatacaaaatacctacctactgagaaatacctacgattttcgatatgattaccggtactaaattcaaaaagcaacaaaaataatcatagtaatcaaagtaacgaatactgtaaattattactttatacaaaagtaacggtttgtaacgaatacatactcgaaagtaactataatcaacatcactactacgctagttacagagtcccctttctcaagtaaagttaaagcacgaactttctctgcatttgtgaatttctttcgactcacatttttcatttcgattaagaatttaatatctcaaactttcctcagtaagtgaaaagaagttattcttcttgcgccactcctatcggagattggaaatcatcaacgctatcctgaccttgtttacagctgacctaaagagttcattagtggtgcagccaaaccactctctcaaatttcgcaaccatgacattcttctacagcctgggttccattttccttctggaaaagaagttaaaccttgactactcgtacaaagtaagtatgtacacgtacactataaacgcgcagaataaactaaacaaactaagccatcagtaaaagacagacagctaccatcgcgagaatgttatcccgtctcccctcaagtgcagacagaatttagtgatttatttggcaaggtaaagattttttgtcgtcactgtaatggtactaaaatctcaacaacaaaatcttttactactgaaattctgtagggtcctttgggcgctccattgtgataaaataattaaatgcttaatggaatcagaagcttttctaaaattaagtatttctcaatgttgtcttttaaaactttagcttgaatggtgtccataggactagtaattt

SEQ ID NO: 1514 - DNA, 1293 bp, Diabrotica virgifera
  SmartBlast Evalue=2E-15; Info=Histone-lysine N- methyltransferase SETMAR (Fragment) n=2 Tax=Camponotus floridanus RepID=E2A795_9HYME
gtcggtaattagattgtcgtttttggaagggaaatagcacagctaaataaaagagcacttggatgttgtaaggtgactcttctccttctacggcgatcgtcaaaaattggtttaacgagtttcaccgtggttgcacgtcggtttttgatgagtcactccctggtgccacaaaaacgtctaccttggaagataacatgcaagaaatctacgatctggtactggcagaccgcagacttaaggtgcgcgggaaagctaacacatcacgcatctcgaaagatttcgttggtcatatcctgcatgaaagtttgggaaaaaaagctgtcggtgcgatggctgtcgcgttttctcacttctgacaataagcgcaaccattagtgatgttgaaaaagtaactattcgttacaaagtactcgttacttacgaataccgaaagtaacgattactatacagagaggcaaatcgttactttgattactctgattacttcgtaccaatcgtatcagagcgagtaacgactattgtatctactttgattactctgattacttcgtaccaatcgtatcagagcgagtaacgactattgtatctactttgattactctgattacttcgtaccaatcgtatcagagcgagtaacgactattgtatctacaacctagtacacttgattactttctagtttatagactgaccggaaaatgtggaaatgataatatttctacaattgttatatctgagataatgttatatcggaatacttatacaaaatacctacctactgagaaatacctacgattttcgatatgattaccggtactaaattcaaaaagcaacaaaaataatcatagtaatcaaagtaacgaatactgtaaattattactttatacaaaagtaacggtttgtaacgaatacatactcgaaagtaactataatcaacatcactactacgctagttacagagtcccctttctcaagtaaagttaaagcacgaactttctctgcatttgtgaatttctttcgactcacatttttcacttcaatttagaatttaatatctcaaactttcctcagtaagtgaaaagaagttctcactcctatcggagattggaaatcagcaacgctatcctgaccttatttacagctgacctaaagagttcattagtggtgcagccaaaccactttctccaatttcgcaaccatgacattcttctacagcctgggttccattttccttctgggaaagaagaaagaagttaaaccttcacaactcgtacaaagtaagtatgtacagta

SEQ ID NO: 1515 - DNA, 1250 bp, Diabrotica virgifera
  SmartBlast Evalue=2E-15; Info=Histone-lysine N- methyltransferase SETMAR (Fragment) n=2 Tax=Camponotus floridanus RepID=E2A795_9HYME
gtcggtaattagattgtcgtttttggaagggaaatagcacagctaaataaaagagcacttggatgttgtaaggtgactcttctccttctacggcgatcgtcaaaaattggtttaacgagtttcaccgtggttgcacgtcggtttttgatgagtcactccctggtgccacaaaaacgtctaccttggaagataacatgcaagaaatctacgatctggtactggcagaccgcagacttaaggtgcgcgggaaagctaacacatcacgcatctcgaaagatttcgttggtcatatcctgcatgaaagtttgggaaaaaaagctgtcggtgcgatggctgtcgcgttttctcacttctgacaataagcgcaaccattagtgatgttgaaaaagtaactattcgttacaaagtactcgttacttacgaataccgaaagtaacgattactatacagagaggcaaatcgttactttgattactctgattactttgttacttcgtagccaatcgtatcagagcgagtacctatttgagtattgtatctacaatcggttgatattggaatcggaccggtattccacgagtgttcggtatcagtacagttaactaaaattttatctatgaagggcgaaggctatgaagagttttacaggattacagggcgctgagaagtagctgaaacagagggcggtaaatcatttaacaaagcatgcacccagaaacagatgtctatacggataaaatacgatttgtcgaggtagataattcacagatgtttgttcctttgaaaataaaaatgcaacacattagattttaataataaatacacactattcttatcaggcctagaaaaaaaaatacctagcttagattgaccggaaaaatgtagaaatgatgatgtttctagactatgatcatcaactttaattttacatgtaggtatggcattgtttttaatagaccaggcatttaacactaaaaacacagaaataaatctattttaaatattaggtacatacatggagacttgcaactttttgcattgtatttaggattaggatgacgtctggaaaaaagtctacaataggagaatgggtggaaatgcattattacattttaaagtgtataaaacgcatcgaaaaatgtataaacatgtcaaaatcagtatatcaaggcagatatatcagccagattttcttattcgggatatttgactctcgaaactatagatgacgtaccttagcagtaaccctg

SEQ ID NO: 1516 - DNA, 990 bp, Diabrotica virgifera
  SmartBlast Evalue=1E-15; Info=Histone-lysine N- methyltransferase SETMAR (Fragment) n=2 Tax=Camponotus floridanus RepID=E2A795_9HYME
gtcggtaattagattgtcgtttttggaagggaaatagcacagctaaataaaagagcacttggatgttgtaaggtgactcttctccttctacggcgatcgtcaaaaattggtttaacgagtttcaccgtggttgcacgtcggtttttgatgagtcactccctggtgccacaaaaacgtctaccttggaagataacatgcaagaaatctacgatctggtactggcagaccgcagacttaaggtgcgcgggaaagctaacacatcacgcatctcgaaagatttcgttggtcatatcctgcatgaaagtttgggaaaaaaagctgtcggtgcgatggctgtcgcgttttctcacttctgacaataagcgcaaccattagtgatgttgaaaaagtaactattcgttacaaagtactcgttacttacgaataccgaaagtaacgattactatacagagaggcaaatcgttactttgattactctgattactttgttacttcgtagccaatcgtatcagagcgagtacctatttgagtattgtatctacaatcggttgatattggaatcggaccggtattccacgagtgttcggtatcagtacagttaactaaaattttatctatgaagggcgaaggctatgaagagttttacaggattacagggcgctgagaagtagctgaaacagagggcggtaaatcatttaacaaagcatgcacccagaaacagatgtctatacggataaaatacgatttgtcgaggtagataattcacagaatctcacagatgtttgttccattgaaaataaaaatacaacacattagactttaataataaatacacactattcttatcagacctagaaaaaaatacctagcttagattgaccggaaaaaatgtagaaatgataatattgaatgataatatttctagactctagactatgatcatcaactttaattttacatgtaggtatggcattgttttttattagacca

SEQ ID NO: 1517 - DNA, 888 bp, Diabrotica virgifera
gatgggtaaaaaagagagatgcaacatagtgatgttgaaaaagtaactattcattacaaagtactcgttacttacgaataccgaaagtaacgattactatacagagaggtaaatcgttactttgattacttcgtaccaatcatatcagagcgagtactattttgatttgagtattgtatctactcggttgatatcggagtcggaccggtattccacgagtgttcggtatcagtacagttaactaaaattttatctatgaagggcgaaggctatgaagagttttacaggattacagggcgctgagaagtagctgaaacagagggcggtaaatcatttaacaaagcatgcacccagaaacagatgtctatacgataaaatacgatttgtcgaggtagataattcacagatgtttgttcctttgaaaataaaaatgcaacacattagattttaataataaatacacactattcttatcaggcctagaaaaaaaaatacctagcttagattgaccggaaaaatgtagaaatgatgatgtttctagactatgatcatcaactttaattttacatgtaggtatggcattgtttttaatagaccaggcatttaacactaaaaacacagaaataaatctattttaaatattaggtacatacatggagacttgcaactttttgcattgtatttaggattaggatgacgtctggaaaaaagtctacaataggagaatgggtggaaatgcattattacattttaaagtgtataaaacgcatcgaaaaatgtataaacatgtcaaaatcagtatatcaaggcagatatatcagccagattttcttattcgggatatttgactctcgaaactatagatgacgtaccttagcagtaaccctg

SEQ ID NO: 1518 - DNA, 951 bp, Diabrotica virgifera
tacctatacaaagtacctacctactgagaattacaattttccatttgattaccggtactcaaatacaaaagtaacaaaagtaatcatagtactcaaagtaacgaatactgtaaatgattacttgttatgtcggaatccctatacaaaatacctacctactgataattacgattttccatatgattaccggtactcaaatacaaaagtaatcatagaaatcaaagtaacgaatactgtaaatgattactttatacaaaagtaacggtctgtagttacagagtcccctttctcaagtaaagttaaagcacgaactttctctgcatttgtgaatttctttcgactcacatttttcatttcgattaagaatttaatatctcaaactttcctcagtaagtgaaaagaagttattcttcttgcgccactcctatcggagattggaaatcatcaacgctatcctgaccttgtttacagctgacctaaagagttcattagtggtgcagccaaaccactctctcaaatttcgcaaccatgacattcttctacagcctgggttccattttccttctggaaaagaagttaaaccttgactactcgtacaaagtaagtatgtacacgtacactataaacgcgcagaataaactaaacaaactaagccatcagtaaaagacagacagctaccatcgcgagaatgttatcccgtctcccctcaagtgcagacagaatttagtgatttatttggcaaggtaaagattttttgtcgtcactgtaatggtactaaaatctcaacaacaaaatcttttactactgaaattctgtagggtcctttgggcgctccattgtgataaaataattaaatgcttaatggaatcagaagcttttctaaaattaagtatttctcaatgttgtcttttaaaactttagcttgaatggtgtccataggactagtaattt

SEQ ID NO: 1519 - DNA, 812 bp, Diabrotica virgifera
  SmartBlast Evalue=1E-15; Info=Histone-lysine N- methyltransferase SETMAR (Fragment) n=2 Tax=Camponotus floridanus RepID=E2A795_9HYME
gtcggtaattagattgtcgtttttggaagggaaatagcacagctaaataaaagagcacttggatgttgtaaggtgactcttctccttctacggcgatcgtcaaaaattggtttaacgagtttcaccgtggttgcacgtcggtttttgatgagtcactccctggtgccacaaaaacgtctaccttggaagataacatgcaagaaatctacgatctggtactggcagaccgcagacttaaggtgcgcgggaaagctaacacatcacgcatctcgaaagatttcgttggtcatatcctgcatgaaagtttgggaaaaaaagctgtcggtgcgatggctgtcgcgttttctcacttctgacaataagcgcaaccattagtgatgttgaaaaagtaactattcgttacaaagtactcgttacttacgaataccgaaagtaacgattactatacagagaggcaaatcgttactttgattactctgattacttcgtaccaatcgtatcagagcgagtaacgactattgtatctactttgattactctgattacttcgtaccaatcgtatcagagcgagtaacgactattgtatctactttgattactctgattacttcgtaccaatcgtatcagagcgagtaacgactattgtatctacaacctagtacacttgattactttctaccaatcgtatcccagcgagtaacggacgggacccgtattttacgtagttgatcgaatatcgttatcggtttgaagcgttttaagggtgtgagggtgaggagaagatagaagatgaaacagagggaggtatacgt

SEQ ID NO: 1520 - DNA, 821 bp, Diabrotica virgifera
  SmartBlast Evalue=1E-15; Info=Histone-lysine N- methyltransferase SETMAR (Fragment) n=2 Tax=Camponotus floridanus RepID=E2A795_9HYME
gtcggtaattagattgtcgtttttggaagggaaatagcacagctaaataaaagagcacttggatgttgtaaggtgactcttctccttctacggcgatcgtcaaaaattggtttaacgagtttcaccgtggttgcacgtcggtttttgatgagtcactccctggtgccacaaaaacgtctaccttggaagataacatgcaagaaatctacgatctggtactggcagaccgcagacttaaggtgcgcgggaaagctaacacatcacgcatctcgaaagatttcgttggtcatatcctgcatgaaagtttgggaaaaaaagctgtcggtgcgatggctgtcgcgttttctcacttctgacaataagcgcaaccattagtgatgttgaaaaagtaactattcgttacaaagtactcgttacttacgaataccgaaagtaacgattactatacagagaggcaaatcgttactttgattactctgattacttcgtaccaatcgtatcagagcgagtaacgactattgtatctactttgattactctgattacttcgtaccaatcgtatcagagcgagtaacgactattgtatctactttgattactctgattacttcgtaccaatcgtatcagagcgagtaacgactattgtatctacaacctagtacacttgattactttctataaaaaaataccaatcgtatcccagcgagtaacgggcgggactggtattttacgagtgttatcggtatgaagcgttttaagggtgtgacggaatacctatacaaaatacctacctactgaaaagtacgattctcgatatgatt

SEQ ID NO: 1521 - DNA, 628 bp, Diabrotica virgifera
gatgggtaaaaaagagagatgcaacatagtgatgttgaaaaagtaactattcattacaaagtactcgttacttacgaataccgaaagtaacgattactatacagagaggtaaatcgttactttgattacttcgtaccaatcatatcagagcgagtactattttgatttgagtattgtatctactcggttgatatcggagtcggaccggtattccacgagtgttcggtatcagtacagttaactaaaattttatctatgaagggcgaaggctatgaagagttttacaggattacagggcgctgagaagtagctgaaacagagggcggtaaatcatttaacaaagcatgcacccagaaacagatgtctatacgataaaatacgatttgtcgaggtagataattcacagaatctcacagatgtttgttccattgaaaataaaaatacaacacattagactttaataataaatacacactattcttatcagacctagaaaaaaatacctagcttagattgaccggaaaaaatgtagaaatgataatattgaatgataatatttctagactctagactatgatcatcaactttaattttacatgtaggtatggcattgttttttattagacca

SEQ ID NO: 1522 - DNA, 6510 bp, Diabrotica virgifera
  SmartBlast Evalue=1E-123; Info="14-3-3 protein sigma, gamma, zeta, beta/alpha n=5 Tax=Neoptera RepID=Q16QZ7_AEDAE"
gtcattattcatctgtcaaacgttttaaaagatcttaaatattatctaaaattttttaaattattattgtattcaaatctgcgcgctctttgtgacgtcaagagactgcattctccgaaagattttcgacctctgtcggcgattctagtgtgtggtgtgtggcgggcgcagccatattgatagtaagaaaagtgtacagtattggaattttgtgttaggtgctgtgaataagaaatctgaaatcatctcaaaaatgtccgagcgggaggataatgtatataaggcaaaattagccgaacaagcagagagatacgatgaaatggtggaagccatgaagaaggtagcgaagctggacttggaactgactgtagaagaaaggaatctcctctccgtagcttataaaaatgtcattggtgcaaggagagcatcgtggcgtataatttcctccatagaacagaaagaagaatcaaaaggtactgatgataagctagaaatgatccgccagtatcgttcccaagtagaaaaagaacttagagatatttgctcagacattcttggagtactagacaaacatttgatacctgccgcctcctccggagaatccaaggtcttctattataaaatgaagggcgattaccacagatacttggcagaatttgccactggaaacgatcgcaaggacgctgccgaacattctctagttgcttacaaatcggccagtgacatcgccatgacagagttagcgccaacacatcccatcagactgggtcttgcgctcaacttctccgtcttctattacgagattctgaacagcccagatcgggcatgtcgtttggccaaagctgctttcgatgacgcaatcgctgagttggataccctttccgaggagagttacaaggatagtacgttaataatgcagcttttgagggacaatctcaccctctggaccagtgatatgcaattagagtctgaagaaggcaacaaagagcaattacaagacgtagaagaccaagatgtatcataacttggaaatgtcacatgaggcaatatatcgaactgttgagtgctgtgtagtgcggggcattgcccagacattgtgaaagggggacggggcaagtagacaaacaacttgccccaaccatcctagtacatactgtattattattattattactagctgtaacaatatattctgtaactgttttgtctctcccaaatgaatgcgaatgaatgaatggaataaccaatttgtcccggccgatttgcggacgaccgatcaacttatatcaaaaatgagcactaaagcttttgaacggattccttcttaccaactgtcagactatacaagtgcatatttttacagttatttataaaaatgatgtttttgttaacttattatatgtttatcaattaaaaattgatattgtcacagtttgaccatcgggatattcatttttaaacagcagctgacagttgggaggggtgtcgattgatgtttaaaaatgttagtgcgcataggtgattcgcaatctcggataggaatcaagtggatgtactagaaccttacgctttagatatttaatgttggattcttttgtatttttatcttaaataaaatttaatagtatttaaaatgattcgttaccgttttggtatgatcatataattgatgcagaaatgttcatatacctcagtgtgaaatatttactatcttaaggaatttatgtaggcagcagcatggacattgtactcaagttttagtttatctcaaaaagactgtatcgaaaagtattatccaacatttcgagattattttattcgatgaaactgcgtttttaataatcactttttaattaaccttgatagaggcttctcaaattttatgtcaaacacgaaaaaaacattaaagtatattttgacaactttttttatttttttatatctgtgactaataaaattattaaaaagtcggtatttttaatcgaaaactgcagataatacatatttaaaaatatttccatcattataatcagtctttcaatatatgaataaaaatagcatttttatatacaataacctggaggcgggtcacaggcttcatgtgcaacacttaacaccttcagctccaggccaatatctgatatttgccacatgtgtcacttttatacagtcattggaaaattgttgaattgtaaacacggtagccgtgtcggtggcacctgattgataagagaatgaacacgggagccgtgtcggcagacttgaaagtgttttgaggaaaagtttgttttaataatcaatatttcgtcctattagaggtaacactcactaactacacttttcagaaagtggagaaaaatcgatttaaaggtacaaattgttctttaaattcacctgacttgaatattggaattttttaaatgcaacttaaaagaataaataaaaacagatattttgagccatatttcgtcacaggaactatgatacaatcaatattagatcaatttttgtacttaatgagtttttccatgaacacagttattggatattgatatcctatcagaggtaaaactcactaactacactttgtacttgatgagtttttccttgaacacaattattggatattgagaacttaatgaatttgtctccataaaatttcgctgacttacaacaaacgaactatcaaaaataacaggctattatttaaaaaattaacaataagtttcgttcttcgaaaataaatgcaattctttcggcatttatgacagccacaacagtcgcctgcctaattgcaaaatacattatgttaccttttatgtaagctatcacggttacaaagaaatttaatctcatatttctttaataataatcaattgctgaacagataatgcacacaaatataatgtacactttcaacagtgcaatgtaacacacaagtcgcctgctgaatcgcaaaataaattatgttatctaatgtattgtttgaaagaccactaagtaccgattcggcattccagattgtaaggaaaaatgcaataagtgcaataatgagttttaccatgaaaccgaaattcacaatcttggaaggaaaaattcactaagtgcaataatacgttttaatgagttttgccctgaaaccaaaattcacaataatgcacttagtgaattgtaccataaattatctcagcaattagaagggttagagtcccaggtgacttctccagagctgggcagtaccgtatcgagttcaaattaataaaaatgtcaatatctcaaaaaagtgcacttagttagttttacctctaataggacgatttgtcttgttttatccattatgatacattcacttcattatgtacaagcttatcgatatttgggtaagtgtcgactaggcagagtcagttcaattactatttcttccttgagtgttatgcttccatcatcagccaagttaatgttgtataagtatcatactccatatcatagacaaatattcttcagtcacaaaatatggctcagtaatagaagaagagaagatagaaggactggatggcagagaacttgagaaagtgaaatacacactacaaaaactttcaatgccagtcttttgagatacatatttggtcattaggtgatattcagattttgcgatattacatattgtaggactggtatgggaggagattcctacaggcaaaagaccactcggacgtcccagaatgtgatggagagataacatccaagcagatctccgaaaaatgaacatcccatttgaccctaggttgatggaagaccaaacaaattggaagaaagttgtacagtcagccaggacccacccagggttgtagcgctacgtgatgatgatgatattacatattgacggacgtttcacttgatgttttgtttgaaaatgaatcatgacgtgtgtgtaaagatataatgtaacaactatatgtttatgtattagttcgaactcaagtcttactgttactgtaggactgtttcggtcatgtaatgagacatctagagaggtataaccttctacacctcataatacagggcaaaatcgccggaagaagaagcccaggccgaagaagaatccggtattaagagaccaccgctatctgtttagagctgccataaacaaagttattattgccaatgttcgataatcggacagggtactgaaagaagaaaaatgggactgttttgaagttactaataccacaaattttgtgtattttgataacgatttccgacgtggcaatcgaaacatcaaataaacttaatttcagactaaaattgtggcttattatacatcccaacgtaaaggtcttaaatttattaaaatcttcatctgtagttttatttctaatgtataagtagattgaactaaatatatgcataaacgtaaaagttctatcgaaagctggcatttaaaattgaacgatgagggtgcaatgtccatcgacttattttatttccacctctgaccaattgaagtgatttaagaaaatgtattttatatttccttttggtatttacgcttaaaacgactttccgctttgtgctactcttgcagagctagaccatagcgctgattgatcatcattttattcgtttcggtatggatacgttattttttgaaaaacacgcatatatctgtacaaattgcatttcgttttttgtaattttttaaaccaataacttaagtatttatttgcatttcgtagagcaataatactgatgatatcactagatatacaggatgtaacacaaaaagttaacctacgaatttaatgttaaaaatattcatttttcgaagttaggttttgcatccatacattttttagagggataaaagcatatttgtacaccacgtttaatgtaaaatctattttgtggtgcagtacatgttatataagctgagttgtagggcggattcatgtgttttaacatatgtacgggcaaataaagatctggtcaaagtcgactgactgacagcctttttctccagtttaggaactagtgaagataacttgatcattcgggcgttaatatttcgagtttatagatacaaaaatacatctgagtgtcaactttcaaacatctattgtggttctagcattccaccgtagaatactggcatattatgggactcacaaccatctaagatcaaggttgtttccgatctgatgttacatattataaagatatcaattaaacaatcgaatcctgattaagaagagttgatggcaccaggaactaaccccagatagcccctaggtagggcttccaggtctggtgatgggttacctggaaagcagaggtgtaaccaggatgatcatcctaggggggggttacatctactttaaggtttctggtgggtatagactaataatggtgttaagcgtataagtacacccaaagggggggttataacccccaaaaccaccccctggttacacctatgctggaaagttagaatgtttgtcactgactgatttaacacaaatgaaagatctatttaaatttgattctcccttcatcccttgtaagtttatgacaaaaatttcaaatgtcaagtcatcgggtaacctgcgcagtttgtctaaaattagactattgagtctaacgcatgcgtactatactacttttgttcacaagatacgtgtgtctgaaactggcgtctaagcttatcttgacaatgaacgtagtatataatctttgtggttctttaaattaggggtacagcgaatccctactgctcgatttcttgtgcaatttgtactggaagagtttgaaaatatgcaatatatgaacggtattatttaactatatttttatccccaagtgtcactaaaatatagcttaaacgatatttaaagtgtaacttaacataactattctattccattaaacactaaggtagttacttttagaaatagcttatgtgttggatgttttctatacaaaagaagtgagtttaaagtttagttcgtattaagctcattcgactgaaatttctttatattatggtaccaatcttacctgtgaacatgttttatgcaaccgagtatgttacattttgtatgttgaaaaaaaaaacatttgtatgagtccctttcgggttttgatctgcaaattatttacaattcctcaccttacatcactattttgacagtctttggaaactggcagtacagtacttaatgtatatgtcccaattgcgatgattttggatcgtcccaaaaactgagataaatatggcaacaatgtattcaaataaaatcttaattatacatctttgtgcttttgggatgatataagaactccaatttggtgtacttggtacttaataatttttaaattatgcaagtagtgtgctggttttttaagactaaattcatttgttaagttatctctcctttgaaattgtaattgcattttttattaagcgtatgaatgtaaacaaagctgtgtagattgatataaaaactttgatgt

SEQ ID NO: 1523 - DNA, 5854 bp, Diabrotica virgifera
cgcgcgaagttcttttgatttttttgcatgaaaagcggtgcaccatatgaagggggacaagaggggttctttatcataaattaggcgtggagtgcaagggtagtttttaattcgaaatgtctcagtggcgtactatttttttctttaaaaaaattcagaccattacccgtaggcgcgcaaatgatgaatataaattgttatttgtttgccaaaaaatgcgcaataactacctcttgaaacccaccaaaagtaattttcatatctcaaccggtcttaataaaagttaataaaaatattaaaataagaagaattcgcagtttgaaaaagaagggtttcaacaccccgcgccttggaagcgaagcatttgcggacatgcgtttgtggagcaatctgtcattatttttacatgtagaattgccccttaaagtttttcatacttacttactaacaccctgtatatgatagtaaatttatcttgcgaaagtggcgccatcgtgcgttgaaactaagtacttatcggaccgctctcatgtatccaaaaaaacaaatgttatagaaacatggtatacatctaaagttttcgagctaggaagatatcttaattcattatgtagatttaggaaatgggaaaacagaaaacaaaaagggtactaactccctaaaattttgaataaacaatgtagtttaaagaaaatagcttaagtattaatatcgcagttttctccattactctcattatgcatataatatgtttcagttccatgttccacattcttattatttaataacacatggaaatttagaataatataaggcagaacaaaactaatagtgatatactaaatgaaaagacatataagtacgtgattttattctgcccttttcagtgaatattcatgtttttgcatagtataaaaatattttcaagaaatatatagcctcatctcttaaacagttaggaatagatataaatctaaactagacctagagaatgttagacgaagaactagatgatattgttacaacatctagtataggaagaaaaaatagcatcatgctcttgtatgattaaattaagtacggaatttcgtcgcaataatagaaaatgaaaagtacatacagtctgtacaatatagataccgttgcatgtcattatctacgtcagagatctaagttgacattgttgcccaattacaaaaaattcttgaattcattttaaatcgaatatatcacataattattgcggaagtggattatacaacaaaacatattaatatttcaatgtaaataaataaaaatattagaaatagaaaacaagaattaagttataatcttacgttaaagtaaataataaaaacaataaatataataaaacaaatacttatggtaaagaataaaaacaaatctgaagtgtcaataccgcaactgtcaaataaatgttaccaaattatgccaaaatatctcctttgtgcgaattcagttagagtgtaatccgaacaaatgtgctttattaaaacgctttatatttcacttatacaaattaaatgaaacaagttagggtatgtttacatcaatagaaatcttccaacattattctctacgcgtatataataaaatatatctggtggctgtaaatccagtgtactcggctaaacgattccaaaatggaacatatctaccacttaaatatttcgtgttggtatcatgtgacgtcacgtgctgtgacgcggatgacgtgcaacggtgtctatattgtacggactgtacattgtttgttctttgtggtatacgccaagaaaaaaataataccatctacgattagtaatttttagcttataacagtttgaatagttctatcggtttttaatatgaggaaaagttgtggataaaaggtaaatttgaattcgcttgttgaaatgtgtggacgagttgtaatttgtgcaaatgggcggtaatttaaaaagaaaaaaataaacgattcctcataatatatttggacactgtttcaatttttttttcgatagttttcgacttgatatttcttgtagtgattttttagaaaaaaaaacaactttttgatatttatatattgggagaagcaaaaacgttgagtgttttttataatttgtactccagtatttgttgttatacctcagttgtataatatagatttaaaagtattctaaatttttgaaataataaaaatgaattcaaaattatatccagtacactacaaacaacatctattacagtaagtgttaataattggtattgagacatgttttaatgataagggatcatttctaaaggtgctttgcgatttcgcagattgtttttttttgaaaggaaaaacatggtcagaccctcatagcgagacatttgaagctcttcacattttgtttgagcaggtatacgacgtcttatatgccttttgagaaggctccatatatgttcaataagattaaggtctggactttgagctggccagtccagttttggaataccaatatcttcaagatactatgttacaatccttgccatggcgaagacgacattcgtatatgaaaagaaatccttgcccaaaacattactgagccatcaccaaaaaaagccaggtgtgaccgagtgcatgcagcttaacgttcttcagtgcttctgtagaccttatttcgactatctgtaccataaattgatattctacactcatccataaacaatactttttccaatcatctgttgcccaattgacgtgttcataggcaaatgcaagtctgcgtcttttgtgagtagcagtaagtaatggatctgttgctgaattgtaagctgtcagaccctgttccaaaaccttcgcccaacagcagaaacactgattactggtccttgggcttactgaatatggctttggaacattctaacagtttgcgtctggtctcacaatgtagcaatagggagaacgctatccttcctgactgttctatttttttggcacctataccgggtcgccatggatgagatccggtctcacgaaatcgttggtaactcctctgcacacttgaacgactaacactcaatagtcttgccacgttcattgcactggcttcattttcccgcaatgtaacaatctgaacagacttttgatatttttccatcgttattaagaaatacatttcactgtaaggaggccagtgtaatactcagatatctcagaagctctttagaacactacaagagtaattctcacaataatcaattcagcgaagcttcgttgattcgttgtgagaattatgttaatgagttatgagtatgagatagcaaaacaaattagaagaaaataaagaaatacatatacatataaaaaatatataaaatttactaaattttgtggaagctcagtttagaattgaagtagttaaactattgctcaggaatccgtaaggaagcacagttaattatcaaataattaaatctgaaacatactgaaagggcaaggagtagtagaagatagactgtagaaatcgaaacacacaaaatataaaataaataaaaaatggattttatgatgctttttggaacatactattatgtttaatatgagattttttgaacattgacctaataaaatggagtattaaattttttggtaatatataattaaatcgagatacgctgggttttactgatggtgatattttctagtagaggagttgatacgtccatatatatactagattttagtctagataaaacttagggatgtatattatatgataaaaagtagtgaatagtacttatatgatcgagaaaattggaacagtgtccagtggccctagctttagtttttaaaaacctcgatgattaaaacaaaagaaaatcgttagataaaaatagttattcttaattacgtaaatattggctcatcgtattagattcgtattatattctaaaaaataattttagtttttagtcatcgagatttgtagtaaatcataaaattttttacctttttgtaatatagtctagattaattttgtgatttacgtctcctgtgaatatttttgacaaaatggttttctggaattaatttatttatatagcagttacatactttttaaaacaactgtatttaatgtacagacatagttttttgcccagatatttttactttgttttattggggctatattttatgcagaatcaatcaaaaagtttactatacagtattgggaaatttttttcggaacatgggcgctttcaatgccataagttggattcttgatttgcaattaaccagtgtaaatcgtcctattagaggtaaaactcactaactacacctttcagaaagtggaaaaaaatcgatttaaaggtacacattgttttttaaactcacctgacttgaatattggaatttttttaatgcaactttaaagaataaataaaaacagatattttaagccatattttgtcacaggagctatgatacaatcaatattcgatcaatttttgtaattaatgagtttttccttgaacacaatgattacgttaatgaatttgtcttcataaaatttcgctgacttataacaaacgaactatcaaaaataacagtctattatttaaaaaataaacaagtttcgttcttcgaaaataaatgcaattctgtcggcatttgtgacagccacaaaagtcgcctgcttaattgcaaaatatattatgttaccctttatgtaagctatcacggttacaaagaaatttaatctcatatttctttaatcaatcgccgaacagataatgcacacaaatataatgtacagtttgtacactttcaacaatacaatgtaacacacaagtcgcctgcttaatcgcaaaatagattatgttatctaatgtattgtttgaaaaattactaagtaccgattcggcattccagattgtaaggaaaaattcactaagtgcaataataagttttaatgagttttaccctgaacccgaaattcacaatccatattggaaggaaaaattcactaagtgcaataatacgttttaatgagttttgccctgaaaccgaaattcacaataacgcacttagtgaattgtaccataaattatctcggcaattagaagggttagggtcccaggtgacttctccagagcggggtagtaccgtattgagttcaaattgatgaaaatgtcaatcttgaaaaagtgcacttagtgagttttacttctaataggacgaaatttcaagacaacgtcgcaaagtttcatatttaatttatttgtttgactgcactgaactgaggtgccccatcggattgtatcgtttgcttgcgaagacacgcgaaggtgcgatagccagtggtaaagggattacagtcgaacaaaagaattaattttaaaacatcgcgacgttatatcgaaatttacactggttaattgcaaatcagaggtctcagtgcggtgctgtcgaacaaattaattaaacatgaaacatcacgacgttgtcttgaaatttacactggttttaattgcaaatcaaggatcgaacttattgcattgaaagcgcatatgttccgaaaaaagattttcatacctgtatagtcgatatgattcaattttacatattttattaatattaattttcaattgattataacaattagttgatcttaactgaaatttttgataaattttgcatgagtatggcgccataaggcagaatatggaactatttaacagtctcaattgtttatagtgtgtcaaaataacattatcgctttgacagccatactgacgcttagtgtgtatagaatagtgagattgttaaataggatttctgcgattaacagcaagtgcaaca

SEQ ID NO: 1524 - DNA, 4080 bp, Diabrotica virgifera
gtacttaatgagtttttccttgaacacaattattggatattgatatcctatcagaggtaaaactcgctaactacactttgtatttgatgagtttttccttgaacacaattattgaatattgatatcctatcagaggtaaaactcactaactacactttgtacttgatgagtttttccttgaacacaattattggatattgagaacttaatgaatttgtctccataaaatttcgctgacttacaacaaacgaactatcaaaaataacaggctattatttaaaaaattaacaataagtttcgttcttcgaaaataaatgcaattctttcggcatttatgacagccacaacagtcgcctgcctaattgcaaaatacattatgttaccttttatgtaagctatcacggttacaaagaaatttaatctcatatttctttaataataatcaattgctgaacagataatgcacacaaatataatgtacactttcaacagtgcaatgtaacacacaagtcgcctgctgaatcgcaaaataaattatgttatctaatgtattgtttgaaagaccactaagtaccgattcggcattccagattgtaaggaaaaatgcaataagtgcaataatgagttttaccatgaaaccgaaattcacaatcttggaaggaaaaattcactaagtgcaataatacgttttaatgagttttgccctgaaaccaaaattcacaataatgcacttagtgaattgtaccataaattatctcagcaattagaagggttagagtcccaggtgacttctccagagctgggcagtaccgtatcgagttcaaattaataaaaatgtcaatatctcaaaaaagtgcacttagttagttttacctctaataggacgatttgtcttgttttatccattatgatacattcacttcattatgtacaagcttatcgatatttgggtaagtgtcgactaggcagagtcagttcaattactatttcttccttgagtgttatgcttccatcatcagccaagttaatgttgtataagtatcatactccatatcatagacaaatattcttcagtcacaaaatatggctcagtaatagaagaagagaagatagaaggactggatggcagagaacttgagaaagtgaaatacacactacaaaaactttcaatgccagtcttttgagatacatatttggtcattaggtgatattcagattttgcgatattacatattgtaggactggtatgggaggagattcctacaggcaaaagaccactcggacgtcccagaatgtgatggagagataacatccaagcagatctccgaaaaatgaacatcccatttgaccctaggttgatggaagaccaaacaaattggaagaaagttgtacagtcagccaggacccacccagggttgtagcgctacgtgatgatgatgatattacatattgacggacgtttcacttgatgttttgtttgaaaatgaatcatgacgtgtgtgtaaagatataatgtaacaactatatgtttatgtattagttcgaactcaagtcttactgttactgtaggactgtttcggtcatgtaatgagacatctagagaggtataaccttctacacctcataatacagggcaaaatcgccggaagaagaagcccaggccgaagaagaatccggtattaagagaccaccgctatctgtttagagctgccataaacaaagttattattgccaatgttcgataatcggacagggtactgaaagaagaaaaatgggactgttttgaagttactaataccacaaattttgtgtattttgataacgatttccgacgtggcaatcgaaacatcaaataaacttaatttcagactaaaattgtggcttattatacatcccaacgtaaaggtcttaaatttattaaaatcttcatctgtagttttatttctaatgtataagtagattgaactaaatatatgcataaacgtaaaagttctatcgaaagctggcatttaaaattgaacgatgagggtgcaatgtccatcgacttattttatttccacctctgaccaattgaagtgatttaagaaaatgtattttatatttccttttggtatttacgcttaaaacgactttccgctttgtgctactcttgcagagctagaccatagcgctgattgatcatcattttattcgtttcggtatggatacgttattttttgaaaaacacgcatatatctgtacaaattgcatttcgttttttgtaattttttaaaccaataacttaagtatttatttgcatttcgtagagcaataatactgatgatatcactagatatacaggatgtaacacaaaaagttaacctacgaatttaatgttaaaaatattcatttttcgaagttaggttttgcatccatacattttttagagggataaaagcatatttgtacaccacgtttaatgtaaaatctattttgtggtgcagtacatgttatataagctgagttgtagggcggattcatgtgttttaacatatgtacgggcaaataaagatctggtcaaagtcgactgactgacagcctttttctccagtttaggaactagtgaagataacttgatcattcgggcgttaatatttcgagtttatagatacaaaaatacatctgagtgtcaactttcaaacatctattgtggttctagcattccaccgtagaatactggcatattatgggactcacaaccatctaagatcaaggttgtttccgatctgatgttacatattataaagatatcaattaaacaatcgaatcctgattaagaagagttgatggcaccaggaactaaccccagatagcccctaggtagggcttccaggtctggtgatgggttacctggaaagcagaggtgtaaccaggatgatcatcctaggggggggttacatctactttaaggtttctggtgggtatagactaataatggtgttaagcgtataagtacacccaaagggggggttataacccccaaaaccaccccctggttacacctatgctggaaagttagaatgtttgtcactgactgatttaacacaaatgaaagatctatttaaatttgattctcccttcatcccttgtaagtttatgacaaaaatttcaaatgtcaagtcatcgggtaacctgcgcagtttgtctaaaattagactattgagtctaacgcatgcgtactatactacttttgttcacaagatacgtgtgtctgaaactggcgtctaagcttatcttgacaatgaacgtagtatataatctttgtggttctttaaattaggggtacagcgaatccctactgctcgatttcttgtgcaatttgtactggaagagtttgaaaatatgcaatatatgaacggtattatttaactatatttttatccccaagtgtcactaaaatatagcttaaacgatatttaaagtgtaacttaacataactattctattccattaaacactaaggtagttacttttagaaatagcttatgtgttggatgttttctatacaaaagaagtgagtttaaagtttagttcgtattaagctcattcgactgaaatttctttatattatggtaccaatcttacctgtgaacatgttttatgcaaccgagtatgttacattttgtatgttgaaaaaaaaaacatttgtatgagtccctttcgggttttgatctgcaaattatttacaattcctcaccttacatcactattttgacagtctttggaaactggcagtacagtacttaatgtatatgtcccaattgcgatgattttggatcgtcccaaaaactgagataaatatggcaacaatgtattcaaataaaatcttaattatacatctttgtgcttttgggatgatataagaactccaatttggtgtacttggtacttaataatttttaaattatgcaagtagtgtgctggttttttaagactaaattcatttgttaagttatctctcctttgaaattgtaattgcattttttattaagcgtatgaatgtaaacaaagctgtgtagattgatataaaaactttgatgt

SEQ ID NO: 1525 - DNA, 3953 bp, Diabrotica virgifera
  SmartBlast Evalue=1E-123; Info="14-3-3 protein sigma, gamma, zeta, beta/alpha n=5 Tax=Neoptera RepID=Q16QZ7_AEDAE"
gtcattattcatctgtcaaacgttttaaaagatcttaaatattatctaaaattttttaaattattattgtattcaaatctgcgcgctctttgtgacgtcaagagactgcattctccgaaagattttcgacctctgtcggcgattctagtgtgtggtgtgtggcgggcgcagccatattgatagtaagaaaagtgtacagtattggaattttgtgttaggtgctgtgaataagaaatctgaaatcatctcaaaaatgtccgagcgggaggataatgtatataaggcaaaattagccgaacaagcagagagatacgatgaaatggtggaagccatgaagaaggtagcgaagctggacttggaactgactgtagaagaaaggaatctcctctccgtagcttataaaaatgtcattggtgcaaggagagcatcgtggcgtataatttcctccatagaacagaaagaagaatcaaaaggtactgatgataagctagaaatgatccgccagtatcgttcccaagtagaaaaagaacttagagatatttgctcagacattcttggagtactagacaaacatttgatacctgccgcctcctccggagaatccaaggtcttctattataaaatgaagggcgattaccacagatacttggcagaatttgccactggaaacgatcgcaaggacgctgccgaacattctctagttgcttacaaatcggccagtgacatcgccatgacagagttagcgccaacacatcccatcagactgggtcttgcgctcaacttctccgtcttctattacgagattctgaacagcccagatcgggcatgtcgtttggccaaagctgctttcgatgacgcaatcgctgagttggataccctttccgaggagagttacaaggatagtacgttaataatgcagcttttgagggacaatctcaccctctggaccagtgatatgcaattagagtctgaagaaggcaacaaagagcaattacaagacgtagaagaccaagatgtatcataacttggaaatgtcacatgaggcaatatatcgaactgttgagtgctgtgtagtgcggggcattgcccagacattgtgaaagggggacggggcaagtagacaaacaacttgccccaaccatcctagtacatactgtattattattattattactagctgtaacaatatattctgtaactgttttgtctctcccaaatgaatgcgaatgaatgaatggaataaccaatttgtcccggccgatttgcggacgaccgatcaacttatatcaaaaatgagcactaaagcttttgaacggattccttcttaccaactgtcagactatacaagtgcatatttttacagttatttataaaaatgatgtttttgttaacttattatatgtttatcaattaaaaattgatattgtcacagtttgaccatcgggatattcatttttaaacagcagctgacagttgggaggggtgtcgattgatgtttaaaaatgttagtgcgcataggtgattcgcaatctcggataggaatcaagtggatgtactagaaccttacgctttagatatttaatgttggattcttttgtatttttatcttaaataaaatttaatagtatttaaaatgattcgttaccgttttggtatgatcatataattgatgcagaaatgttcatatacctcagtgtgaaatatttactatcttaaggaatttatgtaggcagcagcatggacattgtactcaagttttagtttatctcaaaaagactgtatcgaaaagtattatccaacatttcgagattattttattcgatgaaactgcgtttttaataatcactttttaattaaccttgatagaggcttctcaaattttatgtcaaacacgaaaaaaacattaaagtatattttgacaactttttttatttttttatatctgtgactaataaaattattaaaaagtcggtatttttaatcgaaaactgcagataatacatatttaaaaatatttccatcattataatcagtctttcaatatatgaataaaaatagcatttttatatacaataacctggaggcgggtcacaggcttcatgtgcaacacttaacaccttcagctccaggccaatatctgatatttgccacatgtgtcacttttatacagtcattggaaaattgttgaattgtaaacacggtagccgtgtcggtggcacctgattgataagagaatgaacacgggagccgtgtcggcagacttgaaagtgttttgaggaaaagtttgttttaataatcaatatttcgtcctattagaggtaacactcactaactacacttttcagaaagtggagaaaaatcgatttaaaggtacaaattgttctttaaattcacctgacttgaatattggaattttttaaatgcaacttaaaagaataaataaaaacagatattttgagccatatttcgtcacaggaactatgatacaatcaatattagatcaatttttgtacttaatgagtttttccatgaacacagttattggatattgatatcctatcagaggtaaaactcactaactacactttgtacttgatgagtttttccttgaacacaattattggatattgagaacttaatgaatttgtctccataaaatttcgctgacttacaacaaacgaactatcaaaaataacaggctattatttaaaaaattaacaataagtttcgttcttcgaaaataaatgcaattctttcggcatttatgacagccacaaaagtcgcctgcttaattgcaaaatatattatgttaccctttatgtaagctatcacggttacaaagaaatttaatctcatatttctttaatcaatcgccgaacagataatgcacacaaatataatgtacagtttgtacactttcaacaatacaatgtaacacacaagtcgcctgcttaatcgcaaaatagattatgttatctaatgtattgtttgaaaaattactaagtaccgattcggcattccagattgtaaggaaaaattcactaagtgcaataataagttttaatgagttttaccctgaacccgaaattcacaatccatattggaaggaaaaattcactaagtgcaataatacgttttaatgagttttgccctgaaaccgaaattcacaataacgcacttagtgaattgtaccataaattatctcggcaattagaagggttagggtcccaggtgacttctccagagcggggtagtaccgtattgagttcaaattgatgaaaatgtcaatcttgaaaaagtgcacttagtgagttttacttctaataggacgaaatttcaagacaacgtcgcaaagtttcatatttaatttatttgtttgactgcactgaactgaggtgccccatcggattgtatcgtttgcttgcgaagacacgcgaaggtgcgatagccagtggtaaagggattacagtcgaacaaaagaattaattttaaaacatcgcgacgttatatcgaaatttacactggttaattgcaaatcagaggtctcagtgcggtgctgtcgaacaaattaattaaacatgaaacatcacgacgttgtcttgaaatttacactggttttaattgcaaatcaaggatcgaacttattgcattgaaagcgcatatgttccgaaaaaagattttcatacctgtatagtcgatatgattcaattttacatattttattaatattaattttcaattgattataacaattagttgatcttaactgaaatttttgataaattttgcatgagtatggcgccataaggcagaatatggaactatttaacagtctcaattgtttatagtgtgtcaaaataacattatcgctttgacagccatactgacgcttagtgtgtatagaatagtgagattgttaaataggatttctgcgattaacagcaagtgcaaca

SEQ ID NO: 1526 - DNA, 2891 bp, Diabrotica virgifera
cacttggacgtcccagaatgcgatggagagataacatccaagcagatctccgaaaaatgaacattccatttgaccctaggttgatggaagaccaaacaaattggaagaaagttgttcagtcagccaggacccacccagggttgtagcgctacgtgatgatgatgatgatattacatatcgacgtacgtttcacttgatgttttcatttaacttgtttgaaaatgaatcatgacgtttgtgcaaagatataatgtaacaactatacctttatgtttctgtattagttcgaactcagtcttactgttactgcaggactgtttcggccgtataatgagacatccagaaaggtataaccttctacacctcataatacagggcaagatcgccggaagaagagacccaggccgaagaatctccgggagtggtattaagagaccaccgctgtctgtttagagctcttgtaaacaaagttattattgccaacgttcgataataggacagggtactgaaaaaagaaaaagaggactgttttgaagttactaataccacaaattttgtgtattttgataacgatttccgaagtggcaatcgaaacatcaaataaacttaatttcagactaaaattgtggcttattcataattaaaggacgcatataaaactgctagatgtgaaacaaaaatgtatcgaagcctgtgagaatatacatcccaacgtaaaggtcttaaaattaaaatcttcatctgtagttttatttctaatgtataagtagattgaactaaatatatgcataaacgtaaaagttctatcgaaagctggcatttaaaattgaacgatgagggtgcaatgtccatcgacttattttatttccacctctgaccaattgaagtgatttaagaaaatgtattttatatttccttttggtatttacgcttaaaacgactttccgctttgtgctactcttgcagagctagaccatagcgctgattgatcatcattttattcgtttcggtatggatacgttattttttgaaaaacacgcatatatctgtacaaattgcatttcgttttttgtaattttttaaaccaataacttaagtatttatttgcatttcgtagagcaataatactgatgatatcactagatatacaggatgtaacacaaaaagttaacctacgaatttaatgttaaaaatattcatttttcgaagttaggttttgcatccatacattttttagagggataaaagcatatttgtacaccacgtttaatgtaaaatctattttgtggtgcagtacatgttatataagctgagttgtagggcggattcatgtgttttaacatatgtacgggcaaataaagatctggtcaaagtcgactgactgacagcctttttctccagtttaggaactagtgaagataacttgatcattcgggcgttaatatttcgagtttatagatacaaaaatacatctgagtgtcaactttcaaacatctattgtggttctagcattccaccgtagaatactggcatattatgggactcacaaccatctaagatcaaggttgtttccgatctgatgttacatattataaagatatcaattaaacaatcgaatcctgattaagaagagttgatggcaccaggaactaaccccagatagcccctaggtagggcttccaggtctggtgatgggttacctggaaagcagaggtgtaaccaggatgatcatcctaggggggggttacatctactttaaggtttctggtgggtatagactaataatggtgttaagcgtataagtacacccaaagggggggttataacccccaaaaccaccccctggttacacctatgctggaaagttagaatgtttgtcactgactgatttaacacaaatgaaagatctatttaaatttgattctcccttcatcccttgtaagtttatgacaaaaatttcaaatgtcaagtcatcgggtaacctgcgcagtttgtctaaaattagactattgagtctaacgcatgcgtactatactacttttgttcacaagatacgtgtgtctgaaactggcgtctaagcttatcttgacaatgaacgtagtatataatctttgtggttctttaaattaggggtacagcgaatccctactgctcgatttcttgtgcaatttgtactggaagagtttgaaaatatgcaatatatgaacggtattatttaactatatttttatccccaagtgtcactaaaatatagcttaaacgatatttaaagtgtaacttaacataactattctattccattaaacactaaggtagttacttttagaaatagcttatgtgttggatgttttctatacaaaagaagtgagtttaaagtttagttcgtattaagctcattcgactgaaatttctttatattatggtaccaatcttacctgtgaacatgttttatgcaaccgagtatgttacattttgtatgttgaaaaaaaaaacatttgtatgagtccctttcgggttttgatctgcaaattatttacaattcctcaccttacatcactattttgacagtctttggaaactggcagtacagtacttaatgtatatgtcccaattgcgatgattttggatcgtcccaaaaactgagataaatatggcaacaatgtattcaaataaaatcttaattatacatctttgtgcttttgggatgatataagaactccaatttggtgtacttggtacttaataatttttaaattatgcaagtagtgtgctggttttttaagactaaattcatttgttaagttatctctcctttgaaattgtaattgcattttttattaagcgtatgaatgtaaacaaagctgtgtagattgatataaaaactttgatgt

SEQ ID NO: 1527 - DNA, 1523 bp, Diabrotica virgifera
gtacttaatgagtttttccttgaacacaattattggatattgatatcctatcagaggtaaaactcgctaactacactttgtatttgatgagtttttccttgaacacaattattgaatattgatatcctatcagaggtaaaactcactaactacactttgtacttgatgagtttttccttgaacacaattattggatattgagaacttaatgaatttgtctccataaaatttcgctgacttacaacaaacgaactatcaaaaataacaggctattatttaaaaaattaacaataagtttcgttcttcgaaaataaatgcaattctttcggcatttatgacagccacaaaagtcgcctgcttaattgcaaaatatattatgttaccctttatgtaagctatcacggttacaaagaaatttaatctcatatttctttaatcaatcgccgaacagataatgcacacaaatataatgtacagtttgtacactttcaacaatacaatgtaacacacaagtcgcctgcttaatcgcaaaatagattatgttatctaatgtattgtttgaaaaattactaagtaccgattcggcattccagattgtaaggaaaaattcactaagtgcaataataagttttaatgagttttaccctgaacccgaaattcacaatccatattggaaggaaaaattcactaagtgcaataatacgttttaatgagttttgccctgaaaccgaaattcacaataacgcacttagtgaattgtaccataaattatctcggcaattagaagggttagggtcccaggtgacttctccagagcggggtagtaccgtattgagttcaaattgatgaaaatgtcaatcttgaaaaagtgcacttagtgagttttacttctaataggacgaaatttcaagacaacgtcgcaaagtttcatatttaatttatttgtttgactgcactgaactgaggtgccccatcggattgtatcgtttgcttgcgaagacacgcgaaggtgcgatagccagtggtaaagggattacagtcgaacaaaagaattaattttaaaacatcgcgacgttatatcgaaatttacactggttaattgcaaatcagaggtctcagtgcggtgctgtcgaacaaattaattaaacatgaaacatcacgacgttgtcttgaaatttacactggttttaattgcaaatcaaggatcgaacttattgcattgaaagcgcatatgttccgaaaaaagattttcatacctgtatagtcgatatgattcaattttacatattttattaatattaattttcaattgattataacaattagttgatcttaactgaaatttttgataaattttgcatgagtatggcgccataaggcagaatatggaactatttaacagtctcaattgtttatagtgtgtcaaaataacattatcgctttgacagccatactgacgcttagtgtgtatagaatagtgagattgttaaataggatttctgcgattaacagcaagtgcaaca

SEQ ID NO: 1528 - DNA, 1442 bp, Diabrotica virgifera
  SmartBlast Evalue=3E-15; Info=Endonuclease-reverse transcriptase n=1 Tax=Bombyx mori RepID=D7F170_BOMMO
ccggggattatttgtccggggatttttgtccagggataatttgtgaggattttttgtggggatattttgtccaaaaaaatttgtggagattatttgtccagggataatttgtggggattatttgtccggacccctcagtgggtacgggcgtttaatgtattcttgtgccctcaaaaatatttaattaaaaaagaactttgattcgttctgcacttaaaaatagaatggagcagagaaaaatgtttagatctgattgatttgtgtgaacgctctcgtgtgttatggaatccaaaacacgggcaatattgtaataaaataaaaaaaaaataggttcatggatattgatagctgaagaaataggatgtacctccgaagaagcaaagagaaatattgatattttgcttgccagtttccaaagttacaaaattaatgagattcggaaaagcagaacaaaacggagaaataaggataggaaataaaaattcgaggaagtacagaaatttaaatacctgggcgttatgataaacaacaaaggggaaaaaacggagatcgaagaaagaataactgcgacaaaccgggtataccaagcaaatagaactctactaaagagtaaaatattgaccaaacaaacaaaaatgaatatactaaaagtgaagttccctacatagaagtggttttacttcatgttggagtttttttaaaatgaatatataaaacaataataagaccaataatggtgtatgcagcagaaatgatgactatgacaaaaaagaagaaaataaattaaggataaatgaacggaagataataaggacaatactgggtccagtgagaatcgaagaacgagagtatagaagaacgaataaagaaattttagaagaattaaatggtgaagatatagtaaagaaaataaaagtacaaagaaccaaatggctgggtcatatatggagacaaggaccagaatcagtatcaaaagctatgatattgtggcaaccaggaggaaaaaggagacgtggtcgacccagatccaaatggttaactgaagtagaagaggacctaagagggacaggaattacaaaacggaaagagaagggcaatagaccggaagaaatggagacatattagtgaacaaatacaatgatcatggggactgatccatcccgtaaaatggatctagaaagcgaaagcggcgaaaccccacatggggtgttaagccatatactatactatactatctcgcttaaaacttgaaatctatcaagttttgagaaaaatgagagaaaatcattttttgtttaagatgaccgaaaaatgactaaaaacatattttcgggagcacaaagacgatgttttggatttattaaaaactgttaaaaacaatttctgcctaaaaatttcgcactgcatccttctgatttgtttaccgaattgtaacaaccaga

SEQ ID NO: 1529 - DNA, 1386 bp, Diabrotica virgifera
  SmartBlast Evalue=0.000000001; Info=Putative uncharacterized transposon-derived protein F52C9.6 (Fragment) n=1 Tax= Harpegnathos saltator RepID=E2BUQ3_9HYME
cgcgcgaagttcttttgatttttttgcatgaaaagcggtgcaccatatgaagggggacaagaggggttctttatcataaattaggcgtggagtgcaagggtagtttttaattcgaaatgtctcagtggcgtactatttttttctttaaaaaaattcagaccattacccgtaggcgcgccaatgatgaagtgcaaggttcttgattgtatgtcaaagagtgcgtaatctgcctcctgaaactcaccaaatgccgttttcatagctcaactggtcttggagcaatgaataattggcagtttgaagtaaaaatttcagcgccccgtgtctcgagaactaagcttttgcggacatatgtttatagagcaaacaggcataaatttttcatgtagaattggtccttaaaatttttcatacttatttactaacaccctgtataactggtgttgttgtcatatattattgaacttatatagaaacttaaatagaaaactactaaagagtaaaatattgaccaaacaaacaaaaatgaatatatacacaacaatgataagaccaataacgatgttgttctgaagctattttcttgtggcatttttacaattttaactatttataatgggaaagtgggccacaatattattaataaaaatcattttttaataatattgtggcttgtttcccattataaatagttaaaacaataacgatgtatgctgcagaaacgatgactatgacaaaaaaagaagagaaattaaggataaatgaacgcaagacaataaggacaatactgggtccagtgagaatcgaagaacgaattttagtagaattacatggtgcagatatagtaaagcaaataaaagtacaaagaaccaaatggctgggtcatatatggagacaaggaccagaatcagtatcaaaagctatgatattgtggcaaccaggaggaaaaaggagacgtggtcgacccagatccaaatggttaactgaagtagaagaggacctaagagggacaggaattacaaaacggaaagagaagggcaatagaccggaagaaatggagacatattagtgaacaaatacaatgatcatggggactgatccatcccgtaaaatggatctagaaagcgaaagcggcgaaaccccacatggggtgttaagccatatactatactatactatctcgcttaaaacttgaaatctatcaagttttgagaaaaatgagagaaaatcattttttgtttaagatgaccgaaaaatgactaaaaacatattttcgggagcacaaagacgatgttttggatttattaaaaactgttaaaaacaatttctgcctaaaaatttcgcactgcatccttctgatttgtttaccgaattgtaacaaccaga

SEQ ID NO: 1530 - DNA, 735 bp, Diabrotica virgifera
ccggggattatttgtccggggatttttgtccagggataatttgtgaggattttttgtggggatattttgtcctgggattatttgtcctagcttccccactgagcataaacaaacaaatgcttgcttttgacctttccatggttaccgatactctcccgaaaatggtcggttcgttctgttcggcaaaattttgctcgctcgattcgttcggaggaaaatgctcaagtcagtacgcacctttacgtgctacaatcgcaactaaaacagcattttacaaaagtttatggatttttacgaaatatgctgtgtaaaccagtatataggtagaaaatgtttgtatatcttgttagtaaatatagagcatactactgtatttgtccctatatactatttcacagactaatatacttttcctatctatattaaacattttcagtttattatttttacaccacacaatttttaatgcaaatagttgaaactagaataaaactaacgatgaaaaccttactgaacataagacaatcaaacctcgaacttcaaccagtcgtaagctagaagatcctcattcaccattacgccttattgagagacatttttccacaatgtatcaggctaccgaagataataaaaaaccaccatgtaaacgctatgttgtatccgcaaagcataagatccaaaaaagaaacacgctatacttgcataccctgtaatgtgtccttctgcgttacataa

SEQ ID NO: 1531 - DNA, 1198 bp, Diabrotica virgifera
  SmartBlast Evalue=2E-16; Info=Pedal peptide 2 n=1 Tax=Aplysia californica RepID=A1XP49_APLCA
gccatctttatccattctggtatgatgcggtcagtccttgtgctcctcgcggttgttgccgctttcttgttgatttgcgttcactgtgcgcctcgagaggtgtctgcatataaacaaggatcgccaagaattccaaataacataagaaataaaagaagtatagatccaattgatggaggaagtttaattggcagatctctgatagtatcggtggcaaccgattgcttggtagaagtattgacccaattgaccacggtttgataggcagatctctggatagtatcggtggaaaccgattgcttggtagaagtattgacccaattgaccacggtttgataggcagatctctggatagtattggtggaaaccgattgcttggtaaaagtattgacccaattgacaacgggctgataggcaggagtatagatccaattgatggaggaagtttgatcggtagatctctggatagtatcggtgggaaccgattgcttggcagaaatattgacccaattgaccacggtttgataggcagatctctggatagtatcggtggaaatcgattgcttggtaaaagtattgacccaattgataacggactgataggcagaagtatagatccaattgatggaggaagtttgatcggcagatctctggatagtatcggtggaaaccgattgcttggcagaagtattgacccaattgacaacggtttaatcggcagatctctggatagtattggtggaaaccgattgcttggtaaaagtattgacccaattgacaacggtttgataggtagatcacttgatagtataggtggtagccgtttattaggccgaagtgtagatactgtagatcctattgatggtggcactataattggaagatctctagacagcatggtggaagccgattgattggtaaaagtattgatccaatcgacaacggattgataggcagatcacttgatagtataggaggtagtcgtttattaggcagaagtgtagatcctattgacggaggagatcttattggtagagaattagatgccattaatactaacgaactgtattactaagatattgttatgttaccaagccgtcacagtctaaccaataaaagtatggactaattttgtgattgtaaataaaatgttggagctaactaggacttatatataaataaaataaaatacttaaaa

SEQ ID NO: 1532 - DNA, 1123 bp, Diabrotica virgifera
  SmartBlast Evalue=2E-13; Info=Pedal peptide 2 n=1 Tax=Aplysia californica RepID=A1XP49_APLCA
gccatctttatccattctggtatgatgcggtcagtccttgtgctcctcgcggttgttgccgctttcttgttgatttgcgttcactgtgcgcctcgagaggtgtctgcatataaacaaggatcgccaagaattccaaataacataagaaataaaagaagtatagatccaattgatggaggaagtttaattggcagatctctgatagtatcggtggcaaccgattgcttggtagaagtattgacccaattgaccacggtttgataggcagatctctggatagtatcggtggaaatcgattgcttgggaaaagtattgacccaattgacaacgggctgataggcaggagtatagatccaattgatggaggaagtttgatcggtagatctctggatagtatcggtgggaaccgattgcttggcagaaatattgacccaattgaccacggtttgataggcagatctctggatagtatcggtggaaatcgattgcttggtaaaagtattgacccaattgataacggactgataggcagaagtatagatccaattgatggaggaagtttgatcggcagatctctggatagtatcggtggaaaccgattgcttggcagaagtattgacccaattgacaacggtttaatcggcagatctctggatagtattggtggaaaccgattgcttggtaaaagtattgacccaattgacaacggtttgataggtagatcacttgatagtataggtggtagccgtttattaggccgaagtgtagatactgtagatcctattgatggtggcactataattggaagatctctagacagcatggtggaagccgattgattggtaaaagtattgatccaatcgacaacggattgataggcagatcacttgatagtataggaggtagtcgtttattaggcagaagtgtagatcctattgacggaggagatcttattggtagagaattagatgccattaatactaacgaactgtattactaagatattgttatgttaccaagccgtcacagtctaaccaataaaagtatggactaattttgtgattgtaaataaaatgttggagctaactaggacttatatataaataaaataaaatacttaaaa

SEQ ID NO: 1533 - DNA, 4563 bp, Diabrotica virgifera
  SmartBlast Evalue=7E-94; Info=Kayak n=3 Tax=Tribolium castaneum RepID=D6WZA9_TRICA
attttttttcgacaagtcgagcctcggacaagtcgtgtgctcgactttttaactttttttttattttttacgaacgaacgaatcgctatcgatcggtagtatcgatttctttacgaatttttacgcatacgtatacgcaacaagttttttcgtgcgaatttttttttgtcatttttgcgtgttttatttttttacttaacgataatttttctccgaaatggcgtttttggatcagaaggaaatcactcactttcttgctcaggagttattatatcagcagtttataactctcgaaggcctcaattccggagtcccaactcgaaccacacctactttgactccaaccacgttacgaaacattgagcaaacttttattgagctccaatcgaagcccgagagccacgaaaatgaagcgggatttgtaccaccaatagtgcattctttaggtcacaaccaatacatttccgcttcagacgcagatagtttttcatctaaatctcaaccggcttggcatagtagcactctttcccaatcaagctcggattgtgatacccgtttgactccccctttatcccagaaaagctctggcggacaatcacgcagaaacatgggcggtcgaaaaccgactaaagatctcaattgcagcccggaagaagaggagaggagaagaattagaagagaaagaaacaaagccgctgcagccagatgcagaaagagaagagttgatcatactaattcgctcgtaatggaaactgaggagctagaacacaagaagcaaatacttcaggatgaaatgcacgaactccaacaaatgaaagaccacctagaatacctcctcgagtcccacaaggcgcagtgtcgcttgagcacccaaagtcccccagacgtcaaaccatacaaccactacaacaacgaacgtgttaaatccgaatacatagaacctttacatgatattttcttacttcctagtcctacgaaaaaagtgatgttaagttccacagtgccaatctcgaaacctaccagacctagcactttaaatgtaggagccacagcccccaaatcggtatcagacatactaggaggccctgtgtctactccctctaccggaattatgttcaactttgaatctctaatgggcggcggtaccggtttgacacctgtatccgtcgcgacgccactagtgccatcttgtagttcgcaacagaggaatattccggaatcataatacttaagaaagcttagccgaaacaatcaaagttggactttagtcaaaaatattgaacaacctctgggaaaaatgtctcatgtccaacacttttaccatgtttagtcgagccgacattaaaccaaaaaatatttattgataggagacgaattttaagtgtcatagtatttacgtttaatttatttatatagttaattttttcttgtgaggttcatctgtgaacagtattttgttaatgcagatatgaataactggtacttcgacctttgttgtaaagaaatgtgatattcagtatactttattcactttaggaacggagcgtttggcttatgcacatcagtgttggttgccaaatacttcaggcacgtgttgctactagactgccgctatacaattcattttgtggcatcggcgcgcttctatcgtccataagaaatacgtagccctatctacgcaatgttccattcttaacgtgagacgctctatagttacaaatttgaaattgataatgtagtaaaactctttcacttcaatgtgtatgtacgcagtatcacgctacgcggagatactaactgccaagaataaaataatatttcgaaatcgagtgtgaaaggaaaataactattatttgagatatctgaagacaatcataatagagaacaggtgtaagactgtaaatttaatgaacaaaatctataccacaatgtaataaaaagtgttagaaacgagaggttatatggagaatacttcagaggtaattaaattatagatatgccagattcgaagagttataagtggactaaacacttctaatatcaatatggcggacaacctcaaaacgatcacagaaacagtcacactaataatgtgcgacactattttcatatatcttttgtacagataggaaatcacgtgtctttaataaaacaaaaatatgtttaaaattgttaattaagacagttgagatggtatcttagtggaatcaggacaaattaacggtacattcggcttcatcaagtaccccagttcccaattaattgcaccaaacatctttaaactcgttgatatatagagtgtaacaatgtagcaaccaatgtgtaacaataaaagttacctgctagatcagtgggtgccaattatttaacaataaaacgacacgtcggtcgtgtaactataaaactacacttgaggtgtcgtttcattgttcaccaattggtacccagtggtcgaggtggtagttgtactgttatattggttgctatatcggccccacgttgggcgccgattttaaccccactttggccgttaaacagccaaaacccgattttactaaatgtgcgtcctgggcaaaagcaaaaaaatcaaagattcttttgagtgtatgtcgtaatgattcagatattggttaaaacgaattattaaaaaaataagattttacaattatttgacatttttcccaccttacggcgaaaaattcttagaaacagtgccacatatctcaatttgaaattagttttcatatccagaaaaaagtttcattcatttaccattacataatttggatggtattgcatataggatatttacactgtgagcgtcatcaacatataaaaaaaaataaaaaccactctggcagtttgtacacatggttatcttcagtaaaaggctttatagtctattttatttttacctatgtagcaaatatttatgcctgtactagtttctcatatatatatatatgcaatttataatgagctaaagatttaattgtaacagcagtaacgacaatcaaataatacagaacataactaaatgctggtttaaattaccaatacttcaaacctttcaaagtgcctctcatatttaatgaattttttttagattttttactcttttcattttgtcacctattgtgtaattatgtgattcaatatatttttcgaaatcttgttctggtcttttgtactgtttcttctttatacacttttattatactagtacactatagtactgattctagttactgagctagtttgtctggccataggactcgagctaccttcgtagatatctcatttgggttctctttaataggttaacacttctttttgcaattttgatctttagtaaccataatatacatatgcattactctaacaactgattttgccttattcgtttcttgcttcttcattgcatatcttcattgatagttaaaaaaatcgagaaattagtaagtctttaattgctttaattattattgttcttttaactattactatcgttttttctttcctcattttaaatgccattcagttttttgtctgtggcagtttaaaattgagttacagttgaccatagattcataaggaaattaatcattaatattctaatggcacttaatgcgaatataagtaacgattgatcacaaaatgccttttttattatgttccctttagtacgaagtatcttttgaaagctatatttgtagtagtgttgtaaacattttttatctaattaccagctttccatgattgcttcctaaccatattatgaggtcattaacaaaataccttgttgtagttcacagatgtaaccctattttctgtaaataagtgctaaacatggaccaatttgttgattaagtgctcaaaacctattttcattgtgctccaataatattctggtttttggttttgcaatataatttgtgacatatatacaattcttagcaatattctgttgctaatatatatttaaacattacatatttcaatacctatttattattattgtgagagacaattcgtttaatagttacatattacatactttattcttaaaattgcattggaaatatttattaagttaatagtatattgtgaaaccacagaacagcccaaagagtaatatatattttgctatgaaaccaggaaaatgccttttttataaaagagtcatatattttcaaataggaaaaatattccctccattacaattttttaaatcaatttaagaatatataagaatatattttttgatataggagtgcttctcagataaagcaatttgtgttattacttataggaattttaacagggggttacaagaagcttgcctaaccctttcttttagagtgttaagaaggctttttagaattccgtaaatttttgtagacggggctatttaagaagtttttttttccttttttaagacgattctaatgtctttaccgtacatttgcaataatgtgcttcttgaatggccttgtatgtttataagataaaattatataaaatttaatatattgatactatatttcagtatacatagcaata

SEQ ID NO: 1534 - DNA, 4554 bp, Diabrotica virgifera
  SmartBlast Evalue=3E-84; Info=Kayak n=3 Tax=Tribolium castaneum RepID=D6WZA9_TRICA
agtaaatacagtgactggactggcgtatttttattgttcgataaggtttttgtggtttattgttgtactgtgacaattataaaaggaacagtttttttcaaggttacagtttttgtcggtcaacttctgttatgtcgcagttagtgccttttttaaatttcggtttggactgtaggtatagtgccgatgatagtgattttttgtataacaactgcgaatttgttgataaatccaaaatgtttataactctcgaaggcctcaattccggagtcccaactcgaaccacacctactttgactccaaccacgttacgaaacattgagcaaacttttattgagctccaatcgaagcccgagagccacgaaaatgaagcgggatttgtaccaccaatagtgcattctttaggtcacaaccaatacatttccgcttcagacgcagatagtttttcatctaaatctcaaccggcttggcatagtagcactctttcccaatcaagctcggattgtgatacccgtttgactccccctttatcccagaaaagctctggcggacaatcacgcagaaacatgggcggtcgaaaaccgactaaagatctcaattgcagcccggaagaagaggagaggagaagaattagaagagaaagaaacaaagccgctgcagccagatgcagaaagagaagagttgatcatactaattcgctcgtaatggaaactgaggagctagaacacaagaagcaaatacttcaggatgaaatgcacgaactccaacaaatgaaagaccacctagaatacctcctcgagtcccacaaggcgcagtgtcgcttgagcacccaaagtcccccagacgtcaaaccatacaaccactacaacaacgaacgtgttaaatccgaatacatagaacctttacatgatattttcttacttcctagtcctacgaaaaaagtgatgttaagttccacagtgccaatctcgaaacctaccagacctagcactttaaatgtaggagccacagcccccaaatcggtatcagacatactaggaggccctgtgtctactccctctaccggaattatgttcaactttgaatctctaatgggcggcggtaccggtttgacacctgtatccgtcgcgacgccactagtgccatcttgtagttcgcaacagaggaatattccggaatcataatacttaagaaagcttagccgaaacaatcaaagttggactttagtcaaaaatattgaacaacctctgggaaaaatgtctcatgtccaacacttttaccatgtttagtcgagccgacattaaaccaaaaaatatttattgataggagacgaattttaagtgtcatagtatttacgtttaatttatttatatagttaattttttcttgtgaggttcatctgtgaacagtattttgttaatgcagatatgaataactggtacttcgacctttgttgtaaagaaatgtgatattcagtatactttaagaacggagtgtttggcttatgcacatcagtgttggttgccaaatacttcaggcacgtgttgctactagactgccgctatacaattcattttgtggcatcggcgcgcttctatcgtccataagaaatacgtagccctatctacgcaatgttccattcttaacgtgagacgctctatagttacaaatttgaaattgataatgtagtaaaactctttcacttcaatgtgtatgtacgcagtatcacgctacgcggagatactaactgccaagaataaaataatatttcgaaatcgagtgtgaaaggaaaataactattatttgagatatctgaagacaatcataatagagaacaggtgtaagactgtaaatttaatgaacaaaatctataccacaatgtaataaaaagtgttagaaacgagaggttatatggagaatacttcagaggtaattaaattatagatatgccagattcgaagagttataagtggactaaacacttctaatatcaatatggcggacaacctcaaaacgatcacagaaacagtcacactaataatgtgcgacactattttcatatatcttttgtacagataggaaatcacgtgtctttaataaaacaaaaatatgtttaaaattgttaattaagacagttgagatggtatcttagtggaatcaggacaaattaacggtacattcggcttcatcaagtaccccagttcccaattaattgcaccaaacatctttaaactcgttgatatatagagtgtaacaatgtagcaaccaatgtgtaacaataaaagttacctgctagatcagtgggtgccaattatttaacaataaaacgacacgtcggtcgtgtaactataaaactacacttgaggtgtcgtttcattgttcaccaattggtacccagtggtcgaggtggtagttgtactgttatattggttgctatatcggccccacgttgggcgccgattttaaccccactttggccgttaaacagccaaaacccgattttactaaatgtgcgtcctgggcaaaagcaaaaaaatcaaagattcttttgagtgtatgtcgtaatgattcagatattggttaaaacgaattattaaaaaaataagattttacaattatttgacatttttcccaccttacggcgaaaaattcttagaaacagtgccacatatctcaatttgaaattagttttcatatccagaaaaaagtttcattcatttaccattacataatttggatggtattgcatataggatatttacactgtgagcgtcatcaacatataaaaaaaaataaaaaccactctggcagtttgtacacatggttatcttcagtaaaaggctttatagtctattttatttttacctatgtagcaaatatttatgcctgtactagtttctcatatatatatatatgcaatttataatgagctaaagatttaattgtaacagcagtaacgacaatcaaataatacagaacataactaaatgctggtttaaattaccaatacttcaaacctttcaaagtgcctctcatatttaatgaattttttttagattttttactcttttcattttgtcacctattgtgtaattatgtgattcaatatatttttcgaaatcttgttctggtcttttgtactgtttcttctttatacacttttattatactagtacactatagtactgattctagttactgagctagtttgtctggccataggactcgagctaccttcgtagatatctcatttgggttctctttaataggttaacacttctttttgcaattttgatctttagtaaccataatatacatatgcattactctaacaactgattttgccttattcgtttcttgcttcttcattgcatatcttcattgatagttaaaaaaatcgagaaattagtaagtctttaattgctttaattattattgttcttttaactattactatcgttttttctttcctcattttaaatgccattcagttttttgtctgtggcagtttaaaattgagttacagttgaccatagattcataaggaaattaatcattaatattctaatggcacttaatgcaattgagtaacaattaatgacatcaagcattgcattaatgcgaatataagtaacgattgatcacaaaatgccttttttattatgttccctttagtacgaagtatcttttgaaagctatatttgtagtagtgttgtaaacattttttatctaattaccagctttccatgattgcttcctaaccatattatgaggtcattaacaaaataccttgttgtagttcacagatgtaaccctattttctgtaaataagtgctaaacatggaccaatttgttgattaagtgctcaaaacctattttcattgtgctccaataatattctggtttttggttttgcaatataatttgtgacatatatacaattcttagcaatattctgttgctaatatatatttaaacattacatatttcaatacctatttattattattgtgagagacaattcgtttaatagttacatattacatactttattcttaaaattgcattggaaatatttattaagttaatagtatattgtgaaaccacagaacagcccaaagagtaatatatattttgctatgaaaccaggaaaatgccttttttataaaagagtcatatattttcaaataggaaaaatattccctccattacaattttttaaatcaatttaagaatatataagaatatattttttgatataggagtgcttctcagataaagcaatttgtgttattacttataggaattttaacagggggttacaagaagcttgcctaaccctttcttttagagtgttaagaaggctttttagaattccgtaaatttttgtagacggggctatttaagaagtttttttttccttttttaagacgattctaatgtctttaccgtacatttgcaataatgtgcttcttgaatggccttgtatgtttataagataaaattatataaaatttaatatattgatactatatttcagtatacatagcaata

SEQ ID NO: 1535 - DNA, 4554 bp, Diabrotica virgifera
  SmartBlast Evalue=7E-94; Info=Kayak n=3 Tax=Tribolium castaneum RepID=D6WZA9_TRICA
attttttttcgacaagtcgagcctcggacaagtcgtgtgctcgactttttaactttttttttattttttacgaacgaacgaatcgctatcgatcggtagtatcgatttctttacgaatttttacgcatacgtatacgcaacaagttttttcgtgcgaatttttttttgtcatttttgcgtgttttatttttttacttaacgataatttttctccgaaatggcgtttttggatcagaaggaaatcactcactttcttgctcaggagttattatatcagcagtttataactctcgaaggcctcaattccggagtcccaactcgaaccacacctactttgactccaaccacgttacgaaacattgagcaaacttttattgagctccaatcgaagcccgagagccacgaaaatgaagcgggatttgtaccaccaatagtgcattctttaggtcacaaccaatacatttccgcttcagacgcagatagtttttcatctaaatctcaaccggcttggcatagtagcactctttcccaatcaagctcggattgtgatacccgtttgactccccctttatcccagaaaagctctggcggacaatcacgcagaaacatgggcggtcgaaaaccgactaaagatctcaattgcagcccggaagaagaggagaggagaagaattagaagagaaagaaacaaagccgctgcagccagatgcagaaagagaagagttgatcatactaattcgctcgtaatggaaactgaggagctagaacacaagaagcaaatacttcaggatgaaatgcacgaactccaacaaatgaaagaccacctagaatacctcctcgagtcccacaaggcgcagtgtcgcttgagcacccaaagtcccccagacgtcaaaccatacaaccactacaacaacgaacgtgttaaatccgaatacatagaacctttacatgatattttcttacttcctagtcctacgaaaaaagtgatgttaagttccacagtgccaatctcgaaacctaccagacctagcactttaaatgtaggagccacagcccccaaatcggtatcagacatactaggaggccctgtgtctactccctctaccggaattatgttcaactttgaatctctaatgggcggcggtaccggtttgacacctgtatccgtcgcgacgccactagtgccatcttgtagttcgcaacagaggaatattccggaatcataatacttaagaaagcttagccgaaacaatcaaagttggactttagtcaaaaatattgaacaacctctgggaaaaatgtctcatgtccaacacttttaccatgtttagtcgagccgacattaaaccaaaaaatatttattgataggagacgaattttaagtgtcatagtatttacgtttaatttatttatatagttaattttttcttgtgaggttcatctgtgaacagtattttgttaatgcagatatgaataactggtacttcgacctttgttgtaaagaaatgtgatattcagtatactttaagaacggagtgtttggcttatgcacatcagtgttggttgccaaatacttcaggcacgtgttgctactagactgccgctatacaattcattttgtggcatcggcgcgcttctatcgtccataagaaatacgtagccctatctacgcaatgttccattcttaacgtgagacgctctatagttacaaatttgaaattgataatgtagtaaaactctttcacttcaatgtgtatgtacgcagtatcacgctacgcggagatactaactgccaagaataaaataatatttcgaaatcgagtgtgaaaggaaaataactattatttgagatatctgaagacaatcataatagagaacaggtgtaagactgtaaatttaatgaacaaaatctataccacaatgtaataaaaagtgttagaaacgagaggttatatggagaatacttcagaggtaattaaattatagatatgccagattcgaagagttataagtggactaaacacttctaatatcaatatggcggacaacctcaaaacgatcacagaaacagtcacactaataatgtgcgacactattttcatatatcttttgtacagataggaaatcacgtgtctttaataaaacaaaaatatgtttaaaattgttaattaagacagttgagatggtatcttagtggaatcaggacaaattaacggtacattcggcttcatcaagtaccccagttcccaattaattgcaccaaacatctttaaactcgttgatatatagagtgtaacaatgtagcaaccaatgtgtaacaataaaagttacctgctagatcagtgggtgccaattatttaacaataaaacgacacgtcggtcgtgtaactataaaactacacttgaggtgtcgtttcattgttcaccaattggtacccagtggtcgaggtggtagttgtactgttatattggttgctatatcggccccacgttgggcgccgattttaaccccactttggccgttaaacagccaaaacccgattttactaaatgtgcgtcctgggcaaaagcaaaaaaatcaaagattcttttgagtgtatgtcgtaatgattcagatattggttaaaacgaattattaaaaaaataagattttacaattatttgacatttttcccaccttacggcgaaaaattcttagaaacagtgccacatatctcaatttgaaattagttttcatatccagaaaaaagtttcattcatttaccattacataatttggatggtattgcatataggatatttacactgtgagcgtcatcaacatataaaaaaaaataaaaaccactctggcagtttgtacacatggttatcttcagtaaaaggctttatagtctattttatttttacctatgtagcaaatatttatgcctgtactagtttctcatatatatatatatgcaatttataatgagctaaagatttaattgtaacagcagtaacgacaatcaaataatacagaacataactaaatgctggtttaaattaccaatacttcaaacctttcaaagtgcctctcatatttaatgaattttttttagattttttactcttttcattttgtcacctattgtgtaattatgtgattcaatatatttttcgaaatcttgttctggtcttttgtactgtttcttctttatacacttttattatactagtacactatagtactgattctagttactgagctagtttgtctggccataggactcgagctaccttcgtagatatctcatttgggttctctttaataggttaacacttctttttgcaattttgatctttagtaaccataatatacatatgcattactctaacaactgattttgccttattcgtttcttgcttcttcattgcatatcttcattgatagttaaaaaaatcgagaaattagtaagtctttaattgctttaattattattgttcttttaactattactatcgttttttctttcctcattttaaatgccattcagttttttgtctgtggcagtttaaaattgagttacagttgaccatagattcataaggaaattaatcattaatattctaatggcacttaatgcgaatataagtaacgattgatcacaaaatgccttttttattatgttccctttagtacgaagtatcttttgaaagctatatttgtagtagtgttgtaaacattttttatctaattaccagctttccatgattgcttcctaaccatattatgaggtcattaacaaaataccttgttgtagttcacagatgtaaccctattttctgtaaataagtgctaaacatggaccaatttgttgattaagtgctcaaaacctattttcattgtgctccaataatattctggtttttggttttgcaatataatttgtgacatatatacaattcttagcaatattctgttgctaatatatatttaaacattacatatttcaatacctatttattattattgtgagagacaattcgtttaatagttacatattacatactttattcttaaaattgcattggaaatatttattaagttaatagtatattgtgaaaccacagaacagcccaaagagtaatatatattttgctatgaaaccaggaaaatgccttttttataaaagagtcatatattttcaaataggaaaaatattccctccattacaattttttaaatcaatttaagaatatataagaatatattttttgatataggagtgcttctcagataaagcaatttgtgttattacttataggaattttaacagggggttacaagaagcttgcctaaccctttcttttagagtgttaagaaggctttttagaattccgtaaatttttgtagacggggctatttaagaagtttttttttccttttttaagacgattctaatgtctttaccgtacatttgcaataatgtgcttcttgaatggccttgtatgtttataagataaaattatataaaatttaatatattgatactatatttcagtatacatagcaata

SEQ ID NO: 1536 - DNA, 4533 bp, Diabrotica virgifera
  SmartBlast Evalue=3E-84; Info=Kayak n=3 Tax=Tribolium castaneum RepID=D6WZA9_TRICA
agtaaatacagtgactggactggcgtatttttattgttcgataaggtttttgtggtttattgttgtactgtgacaattataaaaggaacagtttttttcaaggttacagtttttgtcggtcaacttctgttatgtcgcagttagtgccttttttaaatttcggtttggactgtaggtatagtgccgatgatagtgattttttgtataacaactgcgaatttgttgataaatccaaaatgtttataactctcgaaggcctcaattccggagtcccaactcgaaccacacctactttgactccaaccacgttacgaaacattgagcaaacttttattgagctccaatcgaagcccgagagccacgaaaatgaagcgggatttgtaccaccaatagtgcattctttaggtcacaaccaatacatttccgcttcagacgcagatagtttttcatctaaatctcaaccggcttggcatagtagcactctttcccaatcaagctcggattgtgatacccgtttgactccccctttatcccagaaaagctctggcggacaatcacgcagaaacatgggcggtcgaaaaccgactaaagatctcaattgcagcccggaagaagaggagaggagaagaattagaagagaaagaaacaaagccgctgcagccagatgcagaaagagaagagttgatcatactaattcgctcgtaatggaaactgaggagctagaacacaagaagcaaatacttcaggatgaaatgcacgaactccaacaaatgaaagaccacctagaatacctcctcgagtcccacaaggcgcagtgtcgcttgagcacccaaagtcccccagacgtcaaaccatacaaccactacaacaacgaacgtgttaaatccgaatacatagaacctttacatgatattttcttacttcctagtcctacgaaaaaagtgatgttaagttccacagtgccaatctcgaaacctaccagacctagcactttaaatgtaggagccacagcccccaaatcggtatcagacatactaggaggccctgtgtctactccctctaccggaattatgttcaactttgaatctctaatgggcggcggtaccggtttgacacctgtatccgtcgcgacgccactagtgccatcttgtagttcgcaacagaggaatattccggaatcataatacttaagaaagcttagccgaaacaatcaaagttggactttagtcaaaaatattgaacaacctctgggaaaaatgtctcatgtccaacacttttaccatgtttagtcgagccgacattaaaccaaaaaatatttattgataggagacgaattttaagtgtcatagtatttacgtttaatttatttatatagttaattttttcttgtgaggttcatctgtgaacagtattttgttaatgcagatatgaataactggtacttcgacctttgttgtaaagaaatgtgatattcagtatactttattcactttaggaacggagcgtttggcttatgcacatcagtgttggttgccaaatacttcaggcacgtgttgctactagactgccgctatacgattcattctaatcagacggcgtggcatcggcgcgcttctatcgtccataagaaatacgtagccctatctacgcaatgttccattcttaacgtgagacgctctatagttacaaatttgaaattgataatgtagtaaaactctttcacttcaatgtgtatgtacgcagtatcacgctacgcggagatactaactgccaagaataaaataatatttcgaaatcgagtgtgaaaggaaaataactattatttgagatatctgaagacaatcataatagagaacaggtgtaagactgtaaatttaatgaacaaaatctataccacaatgtaataaaaagtgttagaaacgagaggttatatggagaatacttcagaggtaattaaattatagatatgccagattcgaagagttataagtggactaaacacttctaatatcaatatggcggacaacctcaaaacgatcacagaaacagtcacactaataatgtgcgacactattttcatatatcttttgtacagataggaaatcacgtgtctttaataaaacaaaaatatgtttaaaattgttaattaagacagttgagatggtatcttagtggaatcaggacaaattaacggtacattcggcttcatcaagtaccccagttcccaattaattgcaccaaacatctttaaactcgttgatatatagagtgtaacaatgtagcaaccaatgtgtaacaataaaagttacctgctagatcagtgggtgccaattatttaacaataaaacgacacgtcggtcgtgtaactataaaactacacttgaggtgtcgtttcattgttcaccaattggtacccagtggtcgaggtggtagttgtactgttatattggttgctatatcggccccacgttgggcgccgattttaaccccactttggccgttaaacagccaaaacccgattttactaaatgtgcgtcctgggcaaaagcaaaaaaatcaaagattcttttgagtgtatgtcgtaatgattcagatattggttaaaacgaattattaaaaaaataagattttacaattatttgacatttttcccaccttacggcgaaaaattcttagaaacagtgccacatatctcaatttgaaattagttttcatatccagaaaaaagtttcattcatttaccattacataatttggatggtattgcatataggatatttacactgtgagcgtcatcaacatataaaaaaaaataaaaaccactctggcagtttgtacacatggttatcttcagtaaaaggctttatagtctattttatttttacctatgtagcaaatatttatgcctgtactagtttctcatatatatatatatgcaatttataatgagctaaagatttaattgtaacagcagtaacgacaatcaaataatacagaacataactaaatgctggtttaaattaccaatacttcaaacctttcaaagtgcctctcatatttaatgaattttttttagattttttactcttttcattttgtcacctattgtgtaattatgtgattcaatatatttttcgaaatcttgttctggtcttttgtactgtttcttctttatacacttttattatactagtacactatagtactgattctagttactgagctagtttgtctggccataggactcgagctaccttcgtagatatctcatttgggttctctttaataggttaacacttctttttgcaattttgatctttagtaaccataatatacatatgcattactctaacaactgattttgccttattcgtttcttgcttcttcattgcatatcttcattgatagttaaaaaaatcgagaaattagtaagtctttaattgctttaattattattgttcttttaactattactatcgttttttctttcctcattttaaatgccattcagttttttgtctgtggcagtttaaaattgagttacagttgaccatagattcataaggaaattaatcattaatattctaatggcacttaatgcgaatataagtaacgattgatcacaaaatgccttttttattatgttccctttagtacgaagtatcttttgaaagctatatttgtagtagtgttgtaaacattttttatctaattaccagctttccatgattgcttcctaaccatattatgaggtcattaacaaaataccttgttgtagttcacagatgtaaccctattttctgtaaataagtgctaaacatggaccaatttgttgattaagtgctcaaaacctattttcattgtgctccaataatattctggtttttggttttgcaatataatttgtgacatatatacaattcttagcaatattctgttgctaatatatatttaaacattacatatttcaatacctatttattattattgtgagagacaattcgtttaatagttacatattacatactttattcttaaaattgcattggaaatatttattaagttaatagtatattgtgaaaccacagaacagcccaaagagtaatatatattttgctatgaaaccaggaaaatgccttttttataaaagagtcatatattttcaaataggaaaaatattccctccattacaattttttaaatcaatttaagaatatataagaatatattttttgatataggagtgcttctcagataaagcaatttgtgttattacttataggaattttaacagggggttacaagaagcttgcctaaccctttcttttagagtgttaagaaggctttttagaattccgtaaatttttgtagacggggctatttaagaagtttttttttccttttttaagacgattctaatgtctttaccgtacatttgcaataatgtgcttcttgaatggccttgtatgtttataagataaaattatataaaatttaatatattgatactatatttcagtatacatagcaata

SEQ ID NO: 1537 - DNA, 4524 bp, Diabrotica virgifera
  SmartBlast Evalue=3E-84; Info=Kayak n=3 Tax=Tribolium castaneum RepID=D6WZA9_TRICA
agtaaatacagtgactggactggcgtatttttattgttcgataaggtttttgtggtttattgttgtactgtgacaattataaaaggaacagtttttttcaaggttacagtttttgtcggtcaacttctgttatgtcgcagttagtgccttttttaaatttcggtttggactgtaggtatagtgccgatgatagtgattttttgtataacaactgcgaatttgttgataaatccaaaatgtttataactctcgaaggcctcaattccggagtcccaactcgaaccacacctactttgactccaaccacgttacgaaacattgagcaaacttttattgagctccaatcgaagcccgagagccacgaaaatgaagcgggatttgtaccaccaatagtgcattctttaggtcacaaccaatacatttccgcttcagacgcagatagtttttcatctaaatctcaaccggcttggcatagtagcactctttcccaatcaagctcggattgtgatacccgtttgactccccctttatcccagaaaagctctggcggacaatcacgcagaaacatgggcggtcgaaaaccgactaaagatctcaattgcagcccggaagaagaggagaggagaagaattagaagagaaagaaacaaagccgctgcagccagatgcagaaagagaagagttgatcatactaattcgctcgtaatggaaactgaggagctagaacacaagaagcaaatacttcaggatgaaatgcacgaactccaacaaatgaaagaccacctagaatacctcctcgagtcccacaaggcgcagtgtcgcttgagcacccaaagtcccccagacgtcaaaccatacaaccactacaacaacgaacgtgttaaatccgaatacatagaacctttacatgatattttcttacttcctagtcctacgaaaaaagtgatgttaagttccacagtgccaatctcgaaacctaccagacctagcactttaaatgtaggagccacagcccccaaatcggtatcagacatactaggaggccctgtgtctactccctctaccggaattatgttcaactttgaatctctaatgggcggcggtaccggtttgacacctgtatccgtcgcgacgccactagtgccatcttgtagttcgcaacagaggaatattccggaatcataatacttaagaaagcttagccgaaacaatcaaagttggactttagtcaaaaatattgaacaacctctgggaaaaatgtctcatgtccaacacttttaccatgtttagtcgagccgacattaaaccaaaaaatatttattgataggagacgaattttaagtgtcatagtatttacgtttaatttatttatatagttaattttttcttgtgaggttcatctgtgaacagtattttgttaatgcagatatgaataactggtacttcgacctttgttgtaaagaaatgtgatattcagtatactttaagaacggagtgtttggcttatgcacatcagtgttggttgccaaatacttcaggcacgtgttgctactagactgccgctatacgattcattctaatcagacggcgtggcatcggcgcgcttctatcgtccataagaaatacgtagccctatctacgcaatgttccattcttaacgtgagacgctctatagttacaaatttgaaattgataatgtagtaaaactctttcacttcaatgtgtatgtacgcagtatcacgctacgcggagatactaactgccaagaataaaataatatttcgaaatcgagtgtgaaaggaaaataactattatttgagatatctgaagacaatcataatagagaacaggtgtaagactgtaaatttaatgaacaaaatctataccacaatgtaataaaaagtgttagaaacgagaggttatatggagaatacttcagaggtaattaaattatagatatgccagattcgaagagttataagtggactaaacacttctaatatcaatatggcggacaacctcaaaacgatcacagaaacagtcacactaataatgtgcgacactattttcatatatcttttgtacagataggaaatcacgtgtctttaataaaacaaaaatatgtttaaaattgttaattaagacagttgagatggtatcttagtggaatcaggacaaattaacggtacattcggcttcatcaagtaccccagttcccaattaattgcaccaaacatctttaaactcgttgatatatagagtgtaacaatgtagcaaccaatgtgtaacaataaaagttacctgctagatcagtgggtgccaattatttaacaataaaacgacacgtcggtcgtgtaactataaaactacacttgaggtgtcgtttcattgttcaccaattggtacccagtggtcgaggtggtagttgtactgttatattggttgctatatcggccccacgttgggcgccgattttaaccccactttggccgttaaacagccaaaacccgattttactaaatgtgcgtcctgggcaaaagcaaaaaaatcaaagattcttttgagtgtatgtcgtaatgattcagatattggttaaaacgaattattaaaaaaataagattttacaattatttgacatttttcccaccttacggcgaaaaattcttagaaacagtgccacatatctcaatttgaaattagttttcatatccagaaaaaagtttcattcatttaccattacataatttggatggtattgcatataggatatttacactgtgagcgtcatcaacatataaaaaaaaataaaaaccactctggcagtttgtacacatggttatcttcagtaaaaggctttatagtctattttatttttacctatgtagcaaatatttatgcctgtactagtttctcatatatatatatatgcaatttataatgagctaaagatttaattgtaacagcagtaacgacaatcaaataatacagaacataactaaatgctggtttaaattaccaatacttcaaacctttcaaagtgcctctcatatttaatgaattttttttagattttttactcttttcattttgtcacctattgtgtaattatgtgattcaatatatttttcgaaatcttgttctggtcttttgtactgtttcttctttatacacttttattatactagtacactatagtactgattctagttactgagctagtttgtctggccataggactcgagctaccttcgtagatatctcatttgggttctctttaataggttaacacttctttttgcaattttgatctttagtaaccataatatacatatgcattactctaacaactgattttgccttattcgtttcttgcttcttcattgcatatcttcattgatagttaaaaaaatcgagaaattagtaagtctttaattgctttaattattattgttcttttaactattactatcgttttttctttcctcattttaaatgccattcagttttttgtctgtggcagtttaaaattgagttacagttgaccatagattcataaggaaattaatcattaatattctaatggcacttaatgcgaatataagtaacgattgatcacaaaatgccttttttattatgttccctttagtacgaagtatcttttgaaagctatatttgtagtagtgttgtaaacattttttatctaattaccagctttccatgattgcttcctaaccatattatgaggtcattaacaaaataccttgttgtagttcacagatgtaaccctattttctgtaaataagtgctaaacatggaccaatttgttgattaagtgctcaaaacctattttcattgtgctccaataatattctggtttttggttttgcaatataatttgtgacatatatacaattcttagcaatattctgttgctaatatatatttaaacattacatatttcaatacctatttattattattgtgagagacaattcgtttaatagttacatattacatactttattcttaaaattgcattggaaatatttattaagttaatagtatattgtgaaaccacagaacagcccaaagagtaatatatattttgctatgaaaccaggaaaatgccttttttataaaagagtcatatattttcaaataggaaaaatattccctccattacaattttttaaatcaatttaagaatatataagaatatattttttgatataggagtgcttctcagataaagcaatttgtgttattacttataggaattttaacagggggttacaagaagcttgcctaaccctttcttttagagtgttaagaaggctttttagaattccgtaaatttttgtagacggggctatttaagaagtttttttttccttttttaagacgattctaatgtctttaccgtacatttgcaataatgtgcttcttgaatggccttgtatgtttataagataaaattatataaaatttaatatattgatactatatttcagtatacatagcaata

SEQ ID NO: 1538 - DNA, 4522 bp, Diabrotica virgifera
  SmartBlast Evalue=3E-84; Info=Kayak n=3 Tax=Tribolium castaneum RepID=D6WZA9_TRICA
agtaaatacagtgactggactggcgtatttttattgttcgataaggtttttgtggtttattgttgtactgtgacaattataaaaggaacagtttttttcaaggttacagtttttgtcggtcaacttctgttatgtcgcagttagtgccttttttaaatttcggtttggactgtaggtatagtgccgatgatagtgattttttgtataacaactgcgaatttgttgataaatccaaaatgtttataactctcgaaggcctcaattccggagtcccaactcgaaccacacctactttgactccaaccacgttacgaaacattgagcaaacttttattgagctccaatcgaagcccgagagccacgaaaatgaagcgggatttgtaccaccaatagtgcattctttaggtcacaaccaatacatttccgcttcagacgcagatagtttttcatctaaatctcaaccggcttggcatagtagcactctttcccaatcaagctcggattgtgatacccgtttgactccccctttatcccagaaaagctctggcggacaatcacgcagaaacatgggcggtcgaaaaccgactaaagatctcaattgcagcccggaagaagaggagaggagaagaattagaagagaaagaaacaaagccgctgcagccagatgcagaaagagaagagttgatcatactaattcgctcgtaatggaaactgaggagctagaacacaagaagcaaatacttcaggatgaaatgcacgaactccaacaaatgaaagaccacctagaatacctcctcgagtcccacaaggcgcagtgtcgcttgagcacccaaagtcccccagacgtcaaaccatacaaccactacaacaacgaacgtgttaaatccgaatacatagaacctttacatgatattttcttacttcctagtcctacgaaaaaagtgatgttaagttccacagtgccaatctcgaaacctaccagacctagcactttaaatgtaggagccacagcccccaaatcggtatcagacatactaggaggccctgtgtctactccctctaccggaattatgttcaactttgaatctctaatgggcggcggtaccggtttgacacctgtatccgtcgcgacgccactagtgccatcttgtagttcgcaacagaggaatattccggaatcataatacttaagaaagcttagccgaaacaatcaaagttggactttagtcaaaaatattgaacaacctctgggaaaaatgtctcatgtccaacacttttaccatgtttagtcgagccgacattaaaccaaaaaatatttattgataggagacgaattttaagtgtcatagtatttacgtttaatttatttatatagttaattttttcttgtgaggttcatctgtgaacagtattttgttaatgcagatatgaataactggtacttcgacctttgttgtaaagaaatgtgatattcagtatactttattcactttaggaacggagcgtttggcttatgcacatcagtgttggttgccaaatacttcaggcacgtgttgctactagactgccgctatacaattcattttgtggcatcggcgcgcttctatcgtccataagaaatacgtagccctatctacgcaatgttccattcttaacgtgagacgctctatagttacaaatttgaaattgataatgtagtaaaactctttcacttcaatgtgtatgtacgcagtatcacgctacgcggagatactaactgccaagaataaaataatatttcgaaatcgagtgtgaaaggaaaataactattatttgagatatctgaagacaatcataatagagaacaggtgtaagactgtaaatttaatgaacaaaatctataccacaatgtaataaaaagtgttagaaacgagaggttatatggagaatacttcagaggtaattaaattatagatatgccagattcgaagagttataagtggactaaacacttctaatatcaatatggcggacaacctcaaaacgatcacagaaacagtcacactaataatgtgcgacactattttcatatatcttttgtacagataggaaatcacgtgtctttaataaaacaaaaatatgtttaaaattgttaattaagacagttgagatggtatcttagtggaatcaggacaaattaacggtacattcggcttcatcaagtaccccagttcccaattaattgcaccaaacatctttaaactcgttgatatatagagtgtaacaatgtagcaaccaatgtgtaacaataaaagttacctgctagatcagtgggtgccaattatttaacaataaaacgacacgtcggtcgtgtaactataaaactacacttgaggtgtcgtttcattgttcaccaattggtacccagtggtcgaggtggtagttgtactgttatattggttgctatatcggccccacgttgggcgccgattttaaccccactttggccgttaaacagccaaaacccgattttactaaatgtgcgtcctgggcaaaagcaaaaaaatcaaagattcttttgagtgtatgtcgtaatgattcagatattggttaaaacgaattattaaaaaaataagattttacaattatttgacatttttcccaccttacggcgaaaaattcttagaaacagtgccacatatctcaatttgaaattagttttcatatccagaaaaaagtttcattcatttaccattacataatttggatggtattgcatataggatatttacactgtgagcgtcatcaacatataaaaaaaaataaaaaccactctggcagtttgtacacatggttatcttcagtaaaaggctttatagtctattttatttttacctatgtagcaaatatttatgcctgtactagtttctcatatatatatatatgcaatttataatgagctaaagatttaattgtaacagcagtaacgacaatcaaataatacagaacataactaaatgctggtttaaattaccaatacttcaaacctttcaaagtgcctctcatatttaatgaattttttttagattttttactcttttcattttgtcacctattgtgtaattatgtgattcaatatatttttcgaaatcttgttctggtcttttgtactgtttcttctttatacacttttattatactagtacactatagtactgattctagttactgagctagtttgtctggccataggactcgagctaccttcgtagatatctcatttgggttctctttaataggttaacacttctttttgcaattttgatctttagtaaccataatatacatatgcattactctaacaactgattttgccttattcgtttcttgcttcttcattgcatatcttcattgatagttaaaaaaatcgagaaattagtaagtctttaattgctttaattattattgttcttttaactattactatcgttttttctttcctcattttaaatgccattcagttttttgtctgtggcagtttaaaattgagttacagttgaccatagattcataaggaaattaatcattaatattctaatggcacttaatgcgaatataagtaacgattgatcacaaaatgccttttttattatgttccctttagtacgaagtatcttttgaaagctatatttgtagtagtgttgtaaacattttttatctaattaccagctttccatgattgcttcctaaccatattatgaggtcattaacaaaataccttgttgtagttcacagatgtaaccctattttctgtaaataagtgctaaacatggaccaatttgttgattaagtgctcaaaacctattttcattgtgctccaataatattctggtttttggttttgcaatataatttgtgacatatatacaattcttagcaatattctgttgctaatatatatttaaacattacatatttcaatacctatttattattattgtgagagacaattcgtttaatagttacatattacatactttattcttaaaattgcattggaaatatttattaagttaatagtatattgtgaaaccacagaacagcccaaagagtaatatatattttgctatgaaaccaggaaaatgccttttttataaaagagtcatatattttcaaataggaaaaatattccctccattacaattttttaaatcaatttaagaatatataagaatatattttttgatataggagtgcttctcagataaagcaatttgtgttattacttataggaattttaacagggggttacaagaagcttgcctaaccctttcttttagagtgttaagaaggctttttagaattccgtaaatttttgtagacggggctatttaagaagtttttttttccttttttaagacgattctaatgtctttaccgtacatttgcaataatgtgcttcttgaatggccttgtatgtttataagataaaattatataaaatttaatatattgatactatatttcagtatacatagcaata

SEQ ID NO: 1539 - DNA, 4513 bp, Diabrotica virgifera
  SmartBlast Evalue=3E-84; Info=Kayak n=3 Tax=Tribolium castaneum RepID=D6WZA9_TRICA
agtaaatacagtgactggactggcgtatttttattgttcgataaggtttttgtggtttattgttgtactgtgacaattataaaaggaacagtttttttcaaggttacagtttttgtcggtcaacttctgttatgtcgcagttagtgccttttttaaatttcggtttggactgtaggtatagtgccgatgatagtgattttttgtataacaactgcgaatttgttgataaatccaaaatgtttataactctcgaaggcctcaattccggagtcccaactcgaaccacacctactttgactccaaccacgttacgaaacattgagcaaacttttattgagctccaatcgaagcccgagagccacgaaaatgaagcgggatttgtaccaccaatagtgcattctttaggtcacaaccaatacatttccgcttcagacgcagatagtttttcatctaaatctcaaccggcttggcatagtagcactctttcccaatcaagctcggattgtgatacccgtttgactccccctttatcccagaaaagctctggcggacaatcacgcagaaacatgggcggtcgaaaaccgactaaagatctcaattgcagcccggaagaagaggagaggagaagaattagaagagaaagaaacaaagccgctgcagccagatgcagaaagagaagagttgatcatactaattcgctcgtaatggaaactgaggagctagaacacaagaagcaaatacttcaggatgaaatgcacgaactccaacaaatgaaagaccacctagaatacctcctcgagtcccacaaggcgcagtgtcgcttgagcacccaaagtcccccagacgtcaaaccatacaaccactacaacaacgaacgtgttaaatccgaatacatagaacctttacatgatattttcttacttcctagtcctacgaaaaaagtgatgttaagttccacagtgccaatctcgaaacctaccagacctagcactttaaatgtaggagccacagcccccaaatcggtatcagacatactaggaggccctgtgtctactccctctaccggaattatgttcaactttgaatctctaatgggcggcggtaccggtttgacacctgtatccgtcgcgacgccactagtgccatcttgtagttcgcaacagaggaatattccggaatcataatacttaagaaagcttagccgaaacaatcaaagttggactttagtcaaaaatattgaacaacctctgggaaaaatgtctcatgtccaacacttttaccatgtttagtcgagccgacattaaaccaaaaaatatttattgataggagacgaattttaagtgtcatagtatttacgtttaatttatttatatagttaattttttcttgtgaggttcatctgtgaacagtattttgttaatgcagatatgaataactggtacttcgacctttgttgtaaagaaatgtgatattcagtatactttaagaacggagtgtttggcttatgcacatcagtgttggttgccaaatacttcaggcacgtgttgctactagactgccgctatacaattcattttgtggcatcggcgcgcttctatcgtccataagaaatacgtagccctatctacgcaatgttccattcttaacgtgagacgctctatagttacaaatttgaaattgataatgtagtaaaactctttcacttcaatgtgtatgtacgcagtatcacgctacgcggagatactaactgccaagaataaaataatatttcgaaatcgagtgtgaaaggaaaataactattatttgagatatctgaagacaatcataatagagaacaggtgtaagactgtaaatttaatgaacaaaatctataccacaatgtaataaaaagtgttagaaacgagaggttatatggagaatacttcagaggtaattaaattatagatatgccagattcgaagagttataagtggactaaacacttctaatatcaatatggcggacaacctcaaaacgatcacagaaacagtcacactaataatgtgcgacactattttcatatatcttttgtacagataggaaatcacgtgtctttaataaaacaaaaatatgtttaaaattgttaattaagacagttgagatggtatcttagtggaatcaggacaaattaacggtacattcggcttcatcaagtaccccagttcccaattaattgcaccaaacatctttaaactcgttgatatatagagtgtaacaatgtagcaaccaatgtgtaacaataaaagttacctgctagatcagtgggtgccaattatttaacaataaaacgacacgtcggtcgtgtaactataaaactacacttgaggtgtcgtttcattgttcaccaattggtacccagtggtcgaggtggtagttgtactgttatattggttgctatatcggccccacgttgggcgccgattttaaccccactttggccgttaaacagccaaaacccgattttactaaatgtgcgtcctgggcaaaagcaaaaaaatcaaagattcttttgagtgtatgtcgtaatgattcagatattggttaaaacgaattattaaaaaaataagattttacaattatttgacatttttcccaccttacggcgaaaaattcttagaaacagtgccacatatctcaatttgaaattagttttcatatccagaaaaaagtttcattcatttaccattacataatttggatggtattgcatataggatatttacactgtgagcgtcatcaacatataaaaaaaaataaaaaccactctggcagtttgtacacatggttatcttcagtaaaaggctttatagtctattttatttttacctatgtagcaaatatttatgcctgtactagtttctcatatatatatatatgcaatttataatgagctaaagatttaattgtaacagcagtaacgacaatcaaataatacagaacataactaaatgctggtttaaattaccaatacttcaaacctttcaaagtgcctctcatatttaatgaattttttttagattttttactcttttcattttgtcacctattgtgtaattatgtgattcaatatatttttcgaaatcttgttctggtcttttgtactgtttcttctttatacacttttattatactagtacactatagtactgattctagttactgagctagtttgtctggccataggactcgagctaccttcgtagatatctcatttgggttctctttaataggttaacacttctttttgcaattttgatctttagtaaccataatatacatatgcattactctaacaactgattttgccttattcgtttcttgcttcttcattgcatatcttcattgatagttaaaaaaatcgagaaattagtaagtctttaattgctttaattattattgttcttttaactattactatcgttttttctttcctcattttaaatgccattcagttttttgtctgtggcagtttaaaattgagttacagttgaccatagattcataaggaaattaatcattaatattctaatggcacttaatgcgaatataagtaacgattgatcacaaaatgccttttttattatgttccctttagtacgaagtatcttttgaaagctatatttgtagtagtgttgtaaacattttttatctaattaccagctttccatgattgcttcctaaccatattatgaggtcattaacaaaataccttgttgtagttcacagatgtaaccctattttctgtaaataagtgctaaacatggaccaatttgttgattaagtgctcaaaacctattttcattgtgctccaataatattctggtttttggttttgcaatataatttgtgacatatatacaattcttagcaatattctgttgctaatatatatttaaacattacatatttcaatacctatttattattattgtgagagacaattcgtttaatagttacatattacatactttattcttaaaattgcattggaaatatttattaagttaatagtatattgtgaaaccacagaacagcccaaagagtaatatatattttgctatgaaaccaggaaaatgccttttttataaaagagtcatatattttcaaataggaaaaatattccctccattacaattttttaaatcaatttaagaatatataagaatatattttttgatataggagtgcttctcagataaagcaatttgtgttattacttataggaattttaacagggggttacaagaagcttgcctaaccctttcttttagagtgttaagaaggctttttagaattccgtaaatttttgtagacggggctatttaagaagtttttttttccttttttaagacgattctaatgtctttaccgtacatttgcaataatgtgcttcttgaatggccttgtatgtttataagataaaattatataaaatttaatatattgatactatatttcagtatacatagcaata

SEQ ID NO: 1540 - DNA, 3921 bp, Diabrotica virgifera
tgaaaagtttcttcgtaggcttaatgttttttgctatcaacaagttactattgtataatacgtcttgaggtattgagttcaattcaatgtatcaacaatatgtagaattgaaaagaaataaataacaaattattcaattaatttttcgattgggggaatatcgtgaaacaggacagggcataatgttaaggatcatttattgtaccaatgtctttggtgcaaaaaattctgtggaaattaccaaacgcgaattaattttttatgtattgcatcaatatctctaattcatcataaaaacaacgaaataaatatttcttcgtgtcttctttttatttttcattgaatggccttaagatctcgcgtttttgtaaattaaaaagtcttagaattgattatagtgttataaaaaaggacgttgaaaataaaaagatcaagcacaagtgcacgctttaactctttcgcatagcagcatacacaacatttcttcagttgtatatttacaaagtatatttgttattttaggaatcataatacttaagaaagcttagccgaaacaatcaaagttggactttagtcaaaaatattgaacaacctctgggaaaaatgtctcatgtccaacacttttaccatgtttagtcgagccgacattaaaccaaaaaatatttattgataggagacgaattttaagtgtcatagtatttacgtttaatttatttatatagttaattttttcttgtgaggttcatctgtgaacagtattttgttaatgcagatatgaataactggtacttcgacctttgttgtaaagaaatgtgatattcagtatactttattcactttaggaacggagcgtttggcttatgcacatcagtgttggttgccaaatacttcaggcacgtgttgctactagactgccgctatacgattcattctaatcagacggcgtggcatcggcgcgcttctatcgtccataagaaatacgtagccctatctacgcaatgttccattcttaacgtgagacgctctatagttacaaatttgaaattgataatgtagtaaaactctttcacttcaatgtgtatgtacgcagtatcacgctacgcggagatactaactgccaagaataaaataatatttcgaaatcgagtgtgaaaggaaaataactattatttgagatatctgaagacaatcataatagagaacaggtgtaagactgtaaatttaatgaacaaaatctataccacaatgtaataaaaagtgttagaaacgagaggttatatggagaatacttcagaggtaattaaattatagatatgccagattcgaagagttataagtggactaaacacttctaatatcaatatggcggacaacctcaaaacgatcacagaaacagtcacactaataatgtgcgacactattttcatatatcttttgtacagataggaaatcacgtgtctttaataaaacaaaaatatgtttaaaattgttaattaagacagttgagatggtatcttagtggaatcaggacaaattaacggtacattcggcttcatcaagtaccccagttcccaattaattgcaccaaacatctttaaactcgttgatatatagagtgtaacaatgtagcaaccaatgtgtaacaataaaagttacctgctagatcagtgggtgccaattatttaacaataaaacgacacgtcggtcgtgtaactataaaactacacttgaggtgtcgtttcattgttcaccaattggtacccagtggtcgaggtggtagttgtactgttatattggttgctatatcggccccacgttgggcgccgattttaaccccactttggccgttaaacagccaaaacccgattttactaaatgtgcgtcctgggcaaaagcaaaaaaatcaaagattcttttgagtgtatgtcgtaatgattcagatattggttaaaacgaattattaaaaaaataagattttacaattatttgacatttttcccaccttacggcgaaaaattcttagaaacagtgccacatatctcaatttgaaattagttttcatatccagaaaaaagtttcattcatttaccattacataatttggatggtattgcatataggatatttacactgtgagcgtcatcaacatataaaaaaaaataaaaaccactctggcagtttgtacacatggttatcttcagtaaaaggctttatagtctattttatttttacctatgtagcaaatatttatgcctgtactagtttctcatatatatatatatgcaatttataatgagctaaagatttaattgtaacagcagtaacgacaatcaaataatacagaacataactaaatgctggtttaaattaccaatacttcaaacctttcaaagtgcctctcatatttaatgaattttttttagattttttactcttttcattttgtcacctattgtgtaattatgtgattcaatatatttttcgaaatcttgttctggtcttttgtactgtttcttctttatacacttttattatactagtacactatagtactgattctagttactgagctagtttgtctggccataggactcgagctaccttcgtagatatctcatttgggttctctttaataggttaacacttctttttgcaattttgatctttagtaaccataatatacatatgcattactctaacaactgattttgccttattcgtttcttgcttcttcattgcatatcttcattgatagttaaaaaaatcgagaaattagtaagtctttaattgctttaattattattgttcttttaactattactatcgttttttctttcctcattttaaatgccattcagttttttgtctgtggcagtttaaaattgagttacagttgaccatagattcataaggaaattaatcattaatattctaatggcacttaatgcaattgagtaacaattaatgacatcaagcattgcattaatgcgaatataagtaacgattgatcacaaaatgccttttttattatgttccctttagtacgaagtatcttttgaaagctatatttgtagtagtgttgtaaacattttttatctaattaccagctttccatgattgcttcctaaccatattatgaggtcattaacaaaataccttgttgtagttcacagatgtaaccctattttctgtaaataagtgctaaacatggaccaatttgttgattaagtgctcaaaacctattttcattgtgctccaataatattctggtttttggttttgcaatataatttgtgacatatatacaattcttagcaatattctgttgctaatatatatttaaacattacatatttcaatacctatttattattattgtgagagacaattcgtttaatagttacatattacatactttattcttaaaattgcattggaaatatttattaagttaatagtatattgtgaaaccacagaacagcccaaagagtaatatatattttgctatgaaaccaggaaaatgccttttttataaaagagtcatatattttcaaataggaaaaatattccctccattacaattttttaaatcaatttaagaatatataagaatatattttttgatataggagtgcttctcagataaagcaatttgtgttattacttataggaattttaacagggggttacaagaagcttgcctaaccctttcttttagagtgttaagaaggctttttagaattccgtaaatttttgtagacggggctatttaagaagtttttttttccttttttaagacgattctaatgtctttaccgtacatttgcaataatgtgcttcttgaatggccttgtatgtttataagataaaattatataaaatttaatatattgatactatatttcagtatacatagcaata

SEQ ID NO: 1541 - DNA, 3912 bp, Diabrotica virgifera
tgaaaagtttcttcgtaggcttaatgttttttgctatcaacaagttactattgtataatacgtcttgaggtattgagttcaattcaatgtatcaacaatatgtagaattgaaaagaaataaataacaaattattcaattaatttttcgattgggggaatatcgtgaaacaggacagggcataatgttaaggatcatttattgtaccaatgtctttggtgcaaaaaattctgtggaaattaccaaacgcgaattaattttttatgtattgcatcaatatctctaattcatcataaaaacaacgaaataaatatttcttcgtgtcttctttttatttttcattgaatggccttaagatctcgcgtttttgtaaattaaaaagtcttagaattgattatagtgttataaaaaaggacgttgaaaataaaaagatcaagcacaagtgcacgctttaactctttcgcatagcagcatacacaacatttcttcagttgtatatttacaaagtatatttgttattttaggaatcataatacttaagaaagcttagccgaaacaatcaaagttggactttagtcaaaaatattgaacaacctctgggaaaaatgtctcatgtccaacacttttaccatgtttagtcgagccgacattaaaccaaaaaatatttattgataggagacgaattttaagtgtcatagtatttacgtttaatttatttatatagttaattttttcttgtgaggttcatctgtgaacagtattttgttaatgcagatatgaataactggtacttcgacctttgttgtaaagaaatgtgatattcagtatactttaagaacggagtgtttggcttatgcacatcagtgttggttgccaaatacttcaggcacgtgttgctactagactgccgctatacgattcattctaatcagacggcgtggcatcggcgcgcttctatcgtccataagaaatacgtagccctatctacgcaatgttccattcttaacgtgagacgctctatagttacaaatttgaaattgataatgtagtaaaactctttcacttcaatgtgtatgtacgcagtatcacgctacgcggagatactaactgccaagaataaaataatatttcgaaatcgagtgtgaaaggaaaataactattatttgagatatctgaagacaatcataatagagaacaggtgtaagactgtaaatttaatgaacaaaatctataccacaatgtaataaaaagtgttagaaacgagaggttatatggagaatacttcagaggtaattaaattatagatatgccagattcgaagagttataagtggactaaacacttctaatatcaatatggcggacaacctcaaaacgatcacagaaacagtcacactaataatgtgcgacactattttcatatatcttttgtacagataggaaatcacgtgtctttaataaaacaaaaatatgtttaaaattgttaattaagacagttgagatggtatcttagtggaatcaggacaaattaacggtacattcggcttcatcaagtaccccagttcccaattaattgcaccaaacatctttaaactcgttgatatatagagtgtaacaatgtagcaaccaatgtgtaacaataaaagttacctgctagatcagtgggtgccaattatttaacaataaaacgacacgtcggtcgtgtaactataaaactacacttgaggtgtcgtttcattgttcaccaattggtacccagtggtcgaggtggtagttgtactgttatattggttgctatatcggccccacgttgggcgccgattttaaccccactttggccgttaaacagccaaaacccgattttactaaatgtgcgtcctgggcaaaagcaaaaaaatcaaagattcttttgagtgtatgtcgtaatgattcagatattggttaaaacgaattattaaaaaaataagattttacaattatttgacatttttcccaccttacggcgaaaaattcttagaaacagtgccacatatctcaatttgaaattagttttcatatccagaaaaaagtttcattcatttaccattacataatttggatggtattgcatataggatatttacactgtgagcgtcatcaacatataaaaaaaaataaaaaccactctggcagtttgtacacatggttatcttcagtaaaaggctttatagtctattttatttttacctatgtagcaaatatttatgcctgtactagtttctcatatatatatatatgcaatttataatgagctaaagatttaattgtaacagcagtaacgacaatcaaataatacagaacataactaaatgctggtttaaattaccaatacttcaaacctttcaaagtgcctctcatatttaatgaattttttttagattttttactcttttcattttgtcacctattgtgtaattatgtgattcaatatatttttcgaaatcttgttctggtcttttgtactgtttcttctttatacacttttattatactagtacactatagtactgattctagttactgagctagtttgtctggccataggactcgagctaccttcgtagatatctcatttgggttctctttaataggttaacacttctttttgcaattttgatctttagtaaccataatatacatatgcattactctaacaactgattttgccttattcgtttcttgcttcttcattgcatatcttcattgatagttaaaaaaatcgagaaattagtaagtctttaattgctttaattattattgttcttttaactattactatcgttttttctttcctcattttaaatgccattcagttttttgtctgtggcagtttaaaattgagttacagttgaccatagattcataaggaaattaatcattaatattctaatggcacttaatgcaattgagtaacaattaatgacatcaagcattgcattaatgcgaatataagtaacgattgatcacaaaatgccttttttattatgttccctttagtacgaagtatcttttgaaagctatatttgtagtagtgttgtaaacattttttatctaattaccagctttccatgattgcttcctaaccatattatgaggtcattaacaaaataccttgttgtagttcacagatgtaaccctattttctgtaaataagtgctaaacatggaccaatttgttgattaagtgctcaaaacctattttcattgtgctccaataatattctggtttttggttttgcaatataatttgtgacatatatacaattcttagcaatattctgttgctaatatatatttaaacattacatatttcaatacctatttattattattgtgagagacaattcgtttaatagttacatattacatactttattcttaaaattgcattggaaatatttattaagttaatagtatattgtgaaaccacagaacagcccaaagagtaatatatattttgctatgaaaccaggaaaatgccttttttataaaagagtcatatattttcaaataggaaaaatattccctccattacaattttttaaatcaatttaagaatatataagaatatattttttgatataggagtgcttctcagataaagcaatttgtgttattacttataggaattttaacagggggttacaagaagcttgcctaaccctttcttttagagtgttaagaaggctttttagaattccgtaaatttttgtagacggggctatttaagaagtttttttttccttttttaagacgattctaatgtctttaccgtacatttgcaataatgtgcttcttgaatggccttgtatgtttataagataaaattatataaaatttaatatattgatactatatttcagtatacatagcaata

SEQ ID NO: 1542 - DNA, 3910 bp, Diabrotica virgifera
tgaaaagtttcttcgtaggcttaatgttttttgctatcaacaagttactattgtataatacgtcttgaggtattgagttcaattcaatgtatcaacaatatgtagaattgaaaagaaataaataacaaattattcaattaatttttcgattgggggaatatcgtgaaacaggacagggcataatgttaaggatcatttattgtaccaatgtctttggtgcaaaaaattctgtggaaattaccaaacgcgaattaattttttatgtattgcatcaatatctctaattcatcataaaaacaacgaaataaatatttcttcgtgtcttctttttatttttcattgaatggccttaagatctcgcgtttttgtaaattaaaaagtcttagaattgattatagtgttataaaaaaggacgttgaaaataaaaagatcaagcacaagtgcacgctttaactctttcgcatagcagcatacacaacatttcttcagttgtatatttacaaagtatatttgttattttaggaatcataatacttaagaaagcttagccgaaacaatcaaagttggactttagtcaaaaatattgaacaacctctgggaaaaatgtctcatgtccaacacttttaccatgtttagtcgagccgacattaaaccaaaaaatatttattgataggagacgaattttaagtgtcatagtatttacgtttaatttatttatatagttaattttttcttgtgaggttcatctgtgaacagtattttgttaatgcagatatgaataactggtacttcgacctttgttgtaaagaaatgtgatattcagtatactttattcactttaggaacggagcgtttggcttatgcacatcagtgttggttgccaaatacttcaggcacgtgttgctactagactgccgctatacaattcattttgtggcatcggcgcgcttctatcgtccataagaaatacgtagccctatctacgcaatgttccattcttaacgtgagacgctctatagttacaaatttgaaattgataatgtagtaaaactctttcacttcaatgtgtatgtacgcagtatcacgctacgcggagatactaactgccaagaataaaataatatttcgaaatcgagtgtgaaaggaaaataactattatttgagatatctgaagacaatcataatagagaacaggtgtaagactgtaaatttaatgaacaaaatctataccacaatgtaataaaaagtgttagaaacgagaggttatatggagaatacttcagaggtaattaaattatagatatgccagattcgaagagttataagtggactaaacacttctaatatcaatatggcggacaacctcaaaacgatcacagaaacagtcacactaataatgtgcgacactattttcatatatcttttgtacagataggaaatcacgtgtctttaataaaacaaaaatatgtttaaaattgttaattaagacagttgagatggtatcttagtggaatcaggacaaattaacggtacattcggcttcatcaagtaccccagttcccaattaattgcaccaaacatctttaaactcgttgatatatagagtgtaacaatgtagcaaccaatgtgtaacaataaaagttacctgctagatcagtgggtgccaattatttaacaataaaacgacacgtcggtcgtgtaactataaaactacacttgaggtgtcgtttcattgttcaccaattggtacccagtggtcgaggtggtagttgtactgttatattggttgctatatcggccccacgttgggcgccgattttaaccccactttggccgttaaacagccaaaacccgattttactaaatgtgcgtcctgggcaaaagcaaaaaaatcaaagattcttttgagtgtatgtcgtaatgattcagatattggttaaaacgaattattaaaaaaataagattttacaattatttgacatttttcccaccttacggcgaaaaattcttagaaacagtgccacatatctcaatttgaaattagttttcatatccagaaaaaagtttcattcatttaccattacataatttggatggtattgcatataggatatttacactgtgagcgtcatcaacatataaaaaaaaataaaaaccactctggcagtttgtacacatggttatcttcagtaaaaggctttatagtctattttatttttacctatgtagcaaatatttatgcctgtactagtttctcatatatatatatatgcaatttataatgagctaaagatttaattgtaacagcagtaacgacaatcaaataatacagaacataactaaatgctggtttaaattaccaatacttcaaacctttcaaagtgcctctcatatttaatgaattttttttagattttttactcttttcattttgtcacctattgtgtaattatgtgattcaatatatttttcgaaatcttgttctggtcttttgtactgtttcttctttatacacttttattatactagtacactatagtactgattctagttactgagctagtttgtctggccataggactcgagctaccttcgtagatatctcatttgggttctctttaataggttaacacttctttttgcaattttgatctttagtaaccataatatacatatgcattactctaacaactgattttgccttattcgtttcttgcttcttcattgcatatcttcattgatagttaaaaaaatcgagaaattagtaagtctttaattgctttaattattattgttcttttaactattactatcgttttttctttcctcattttaaatgccattcagttttttgtctgtggcagtttaaaattgagttacagttgaccatagattcataaggaaattaatcattaatattctaatggcacttaatgcaattgagtaacaattaatgacatcaagcattgcattaatgcgaatataagtaacgattgatcacaaaatgccttttttattatgttccctttagtacgaagtatcttttgaaagctatatttgtagtagtgttgtaaacattttttatctaattaccagctttccatgattgcttcctaaccatattatgaggtcattaacaaaataccttgttgtagttcacagatgtaaccctattttctgtaaataagtgctaaacatggaccaatttgttgattaagtgctcaaaacctattttcattgtgctccaataatattctggtttttggttttgcaatataatttgtgacatatatacaattcttagcaatattctgttgctaatatatatttaaacattacatatttcaatacctatttattattattgtgagagacaattcgtttaatagttacatattacatactttattcttaaaattgcattggaaatatttattaagttaatagtatattgtgaaaccacagaacagcccaaagagtaatatatattttgctatgaaaccaggaaaatgccttttttataaaagagtcatatattttcaaataggaaaaatattccctccattacaattttttaaatcaatttaagaatatataagaatatattttttgatataggagtgcttctcagataaagcaatttgtgttattacttataggaattttaacagggggttacaagaagcttgcctaaccctttcttttagagtgttaagaaggctttttagaattccgtaaatttttgtagacggggctatttaagaagtttttttttccttttttaagacgattctaatgtctttaccgtacatttgcaataatgtgcttcttgaatggccttgtatgtttataagataaaattatataaaatttaatatattgatactatatttcagtatacatagcaata

SEQ ID NO: 1543 - DNA, 4615 bp, Diabrotica virgifera
  SmartBlast Evalue=7E-94; Info=Kayak n=3 Tax=Tribolium castaneum RepID=D6WZA9_TRICA
attttttttcgacaagtcgagcctcggacaagtcgtgtgctcgactttttaactttttttttattttttacgaacgaacgaatcgctatcgatcggtagtatcgatttctttacgaatttttacgcatacgtatacgcaacaagttttttcgtgcgaatttttttttgtcatttttgcgtgttttatttttttacttaacgataatttttctccgaaatggcgtttttggatcagaaggaaatcactcactttcttgctcaggagttattatatcagcagtttataactctcgaaggcctcaattccggagtcccaactcgaaccacacctactttgactccaaccacgttacgaaacattgagcaaacttttattgagctccaatcgaagcccgagagccacgaaaatgaagcgggatttgtaccaccaatagtgcattctttaggtcacaaccaatacatttccgcttcagacgcagatagtttttcatctaaatctcaaccggcttggcatagtagcactctttcccaatcaagctcggattgtgatacccgtttgactccccctttatcccagaaaagctctggcggacaatcacgcagaaacatgggcggtcgaaaaccgactaaagatctcaattgcagcccggaagaagaggagaggagaagaattagaagagaaagaaacaaagccgctgcagccagatgcagaaagagaagagttgatcatactaattcgctcgtaatggaaactgaggagctagaacacaagaagcaaatacttcaggatgaaatgcacgaactccaacaaatgaaagaccacctagaatacctcctcgagtcccacaaggcgcagtgtcgcttgagcacccaaagtcccccagacgtcaaaccatacaaccactacaacaacgaacgtgttaaatccgaatacatagaacctttacatgatattttcttacttcctagtcctacgaaaaaagtgatgttaagttccacagtgccaatctcgaaacctaccagacctagcactttaaatgtaggagccacagcccccaaatcggtatcagacatactaggaggccctgtgtctactccctctaccggaattatgttcaactttgaatctctaatgggcggcggtaccggtttgacacctgtatccgtcgcgacgccactagtgccatcttgtagttcgcaacagaggaatattccggaatcataatacttaagaaagcttagccgaaacaatcaaagttggactttagtcaaaaatattgaacaacctctgggaaaaatgtctcatgtccaacacttttaccatgtttagtcgagccgacattaaaccaaaaaatatttattgataggagacgaattttaagtgtcatagtatttacgtttaatttatttatatagttaattttttcttgtgaggttcatctgtgaacagtattttgttaatgcagatatgaataactggtacttcgacctttgttgtaaagaaatgtgatattcagtatactttattcactttaggaacggagcgtttggcttatgcacatcagtgttggttgccaaatacttcaggcacgtgttgctactagactgccgctatacgattcattctaatcagacggcgtggcatcggcgcgcttctatcgtccataagaaatacgtagccctatctacgcaatgttccattcttaacgtgagacgctctatagttacaaatttgaaattgataatgtagtaaaactctttcacttcaatgtgtatgtacgcagtatcacgctacgcggagatactaactgccaagaataaaataatatttcgaaatcgagtgtgaaaggaaaataactattatttgagatatctgaagacaatcataatagagaacaggtgtaagactgtaaatttaatgaacaaaatctataccacaatgtaataaaaagtgttagaaacgagaggttatatggagaatacttcagaggtaattaaattatagatatgccagattcgaagagttataagtggactaaacacttctaatatcaatatggcggacaacctcaaaacgatcacagaaacagtcacactaataatgtgcgacactattttcatatatcttttgtacagataggaaatcacgtgtctttaataaaacaaaaatatgtttaaaattgttaattaagacagttgagatggtatcttagtggaatcaggacaaattaacggtacattcggcttcatcaagtaccccagttcccaattaattgcaccaaacatctttaaactcgttgatatatagagtgtaacaatgtagcaaccaatgtgtaacaataaaagttacctgctagatcagtgggtgccaattatttaacaataaaacgacacgtcggtcgtgtaactataaaactacacttgaggtgtcgtttcattgttcaccaattggtacccagtggtcgaggtggtagttgtactgttatattggttgctatatcggccccacgttgggcgccgattttaaccccactttggccgttaaacagccaaaacccgattttactaaatgtgcgtcctgggcaaaagcaaaaaaatcaaagattcttttgagtgtatgtcgtaatgattcagatattggttaaaacgaattattaaaaaaataagattttacaattatttgacatttttcccaccttacggcgaaaaattcttagaaacagtgccacatatctcaatttgaaattagttttcatatccagaaaaaagtttcattcatttaccattacataatttggatggtattgcatataggatatttacactgtgagcgtcatcaacatataaaaaaaaataaaaaccactctggcagtttgtacacatggttatcttcagtaaaaggctttatagtctattttatttttacctatgtagcaaatatttatgcctgtactagtttctcatatatatatatatgcaatttataatgagctaaagatttaattgtaacagcagtaacgacaatcaaataatacagaacataactaaatgctggtttaaattaccaatacttcaaacctttcaaagtgcctctcatatttaatgaattttttttagattttttactcttttcattttgtcacctattgtgtaattatgtgattcaatatatttttcgaaatcttgttctggtcttttgtactgtttcttctttatacacttttattatactagtacactatagtactgattctagttactgagctagtttgtctggccataggactcgagctaccttcgtagatatctcatttgggttctctttaataggttaacacttctttttgcaattttgatctttagtaaccataatatacatatgcattactctaacaactgattttgccttattcgtttcttgcttcttcattgcatatcttcattgatagttaaaaaaatcgagaaattagtaagtctttaattgctttaattattattgttcttttaactattactatcgttttttctttcctcattttaaatgccattcagttttttgtctgtggcagtttaaaattgagttacagttgaccatagattcataaggaaattaatcattaatattctaatggcacttaatgcaattgagtaacaattaatgacatcaagcattgcattaatgcgaatataagtaacgattgatcacaaaatgccttttttattatgttccctttagtacgaagtatcttttgaaagctatatttgtagtagtgttgtaaacattttttatctaattaccagctttccatgattgcttcctaaccatattatgaggtcattaacaaaataccttgttgtagttcacagatgtaaccctattttctgtaaataagtgctaaacatggaccaatttgttgattaagtgctcaaaacctattttcattgtgctccaataatattctggtttttggttttgcaatataatttgtgacatatatacaattcttagcaatattctgttgctaatatatatttaaacattacatatttcaatacctatttattattattgtgagagacaattcgtttaatagttacatattacatactttattcttaaaattgcattggaaatatttattaagttaatagtatattgtgaaaccacagaacagcccaaagagtaatatatattttgctatgaaaccaggaaaatgccttttttataaaagagtcatatattttcaaataggaaaaatattccctccattacaattttttaaatcaatttaagaatatataagaatatattttttgatataggagtgcttctcagataaagcaatttgtgttattacttataggaattttaacagggggttacaagaagcttgcctaaccctttcttttagagtgttaagaaggctttttagaattccgtaaatttttgtagacggggctatttaagaagtttttttttccttttttaagacgattctaatgtctttaccgtacatttgcaataatgtgcttcttgaatggccttgtatgtttataagataaaattatataaaatttaatatattgatactatatttcagtatacatagcaata

SEQ ID NO: 1544 - DNA, 3901 bp, Diabrotica virgifera
tgaaaagtttcttcgtaggcttaatgttttttgctatcaacaagttactattgtataatacgtcttgaggtattgagttcaattcaatgtatcaacaatatgtagaattgaaaagaaataaataacaaattattcaattaatttttcgattgggggaatatcgtgaaacaggacagggcataatgttaaggatcatttattgtaccaatgtctttggtgcaaaaaattctgtggaaattaccaaacgcgaattaattttttatgtattgcatcaatatctctaattcatcataaaaacaacgaaataaatatttcttcgtgtcttctttttatttttcattgaatggccttaagatctcgcgtttttgtaaattaaaaagtcttagaattgattatagtgttataaaaaaggacgttgaaaataaaaagatcaagcacaagtgcacgctttaactctttcgcatagcagcatacacaacatttcttcagttgtatatttacaaagtatatttgttattttaggaatcataatacttaagaaagcttagccgaaacaatcaaagttggactttagtcaaaaatattgaacaacctctgggaaaaatgtctcatgtccaacacttttaccatgtttagtcgagccgacattaaaccaaaaaatatttattgataggagacgaattttaagtgtcatagtatttacgtttaatttatttatatagttaattttttcttgtgaggttcatctgtgaacagtattttgttaatgcagatatgaataactggtacttcgacctttgttgtaaagaaatgtgatattcagtatactttaagaacggagtgtttggcttatgcacatcagtgttggttgccaaatacttcaggcacgtgttgctactagactgccgctatacaattcattttgtggcatcggcgcgcttctatcgtccataagaaatacgtagccctatctacgcaatgttccattcttaacgtgagacgctctatagttacaaatttgaaattgataatgtagtaaaactctttcacttcaatgtgtatgtacgcagtatcacgctacgcggagatactaactgccaagaataaaataatatttcgaaatcgagtgtgaaaggaaaataactattatttgagatatctgaagacaatcataatagagaacaggtgtaagactgtaaatttaatgaacaaaatctataccacaatgtaataaaaagtgttagaaacgagaggttatatggagaatacttcagaggtaattaaattatagatatgccagattcgaagagttataagtggactaaacacttctaatatcaatatggcggacaacctcaaaacgatcacagaaacagtcacactaataatgtgcgacactattttcatatatcttttgtacagataggaaatcacgtgtctttaataaaacaaaaatatgtttaaaattgttaattaagacagttgagatggtatcttagtggaatcaggacaaattaacggtacattcggcttcatcaagtaccccagttcccaattaattgcaccaaacatctttaaactcgttgatatatagagtgtaacaatgtagcaaccaatgtgtaacaataaaagttacctgctagatcagtgggtgccaattatttaacaataaaacgacacgtcggtcgtgtaactataaaactacacttgaggtgtcgtttcattgttcaccaattggtacccagtggtcgaggtggtagttgtactgttatattggttgctatatcggccccacgttgggcgccgattttaaccccactttggccgttaaacagccaaaacccgattttactaaatgtgcgtcctgggcaaaagcaaaaaaatcaaagattcttttgagtgtatgtcgtaatgattcagatattggttaaaacgaattattaaaaaaataagattttacaattatttgacatttttcccaccttacggcgaaaaattcttagaaacagtgccacatatctcaatttgaaattagttttcatatccagaaaaaagtttcattcatttaccattacataatttggatggtattgcatataggatatttacactgtgagcgtcatcaacatataaaaaaaaataaaaaccactctggcagtttgtacacatggttatcttcagtaaaaggctttatagtctattttatttttacctatgtagcaaatatttatgcctgtactagtttctcatatatatatatatgcaatttataatgagctaaagatttaattgtaacagcagtaacgacaatcaaataatacagaacataactaaatgctggtttaaattaccaatacttcaaacctttcaaagtgcctctcatatttaatgaattttttttagattttttactcttttcattttgtcacctattgtgtaattatgtgattcaatatatttttcgaaatcttgttctggtcttttgtactgtttcttctttatacacttttattatactagtacactatagtactgattctagttactgagctagtttgtctggccataggactcgagctaccttcgtagatatctcatttgggttctctttaataggttaacacttctttttgcaattttgatctttagtaaccataatatacatatgcattactctaacaactgattttgccttattcgtttcttgcttcttcattgcatatcttcattgatagttaaaaaaatcgagaaattagtaagtctttaattgctttaattattattgttcttttaactattactatcgttttttctttcctcattttaaatgccattcagttttttgtctgtggcagtttaaaattgagttacagttgaccatagattcataaggaaattaatcattaatattctaatggcacttaatgcaattgagtaacaattaatgacatcaagcattgcattaatgcgaatataagtaacgattgatcacaaaatgccttttttattatgttccctttagtacgaagtatcttttgaaagctatatttgtagtagtgttgtaaacattttttatctaattaccagctttccatgattgcttcctaaccatattatgaggtcattaacaaaataccttgttgtagttcacagatgtaaccctattttctgtaaataagtgctaaacatggaccaatttgttgattaagtgctcaaaacctattttcattgtgctccaataatattctggtttttggttttgcaatataatttgtgacatatatacaattcttagcaatattctgttgctaatatatatttaaacattacatatttcaatacctatttattattattgtgagagacaattcgtttaatagttacatattacatactttattcttaaaattgcattggaaatatttattaagttaatagtatattgtgaaaccacagaacagcccaaagagtaatatatattttgctatgaaaccaggaaaatgccttttttataaaagagtcatatattttcaaataggaaaaatattccctccattacaattttttaaatcaatttaagaatatataagaatatattttttgatataggagtgcttctcagataaagcaatttgtgttattacttataggaattttaacagggggttacaagaagcttgcctaaccctttcttttagagtgttaagaaggctttttagaattccgtaaatttttgtagacggggctatttaagaagtttttttttccttttttaagacgattctaatgtctttaccgtacatttgcaataatgtgcttcttgaatggccttgtatgtttataagataaaattatataaaatttaatatattgatactatatttcagtatacatagcaata

SEQ ID NO: 1545 - DNA, 3880 bp, Diabrotica virgifera
tgaaaagtttcttcgtaggcttaatgttttttgctatcaacaagttactattgtataatacgtcttgaggtattgagttcaattcaatgtatcaacaatatgtagaattgaaaagaaataaataacaaattattcaattaatttttcgattgggggaatatcgtgaaacaggacagggcataatgttaaggatcatttattgtaccaatgtctttggtgcaaaaaattctgtggaaattaccaaacgcgaattaattttttatgtattgcatcaatatctctaattcatcataaaaacaacgaaataaatatttcttcgtgtcttctttttatttttcattgaatggccttaagatctcgcgtttttgtaaattaaaaagtcttagaattgattatagtgttataaaaaaggacgttgaaaataaaaagatcaagcacaagtgcacgctttaactctttcgcatagcagcatacacaacatttcttcagttgtatatttacaaagtatatttgttattttaggaatcataatacttaagaaagcttagccgaaacaatcaaagttggactttagtcaaaaatattgaacaacctctgggaaaaatgtctcatgtccaacacttttaccatgtttagtcgagccgacattaaaccaaaaaatatttattgataggagacgaattttaagtgtcatagtatttacgtttaatttatttatatagttaattttttcttgtgaggttcatctgtgaacagtattttgttaatgcagatatgaataactggtacttcgacctttgttgtaaagaaatgtgatattcagtatactttattcactttaggaacggagcgtttggcttatgcacatcagtgttggttgccaaatacttcaggcacgtgttgctactagactgccgctatacgattcattctaatcagacggcgtggcatcggcgcgcttctatcgtccataagaaatacgtagccctatctacgcaatgttccattcttaacgtgagacgctctatagttacaaatttgaaattgataatgtagtaaaactctttcacttcaatgtgtatgtacgcagtatcacgctacgcggagatactaactgccaagaataaaataatatttcgaaatcgagtgtgaaaggaaaataactattatttgagatatctgaagacaatcataatagagaacaggtgtaagactgtaaatttaatgaacaaaatctataccacaatgtaataaaaagtgttagaaacgagaggttatatggagaatacttcagaggtaattaaattatagatatgccagattcgaagagttataagtggactaaacacttctaatatcaatatggcggacaacctcaaaacgatcacagaaacagtcacactaataatgtgcgacactattttcatatatcttttgtacagataggaaatcacgtgtctttaataaaacaaaaatatgtttaaaattgttaattaagacagttgagatggtatcttagtggaatcaggacaaattaacggtacattcggcttcatcaagtaccccagttcccaattaattgcaccaaacatctttaaactcgttgatatatagagtgtaacaatgtagcaaccaatgtgtaacaataaaagttacctgctagatcagtgggtgccaattatttaacaataaaacgacacgtcggtcgtgtaactataaaactacacttgaggtgtcgtttcattgttcaccaattggtacccagtggtcgaggtggtagttgtactgttatattggttgctatatcggccccacgttgggcgccgattttaaccccactttggccgttaaacagccaaaacccgattttactaaatgtgcgtcctgggcaaaagcaaaaaaatcaaagattcttttgagtgtatgtcgtaatgattcagatattggttaaaacgaattattaaaaaaataagattttacaattatttgacatttttcccaccttacggcgaaaaattcttagaaacagtgccacatatctcaatttgaaattagttttcatatccagaaaaaagtttcattcatttaccattacataatttggatggtattgcatataggatatttacactgtgagcgtcatcaacatataaaaaaaaataaaaaccactctggcagtttgtacacatggttatcttcagtaaaaggctttatagtctattttatttttacctatgtagcaaatatttatgcctgtactagtttctcatatatatatatatgcaatttataatgagctaaagatttaattgtaacagcagtaacgacaatcaaataatacagaacataactaaatgctggtttaaattaccaatacttcaaacctttcaaagtgcctctcatatttaatgaattttttttagattttttactcttttcattttgtcacctattgtgtaattatgtgattcaatatatttttcgaaatcttgttctggtcttttgtactgtttcttctttatacacttttattatactagtacactatagtactgattctagttactgagctagtttgtctggccataggactcgagctaccttcgtagatatctcatttgggttctctttaataggttaacacttctttttgcaattttgatctttagtaaccataatatacatatgcattactctaacaactgattttgccttattcgtttcttgcttcttcattgcatatcttcattgatagttaaaaaaatcgagaaattagtaagtctttaattgctttaattattattgttcttttaactattactatcgttttttctttcctcattttaaatgccattcagttttttgtctgtggcagtttaaaattgagttacagttgaccatagattcataaggaaattaatcattaatattctaatggcacttaatgcgaatataagtaacgattgatcacaaaatgccttttttattatgttccctttagtacgaagtatcttttgaaagctatatttgtagtagtgttgtaaacattttttatctaattaccagctttccatgattgcttcctaaccatattatgaggtcattaacaaaataccttgttgtagttcacagatgtaaccctattttctgtaaataagtgctaaacatggaccaatttgttgattaagtgctcaaaacctattttcattgtgctccaataatattctggtttttggttttgcaatataatttgtgacatatatacaattcttagcaatattctgttgctaatatatatttaaacattacatatttcaatacctatttattattattgtgagagacaattcgtttaatagttacatattacatactttattcttaaaattgcattggaaatatttattaagttaatagtatattgtgaaaccacagaacagcccaaagagtaatatatattttgctatgaaaccaggaaaatgccttttttataaaagagtcatatattttcaaataggaaaaatattccctccattacaattttttaaatcaatttaagaatatataagaatatattttttgatataggagtgcttctcagataaagcaatttgtgttattacttataggaattttaacagggggttacaagaagcttgcctaaccctttcttttagagtgttaagaaggctttttagaattccgtaaatttttgtagacggggctatttaagaagtttttttttccttttttaagacgattctaatgtctttaccgtacatttgcaataatgtgcttcttgaatggccttgtatgtttataagataaaattatataaaatttaatatattgatactatatttcagtatacatagcaata

SEQ ID NO: 1546 - DNA, 3871 bp, Diabrotica virgifera
tgaaaagtttcttcgtaggcttaatgttttttgctatcaacaagttactattgtataatacgtcttgaggtattgagttcaattcaatgtatcaacaatatgtagaattgaaaagaaataaataacaaattattcaattaatttttcgattgggggaatatcgtgaaacaggacagggcataatgttaaggatcatttattgtaccaatgtctttggtgcaaaaaattctgtggaaattaccaaacgcgaattaattttttatgtattgcatcaatatctctaattcatcataaaaacaacgaaataaatatttcttcgtgtcttctttttatttttcattgaatggccttaagatctcgcgtttttgtaaattaaaaagtcttagaattgattatagtgttataaaaaaggacgttgaaaataaaaagatcaagcacaagtgcacgctttaactctttcgcatagcagcatacacaacatttcttcagttgtatatttacaaagtatatttgttattttaggaatcataatacttaagaaagcttagccgaaacaatcaaagttggactttagtcaaaaatattgaacaacctctgggaaaaatgtctcatgtccaacacttttaccatgtttagtcgagccgacattaaaccaaaaaatatttattgataggagacgaattttaagtgtcatagtatttacgtttaatttatttatatagttaattttttcttgtgaggttcatctgtgaacagtattttgttaatgcagatatgaataactggtacttcgacctttgttgtaaagaaatgtgatattcagtatactttaagaacggagtgtttggcttatgcacatcagtgttggttgccaaatacttcaggcacgtgttgctactagactgccgctatacgattcattctaatcagacggcgtggcatcggcgcgcttctatcgtccataagaaatacgtagccctatctacgcaatgttccattcttaacgtgagacgctctatagttacaaatttgaaattgataatgtagtaaaactctttcacttcaatgtgtatgtacgcagtatcacgctacgcggagatactaactgccaagaataaaataatatttcgaaatcgagtgtgaaaggaaaataactattatttgagatatctgaagacaatcataatagagaacaggtgtaagactgtaaatttaatgaacaaaatctataccacaatgtaataaaaagtgttagaaacgagaggttatatggagaatacttcagaggtaattaaattatagatatgccagattcgaagagttataagtggactaaacacttctaatatcaatatggcggacaacctcaaaacgatcacagaaacagtcacactaataatgtgcgacactattttcatatatcttttgtacagataggaaatcacgtgtctttaataaaacaaaaatatgtttaaaattgttaattaagacagttgagatggtatcttagtggaatcaggacaaattaacggtacattcggcttcatcaagtaccccagttcccaattaattgcaccaaacatctttaaactcgttgatatatagagtgtaacaatgtagcaaccaatgtgtaacaataaaagttacctgctagatcagtgggtgccaattatttaacaataaaacgacacgtcggtcgtgtaactataaaactacacttgaggtgtcgtttcattgttcaccaattggtacccagtggtcgaggtggtagttgtactgttatattggttgctatatcggccccacgttgggcgccgattttaaccccactttggccgttaaacagccaaaacccgattttactaaatgtgcgtcctgggcaaaagcaaaaaaatcaaagattcttttgagtgtatgtcgtaatgattcagatattggttaaaacgaattattaaaaaaataagattttacaattatttgacatttttcccaccttacggcgaaaaattcttagaaacagtgccacatatctcaatttgaaattagttttcatatccagaaaaaagtttcattcatttaccattacataatttggatggtattgcatataggatatttacactgtgagcgtcatcaacatataaaaaaaaataaaaaccactctggcagtttgtacacatggttatcttcagtaaaaggctttatagtctattttatttttacctatgtagcaaatatttatgcctgtactagtttctcatatatatatatatgcaatttataatgagctaaagatttaattgtaacagcagtaacgacaatcaaataatacagaacataactaaatgctggtttaaattaccaatacttcaaacctttcaaagtgcctctcatatttaatgaattttttttagattttttactcttttcattttgtcacctattgtgtaattatgtgattcaatatatttttcgaaatcttgttctggtcttttgtactgtttcttctttatacacttttattatactagtacactatagtactgattctagttactgagctagtttgtctggccataggactcgagctaccttcgtagatatctcatttgggttctctttaataggttaacacttctttttgcaattttgatctttagtaaccataatatacatatgcattactctaacaactgattttgccttattcgtttcttgcttcttcattgcatatcttcattgatagttaaaaaaatcgagaaattagtaagtctttaattgctttaattattattgttcttttaactattactatcgttttttctttcctcattttaaatgccattcagttttttgtctgtggcagtttaaaattgagttacagttgaccatagattcataaggaaattaatcattaatattctaatggcacttaatgcgaatataagtaacgattgatcacaaaatgccttttttattatgttccctttagtacgaagtatcttttgaaagctatatttgtagtagtgttgtaaacattttttatctaattaccagctttccatgattgcttcctaaccatattatgaggtcattaacaaaataccttgttgtagttcacagatgtaaccctattttctgtaaataagtgctaaacatggaccaatttgttgattaagtgctcaaaacctattttcattgtgctccaataatattctggtttttggttttgcaatataatttgtgacatatatacaattcttagcaatattctgttgctaatatatatttaaacattacatatttcaatacctatttattattattgtgagagacaattcgtttaatagttacatattacatactttattcttaaaattgcattggaaatatttattaagttaatagtatattgtgaaaccacagaacagcccaaagagtaatatatattttgctatgaaaccaggaaaatgccttttttataaaagagtcatatattttcaaataggaaaaatattccctccattacaattttttaaatcaatttaagaatatataagaatatattttttgatataggagtgcttctcagataaagcaatttgtgttattacttataggaattttaacagggggttacaagaagcttgcctaaccctttcttttagagtgttaagaaggctttttagaattccgtaaatttttgtagacggggctatttaagaagtttttttttccttttttaagacgattctaatgtctttaccgtacatttgcaataatgtgcttcttgaatggccttgtatgtttataagataaaattatataaaatttaatatattgatactatatttcagtatacatagcaata

SEQ ID NO: 1547 - DNA, 3869 bp, Diabrotica virgifera
tgaaaagtttcttcgtaggcttaatgttttttgctatcaacaagttactattgtataatacgtcttgaggtattgagttcaattcaatgtatcaacaatatgtagaattgaaaagaaataaataacaaattattcaattaatttttcgattgggggaatatcgtgaaacaggacagggcataatgttaaggatcatttattgtaccaatgtctttggtgcaaaaaattctgtggaaattaccaaacgcgaattaattttttatgtattgcatcaatatctctaattcatcataaaaacaacgaaataaatatttcttcgtgtcttctttttatttttcattgaatggccttaagatctcgcgtttttgtaaattaaaaagtcttagaattgattatagtgttataaaaaaggacgttgaaaataaaaagatcaagcacaagtgcacgctttaactctttcgcatagcagcatacacaacatttcttcagttgtatatttacaaagtatatttgttattttaggaatcataatacttaagaaagcttagccgaaacaatcaaagttggactttagtcaaaaatattgaacaacctctgggaaaaatgtctcatgtccaacacttttaccatgtttagtcgagccgacattaaaccaaaaaatatttattgataggagacgaattttaagtgtcatagtatttacgtttaatttatttatatagttaattttttcttgtgaggttcatctgtgaacagtattttgttaatgcagatatgaataactggtacttcgacctttgttgtaaagaaatgtgatattcagtatactttattcactttaggaacggagcgtttggcttatgcacatcagtgttggttgccaaatacttcaggcacgtgttgctactagactgccgctatacaattcattttgtggcatcggcgcgcttctatcgtccataagaaatacgtagccctatctacgcaatgttccattcttaacgtgagacgctctatagttacaaatttgaaattgataatgtagtaaaactctttcacttcaatgtgtatgtacgcagtatcacgctacgcggagatactaactgccaagaataaaataatatttcgaaatcgagtgtgaaaggaaaataactattatttgagatatctgaagacaatcataatagagaacaggtgtaagactgtaaatttaatgaacaaaatctataccacaatgtaataaaaagtgttagaaacgagaggttatatggagaatacttcagaggtaattaaattatagatatgccagattcgaagagttataagtggactaaacacttctaatatcaatatggcggacaacctcaaaacgatcacagaaacagtcacactaataatgtgcgacactattttcatatatcttttgtacagataggaaatcacgtgtctttaataaaacaaaaatatgtttaaaattgttaattaagacagttgagatggtatcttagtggaatcaggacaaattaacggtacattcggcttcatcaagtaccccagttcccaattaattgcaccaaacatctttaaactcgttgatatatagagtgtaacaatgtagcaaccaatgtgtaacaataaaagttacctgctagatcagtgggtgccaattatttaacaataaaacgacacgtcggtcgtgtaactataaaactacacttgaggtgtcgtttcattgttcaccaattggtacccagtggtcgaggtggtagttgtactgttatattggttgctatatcggccccacgttgggcgccgattttaaccccactttggccgttaaacagccaaaacccgattttactaaatgtgcgtcctgggcaaaagcaaaaaaatcaaagattcttttgagtgtatgtcgtaatgattcagatattggttaaaacgaattattaaaaaaataagattttacaattatttgacatttttcccaccttacggcgaaaaattcttagaaacagtgccacatatctcaatttgaaattagttttcatatccagaaaaaagtttcattcatttaccattacataatttggatggtattgcatataggatatttacactgtgagcgtcatcaacatataaaaaaaaataaaaaccactctggcagtttgtacacatggttatcttcagtaaaaggctttatagtctattttatttttacctatgtagcaaatatttatgcctgtactagtttctcatatatatatatatgcaatttataatgagctaaagatttaattgtaacagcagtaacgacaatcaaataatacagaacataactaaatgctggtttaaattaccaatacttcaaacctttcaaagtgcctctcatatttaatgaattttttttagattttttactcttttcattttgtcacctattgtgtaattatgtgattcaatatatttttcgaaatcttgttctggtcttttgtactgtttcttctttatacacttttattatactagtacactatagtactgattctagttactgagctagtttgtctggccataggactcgagctaccttcgtagatatctcatttgggttctctttaataggttaacacttctttttgcaattttgatctttagtaaccataatatacatatgcattactctaacaactgattttgccttattcgtttcttgcttcttcattgcatatcttcattgatagttaaaaaaatcgagaaattagtaagtctttaattgctttaattattattgttcttttaactattactatcgttttttctttcctcattttaaatgccattcagttttttgtctgtggcagtttaaaattgagttacagttgaccatagattcataaggaaattaatcattaatattctaatggcacttaatgcgaatataagtaacgattgatcacaaaatgccttttttattatgttccctttagtacgaagtatcttttgaaagctatatttgtagtagtgttgtaaacattttttatctaattaccagctttccatgattgcttcctaaccatattatgaggtcattaacaaaataccttgttgtagttcacagatgtaaccctattttctgtaaataagtgctaaacatggaccaatttgttgattaagtgctcaaaacctattttcattgtgctccaataatattctggtttttggttttgcaatataatttgtgacatatatacaattcttagcaatattctgttgctaatatatatttaaacattacatatttcaatacctatttattattattgtgagagacaattcgtttaatagttacatattacatactttattcttaaaattgcattggaaatatttattaagttaatagtatattgtgaaaccacagaacagcccaaagagtaatatatattttgctatgaaaccaggaaaatgccttttttataaaagagtcatatattttcaaataggaaaaatattccctccattacaattttttaaatcaatttaagaatatataagaatatattttttgatataggagtgcttctcagataaagcaatttgtgttattacttataggaattttaacagggggttacaagaagcttgcctaaccctttcttttagagtgttaagaaggctttttagaattccgtaaatttttgtagacggggctatttaagaagtttttttttccttttttaagacgattctaatgtctttaccgtacatttgcaataatgtgcttcttgaatggccttgtatgtttataagataaaattatataaaatttaatatattgatactatatttcagtatacatagcaata

SEQ ID NO: 1548 - DNA, 3860 bp, Diabrotica virgifera
tgaaaagtttcttcgtaggcttaatgttttttgctatcaacaagttactattgtataatacgtcttgaggtattgagttcaattcaatgtatcaacaatatgtagaattgaaaagaaataaataacaaattattcaattaatttttcgattgggggaatatcgtgaaacaggacagggcataatgttaaggatcatttattgtaccaatgtctttggtgcaaaaaattctgtggaaattaccaaacgcgaattaattttttatgtattgcatcaatatctctaattcatcataaaaacaacgaaataaatatttcttcgtgtcttctttttatttttcattgaatggccttaagatctcgcgtttttgtaaattaaaaagtcttagaattgattatagtgttataaaaaaggacgttgaaaataaaaagatcaagcacaagtgcacgctttaactctttcgcatagcagcatacacaacatttcttcagttgtatatttacaaagtatatttgttattttaggaatcataatacttaagaaagcttagccgaaacaatcaaagttggactttagtcaaaaatattgaacaacctctgggaaaaatgtctcatgtccaacacttttaccatgtttagtcgagccgacattaaaccaaaaaatatttattgataggagacgaattttaagtgtcatagtatttacgtttaatttatttatatagttaattttttcttgtgaggttcatctgtgaacagtattttgttaatgcagatatgaataactggtacttcgacctttgttgtaaagaaatgtgatattcagtatactttaagaacggagtgtttggcttatgcacatcagtgttggttgccaaatacttcaggcacgtgttgctactagactgccgctatacaattcattttgtggcatcggcgcgcttctatcgtccataagaaatacgtagccctatctacgcaatgttccattcttaacgtgagacgctctatagttacaaatttgaaattgataatgtagtaaaactctttcacttcaatgtgtatgtacgcagtatcacgctacgcggagatactaactgccaagaataaaataatatttcgaaatcgagtgtgaaaggaaaataactattatttgagatatctgaagacaatcataatagagaacaggtgtaagactgtaaatttaatgaacaaaatctataccacaatgtaataaaaagtgttagaaacgagaggttatatggagaatacttcagaggtaattaaattatagatatgccagattcgaagagttataagtggactaaacacttctaatatcaatatggcggacaacctcaaaacgatcacagaaacagtcacactaataatgtgcgacactattttcatatatcttttgtacagataggaaatcacgtgtctttaataaaacaaaaatatgtttaaaattgttaattaagacagttgagatggtatcttagtggaatcaggacaaattaacggtacattcggcttcatcaagtaccccagttcccaattaattgcaccaaacatctttaaactcgttgatatatagagtgtaacaatgtagcaaccaatgtgtaacaataaaagttacctgctagatcagtgggtgccaattatttaacaataaaacgacacgtcggtcgtgtaactataaaactacacttgaggtgtcgtttcattgttcaccaattggtacccagtggtcgaggtggtagttgtactgttatattggttgctatatcggccccacgttgggcgccgattttaaccccactttggccgttaaacagccaaaacccgattttactaaatgtgcgtcctgggcaaaagcaaaaaaatcaaagattcttttgagtgtatgtcgtaatgattcagatattggttaaaacgaattattaaaaaaataagattttacaattatttgacatttttcccaccttacggcgaaaaattcttagaaacagtgccacatatctcaatttgaaattagttttcatatccagaaaaaagtttcattcatttaccattacataatttggatggtattgcatataggatatttacactgtgagcgtcatcaacatataaaaaaaaataaaaaccactctggcagtttgtacacatggttatcttcagtaaaaggctttatagtctattttatttttacctatgtagcaaatatttatgcctgtactagtttctcatatatatatatatgcaatttataatgagctaaagatttaattgtaacagcagtaacgacaatcaaataatacagaacataactaaatgctggtttaaattaccaatacttcaaacctttcaaagtgcctctcatatttaatgaattttttttagattttttactcttttcattttgtcacctattgtgtaattatgtgattcaatatatttttcgaaatcttgttctggtcttttgtactgtttcttctttatacacttttattatactagtacactatagtactgattctagttactgagctagtttgtctggccataggactcgagctaccttcgtagatatctcatttgggttctctttaataggttaacacttctttttgcaattttgatctttagtaaccataatatacatatgcattactctaacaactgattttgccttattcgtttcttgcttcttcattgcatatcttcattgatagttaaaaaaatcgagaaattagtaagtctttaattgctttaattattattgttcttttaactattactatcgttttttctttcctcattttaaatgccattcagttttttgtctgtggcagtttaaaattgagttacagttgaccatagattcataaggaaattaatcattaatattctaatggcacttaatgcgaatataagtaacgattgatcacaaaatgccttttttattatgttccctttagtacgaagtatcttttgaaagctatatttgtagtagtgttgtaaacattttttatctaattaccagctttccatgattgcttcctaaccatattatgaggtcattaacaaaataccttgttgtagttcacagatgtaaccctattttctgtaaataagtgctaaacatggaccaatttgttgattaagtgctcaaaacctattttcattgtgctccaataatattctggtttttggttttgcaatataatttgtgacatatatacaattcttagcaatattctgttgctaatatatatttaaacattacatatttcaatacctatttattattattgtgagagacaattcgtttaatagttacatattacatactttattcttaaaattgcattggaaatatttattaagttaatagtatattgtgaaaccacagaacagcccaaagagtaatatatattttgctatgaaaccaggaaaatgccttttttataaaagagtcatatattttcaaataggaaaaatattccctccattacaattttttaaatcaatttaagaatatataagaatatattttttgatataggagtgcttctcagataaagcaatttgtgttattacttataggaattttaacagggggttacaagaagcttgcctaaccctttcttttagagtgttaagaaggctttttagaattccgtaaatttttgtagacggggctatttaagaagtttttttttccttttttaagacgattctaatgtctttaccgtacatttgcaataatgtgcttcttgaatggccttgtatgtttataagataaaattatataaaatttaatatattgatactatatttcagtatacatagcaata

SEQ ID NO: 1549 - DNA, 4606 bp, Diabrotica virgifera
  SmartBlast Evalue=7E-94; Info=Kayak n=3 Tax=Tribolium castaneum RepID=D6WZA9_TRICA
attttttttcgacaagtcgagcctcggacaagtcgtgtgctcgactttttaactttttttttattttttacgaacgaacgaatcgctatcgatcggtagtatcgatttctttacgaatttttacgcatacgtatacgcaacaagttttttcgtgcgaatttttttttgtcatttttgcgtgttttatttttttacttaacgataatttttctccgaaatggcgtttttggatcagaaggaaatcactcactttcttgctcaggagttattatatcagcagtttataactctcgaaggcctcaattccggagtcccaactcgaaccacacctactttgactccaaccacgttacgaaacattgagcaaacttttattgagctccaatcgaagcccgagagccacgaaaatgaagcgggatttgtaccaccaatagtgcattctttaggtcacaaccaatacatttccgcttcagacgcagatagtttttcatctaaatctcaaccggcttggcatagtagcactctttcccaatcaagctcggattgtgatacccgtttgactccccctttatcccagaaaagctctggcggacaatcacgcagaaacatgggcggtcgaaaaccgactaaagatctcaattgcagcccggaagaagaggagaggagaagaattagaagagaaagaaacaaagccgctgcagccagatgcagaaagagaagagttgatcatactaattcgctcgtaatggaaactgaggagctagaacacaagaagcaaatacttcaggatgaaatgcacgaactccaacaaatgaaagaccacctagaatacctcctcgagtcccacaaggcgcagtgtcgcttgagcacccaaagtcccccagacgtcaaaccatacaaccactacaacaacgaacgtgttaaatccgaatacatagaacctttacatgatattttcttacttcctagtcctacgaaaaaagtgatgttaagttccacagtgccaatctcgaaacctaccagacctagcactttaaatgtaggagccacagcccccaaatcggtatcagacatactaggaggccctgtgtctactccctctaccggaattatgttcaactttgaatctctaatgggcggcggtaccggtttgacacctgtatccgtcgcgacgccactagtgccatcttgtagttcgcaacagaggaatattccggaatcataatacttaagaaagcttagccgaaacaatcaaagttggactttagtcaaaaatattgaacaacctctgggaaaaatgtctcatgtccaacacttttaccatgtttagtcgagccgacattaaaccaaaaaatatttattgataggagacgaattttaagtgtcatagtatttacgtttaatttatttatatagttaattttttcttgtgaggttcatctgtgaacagtattttgttaatgcagatatgaataactggtacttcgacctttgttgtaaagaaatgtgatattcagtatactttaagaacggagtgtttggcttatgcacatcagtgttggttgccaaatacttcaggcacgtgttgctactagactgccgctatacgattcattctaatcagacggcgtggcatcggcgcgcttctatcgtccataagaaatacgtagccctatctacgcaatgttccattcttaacgtgagacgctctatagttacaaatttgaaattgataatgtagtaaaactctttcacttcaatgtgtatgtacgcagtatcacgctacgcggagatactaactgccaagaataaaataatatttcgaaatcgagtgtgaaaggaaaataactattatttgagatatctgaagacaatcataatagagaacaggtgtaagactgtaaatttaatgaacaaaatctataccacaatgtaataaaaagtgttagaaacgagaggttatatggagaatacttcagaggtaattaaattatagatatgccagattcgaagagttataagtggactaaacacttctaatatcaatatggcggacaacctcaaaacgatcacagaaacagtcacactaataatgtgcgacactattttcatatatcttttgtacagataggaaatcacgtgtctttaataaaacaaaaatatgtttaaaattgttaattaagacagttgagatggtatcttagtggaatcaggacaaattaacggtacattcggcttcatcaagtaccccagttcccaattaattgcaccaaacatctttaaactcgttgatatatagagtgtaacaatgtagcaaccaatgtgtaacaataaaagttacctgctagatcagtgggtgccaattatttaacaataaaacgacacgtcggtcgtgtaactataaaactacacttgaggtgtcgtttcattgttcaccaattggtacccagtggtcgaggtggtagttgtactgttatattggttgctatatcggccccacgttgggcgccgattttaaccccactttggccgttaaacagccaaaacccgattttactaaatgtgcgtcctgggcaaaagcaaaaaaatcaaagattcttttgagtgtatgtcgtaatgattcagatattggttaaaacgaattattaaaaaaataagattttacaattatttgacatttttcccaccttacggcgaaaaattcttagaaacagtgccacatatctcaatttgaaattagttttcatatccagaaaaaagtttcattcatttaccattacataatttggatggtattgcatataggatatttacactgtgagcgtcatcaacatataaaaaaaaataaaaaccactctggcagtttgtacacatggttatcttcagtaaaaggctttatagtctattttatttttacctatgtagcaaatatttatgcctgtactagtttctcatatatatatatatgcaatttataatgagctaaagatttaattgtaacagcagtaacgacaatcaaataatacagaacataactaaatgctggtttaaattaccaatacttcaaacctttcaaagtgcctctcatatttaatgaattttttttagattttttactcttttcattttgtcacctattgtgtaattatgtgattcaatatatttttcgaaatcttgttctggtcttttgtactgtttcttctttatacacttttattatactagtacactatagtactgattctagttactgagctagtttgtctggccataggactcgagctaccttcgtagatatctcatttgggttctctttaataggttaacacttctttttgcaattttgatctttagtaaccataatatacatatgcattactctaacaactgattttgccttattcgtttcttgcttcttcattgcatatcttcattgatagttaaaaaaatcgagaaattagtaagtctttaattgctttaattattattgttcttttaactattactatcgttttttctttcctcattttaaatgccattcagttttttgtctgtggcagtttaaaattgagttacagttgaccatagattcataaggaaattaatcattaatattctaatggcacttaatgcaattgagtaacaattaatgacatcaagcattgcattaatgcgaatataagtaacgattgatcacaaaatgccttttttattatgttccctttagtacgaagtatcttttgaaagctatatttgtagtagtgttgtaaacattttttatctaattaccagctttccatgattgcttcctaaccatattatgaggtcattaacaaaataccttgttgtagttcacagatgtaaccctattttctgtaaataagtgctaaacatggaccaatttgttgattaagtgctcaaaacctattttcattgtgctccaataatattctggtttttggttttgcaatataatttgtgacatatatacaattcttagcaatattctgttgctaatatatatttaaacattacatatttcaatacctatttattattattgtgagagacaattcgtttaatagttacatattacatactttattcttaaaattgcattggaaatatttattaagttaatagtatattgtgaaaccacagaacagcccaaagagtaatatatattttgctatgaaaccaggaaaatgccttttttataaaagagtcatatattttcaaataggaaaaatattccctccattacaattttttaaatcaatttaagaatatataagaatatattttttgatataggagtgcttctcagataaagcaatttgtgttattacttataggaattttaacagggggttacaagaagcttgcctaaccctttcttttagagtgttaagaaggctttttagaattccgtaaatttttgtagacggggctatttaagaagtttttttttccttttttaagacgattctaatgtctttaccgtacatttgcaataatgtgcttcttgaatggccttgtatgtttataagataaaattatataaaatttaatatattgatactatatttcagtatacatagcaata

SEQ ID NO: 1550 - DNA, 4604 bp, Diabrotica virgifera
  SmartBlast Evalue=7E-94; Info=Kayak n=3 Tax=Tribolium castaneum RepID=D6WZA9_TRICA
attttttttcgacaagtcgagcctcggacaagtcgtgtgctcgactttttaactttttttttattttttacgaacgaacgaatcgctatcgatcggtagtatcgatttctttacgaatttttacgcatacgtatacgcaacaagttttttcgtgcgaatttttttttgtcatttttgcgtgttttatttttttacttaacgataatttttctccgaaatggcgtttttggatcagaaggaaatcactcactttcttgctcaggagttattatatcagcagtttataactctcgaaggcctcaattccggagtcccaactcgaaccacacctactttgactccaaccacgttacgaaacattgagcaaacttttattgagctccaatcgaagcccgagagccacgaaaatgaagcgggatttgtaccaccaatagtgcattctttaggtcacaaccaatacatttccgcttcagacgcagatagtttttcatctaaatctcaaccggcttggcatagtagcactctttcccaatcaagctcggattgtgatacccgtttgactccccctttatcccagaaaagctctggcggacaatcacgcagaaacatgggcggtcgaaaaccgactaaagatctcaattgcagcccggaagaagaggagaggagaagaattagaagagaaagaaacaaagccgctgcagccagatgcagaaagagaagagttgatcatactaattcgctcgtaatggaaactgaggagctagaacacaagaagcaaatacttcaggatgaaatgcacgaactccaacaaatgaaagaccacctagaatacctcctcgagtcccacaaggcgcagtgtcgcttgagcacccaaagtcccccagacgtcaaaccatacaaccactacaacaacgaacgtgttaaatccgaatacatagaacctttacatgatattttcttacttcctagtcctacgaaaaaagtgatgttaagttccacagtgccaatctcgaaacctaccagacctagcactttaaatgtaggagccacagcccccaaatcggtatcagacatactaggaggccctgtgtctactccctctaccggaattatgttcaactttgaatctctaatgggcggcggtaccggtttgacacctgtatccgtcgcgacgccactagtgccatcttgtagttcgcaacagaggaatattccggaatcataatacttaagaaagcttagccgaaacaatcaaagttggactttagtcaaaaatattgaacaacctctgggaaaaatgtctcatgtccaacacttttaccatgtttagtcgagccgacattaaaccaaaaaatatttattgataggagacgaattttaagtgtcatagtatttacgtttaatttatttatatagttaattttttcttgtgaggttcatctgtgaacagtattttgttaatgcagatatgaataactggtacttcgacctttgttgtaaagaaatgtgatattcagtatactttattcactttaggaacggagcgtttggcttatgcacatcagtgttggttgccaaatacttcaggcacgtgttgctactagactgccgctatacaattcattttgtggcatcggcgcgcttctatcgtccataagaaatacgtagccctatctacgcaatgttccattcttaacgtgagacgctctatagttacaaatttgaaattgataatgtagtaaaactctttcacttcaatgtgtatgtacgcagtatcacgctacgcggagatactaactgccaagaataaaataatatttcgaaatcgagtgtgaaaggaaaataactattatttgagatatctgaagacaatcataatagagaacaggtgtaagactgtaaatttaatgaacaaaatctataccacaatgtaataaaaagtgttagaaacgagaggttatatggagaatacttcagaggtaattaaattatagatatgccagattcgaagagttataagtggactaaacacttctaatatcaatatggcggacaacctcaaaacgatcacagaaacagtcacactaataatgtgcgacactattttcatatatcttttgtacagataggaaatcacgtgtctttaataaaacaaaaatatgtttaaaattgttaattaagacagttgagatggtatcttagtggaatcaggacaaattaacggtacattcggcttcatcaagtaccccagttcccaattaattgcaccaaacatctttaaactcgttgatatatagagtgtaacaatgtagcaaccaatgtgtaacaataaaagttacctgctagatcagtgggtgccaattatttaacaataaaacgacacgtcggtcgtgtaactataaaactacacttgaggtgtcgtttcattgttcaccaattggtacccagtggtcgaggtggtagttgtactgttatattggttgctatatcggccccacgttgggcgccgattttaaccccactttggccgttaaacagccaaaacccgattttactaaatgtgcgtcctgggcaaaagcaaaaaaatcaaagattcttttgagtgtatgtcgtaatgattcagatattggttaaaacgaattattaaaaaaataagattttacaattatttgacatttttcccaccttacggcgaaaaattcttagaaacagtgccacatatctcaatttgaaattagttttcatatccagaaaaaagtttcattcatttaccattacataatttggatggtattgcatataggatatttacactgtgagcgtcatcaacatataaaaaaaaataaaaaccactctggcagtttgtacacatggttatcttcagtaaaaggctttatagtctattttatttttacctatgtagcaaatatttatgcctgtactagtttctcatatatatatatatgcaatttataatgagctaaagatttaattgtaacagcagtaacgacaatcaaataatacagaacataactaaatgctggtttaaattaccaatacttcaaacctttcaaagtgcctctcatatttaatgaattttttttagattttttactcttttcattttgtcacctattgtgtaattatgtgattcaatatatttttcgaaatcttgttctggtcttttgtactgtttcttctttatacacttttattatactagtacactatagtactgattctagttactgagctagtttgtctggccataggactcgagctaccttcgtagatatctcatttgggttctctttaataggttaacacttctttttgcaattttgatctttagtaaccataatatacatatgcattactctaacaactgattttgccttattcgtttcttgcttcttcattgcatatcttcattgatagttaaaaaaatcgagaaattagtaagtctttaattgctttaattattattgttcttttaactattactatcgttttttctttcctcattttaaatgccattcagttttttgtctgtggcagtttaaaattgagttacagttgaccatagattcataaggaaattaatcattaatattctaatggcacttaatgcaattgagtaacaattaatgacatcaagcattgcattaatgcgaatataagtaacgattgatcacaaaatgccttttttattatgttccctttagtacgaagtatcttttgaaagctatatttgtagtagtgttgtaaacattttttatctaattaccagctttccatgattgcttcctaaccatattatgaggtcattaacaaaataccttgttgtagttcacagatgtaaccctattttctgtaaataagtgctaaacatggaccaatttgttgattaagtgctcaaaacctattttcattgtgctccaataatattctggtttttggttttgcaatataatttgtgacatatatacaattcttagcaatattctgttgctaatatatatttaaacattacatatttcaatacctatttattattattgtgagagacaattcgtttaatagttacatattacatactttattcttaaaattgcattggaaatatttattaagttaatagtatattgtgaaaccacagaacagcccaaagagtaatatatattttgctatgaaaccaggaaaatgccttttttataaaagagtcatatattttcaaataggaaaaatattccctccattacaattttttaaatcaatttaagaatatataagaatatattttttgatataggagtgcttctcagataaagcaatttgtgttattacttataggaattttaacagggggttacaagaagcttgcctaaccctttcttttagagtgttaagaaggctttttagaattccgtaaatttttgtagacggggctatttaagaagtttttttttccttttttaagacgattctaatgtctttaccgtacatttgcaataatgtgcttcttgaatggccttgtatgtttataagataaaattatataaaatttaatatattgatactatatttcagtatacatagcaata

SEQ ID NO: 1551 - DNA, 4595 bp, Diabrotica virgifera
  SmartBlast Evalue=7E-94; Info=Kayak n=3 Tax=Tribolium castaneum RepID=D6WZA9_TRICA
attttttttcgacaagtcgagcctcggacaagtcgtgtgctcgactttttaactttttttttattttttacgaacgaacgaatcgctatcgatcggtagtatcgatttctttacgaatttttacgcatacgtatacgcaacaagttttttcgtgcgaatttttttttgtcatttttgcgtgttttatttttttacttaacgataatttttctccgaaatggcgtttttggatcagaaggaaatcactcactttcttgctcaggagttattatatcagcagtttataactctcgaaggcctcaattccggagtcccaactcgaaccacacctactttgactccaaccacgttacgaaacattgagcaaacttttattgagctccaatcgaagcccgagagccacgaaaatgaagcgggatttgtaccaccaatagtgcattctttaggtcacaaccaatacatttccgcttcagacgcagatagtttttcatctaaatctcaaccggcttggcatagtagcactctttcccaatcaagctcggattgtgatacccgtttgactccccctttatcccagaaaagctctggcggacaatcacgcagaaacatgggcggtcgaaaaccgactaaagatctcaattgcagcccggaagaagaggagaggagaagaattagaagagaaagaaacaaagccgctgcagccagatgcagaaagagaagagttgatcatactaattcgctcgtaatggaaactgaggagctagaacacaagaagcaaatacttcaggatgaaatgcacgaactccaacaaatgaaagaccacctagaatacctcctcgagtcccacaaggcgcagtgtcgcttgagcacccaaagtcccccagacgtcaaaccatacaaccactacaacaacgaacgtgttaaatccgaatacatagaacctttacatgatattttcttacttcctagtcctacgaaaaaagtgatgttaagttccacagtgccaatctcgaaacctaccagacctagcactttaaatgtaggagccacagcccccaaatcggtatcagacatactaggaggccctgtgtctactccctctaccggaattatgttcaactttgaatctctaatgggcggcggtaccggtttgacacctgtatccgtcgcgacgccactagtgccatcttgtagttcgcaacagaggaatattccggaatcataatacttaagaaagcttagccgaaacaatcaaagttggactttagtcaaaaatattgaacaacctctgggaaaaatgtctcatgtccaacacttttaccatgtttagtcgagccgacattaaaccaaaaaatatttattgataggagacgaattttaagtgtcatagtatttacgtttaatttatttatatagttaattttttcttgtgaggttcatctgtgaacagtattttgttaatgcagatatgaataactggtacttcgacctttgttgtaaagaaatgtgatattcagtatactttaagaacggagtgtttggcttatgcacatcagtgttggttgccaaatacttcaggcacgtgttgctactagactgccgctatacaattcattttgtggcatcggcgcgcttctatcgtccataagaaatacgtagccctatctacgcaatgttccattcttaacgtgagacgctctatagttacaaatttgaaattgataatgtagtaaaactctttcacttcaatgtgtatgtacgcagtatcacgctacgcggagatactaactgccaagaataaaataatatttcgaaatcgagtgtgaaaggaaaataactattatttgagatatctgaagacaatcataatagagaacaggtgtaagactgtaaatttaatgaacaaaatctataccacaatgtaataaaaagtgttagaaacgagaggttatatggagaatacttcagaggtaattaaattatagatatgccagattcgaagagttataagtggactaaacacttctaatatcaatatggcggacaacctcaaaacgatcacagaaacagtcacactaataatgtgcgacactattttcatatatcttttgtacagataggaaatcacgtgtctttaataaaacaaaaatatgtttaaaattgttaattaagacagttgagatggtatcttagtggaatcaggacaaattaacggtacattcggcttcatcaagtaccccagttcccaattaattgcaccaaacatctttaaactcgttgatatatagagtgtaacaatgtagcaaccaatgtgtaacaataaaagttacctgctagatcagtgggtgccaattatttaacaataaaacgacacgtcggtcgtgtaactataaaactacacttgaggtgtcgtttcattgttcaccaattggtacccagtggtcgaggtggtagttgtactgttatattggttgctatatcggccccacgttgggcgccgattttaaccccactttggccgttaaacagccaaaacccgattttactaaatgtgcgtcctgggcaaaagcaaaaaaatcaaagattcttttgagtgtatgtcgtaatgattcagatattggttaaaacgaattattaaaaaaataagattttacaattatttgacatttttcccaccttacggcgaaaaattcttagaaacagtgccacatatctcaatttgaaattagttttcatatccagaaaaaagtttcattcatttaccattacataatttggatggtattgcatataggatatttacactgtgagcgtcatcaacatataaaaaaaaataaaaaccactctggcagtttgtacacatggttatcttcagtaaaaggctttatagtctattttatttttacctatgtagcaaatatttatgcctgtactagtttctcatatatatatatatgcaatttataatgagctaaagatttaattgtaacagcagtaacgacaatcaaataatacagaacataactaaatgctggtttaaattaccaatacttcaaacctttcaaagtgcctctcatatttaatgaattttttttagattttttactcttttcattttgtcacctattgtgtaattatgtgattcaatatatttttcgaaatcttgttctggtcttttgtactgtttcttctttatacacttttattatactagtacactatagtactgattctagttactgagctagtttgtctggccataggactcgagctaccttcgtagatatctcatttgggttctctttaataggttaacacttctttttgcaattttgatctttagtaaccataatatacatatgcattactctaacaactgattttgccttattcgtttcttgcttcttcattgcatatcttcattgatagttaaaaaaatcgagaaattagtaagtctttaattgctttaattattattgttcttttaactattactatcgttttttctttcctcattttaaatgccattcagttttttgtctgtggcagtttaaaattgagttacagttgaccatagattcataaggaaattaatcattaatattctaatggcacttaatgcaattgagtaacaattaatgacatcaagcattgcattaatgcgaatataagtaacgattgatcacaaaatgccttttttattatgttccctttagtacgaagtatcttttgaaagctatatttgtagtagtgttgtaaacattttttatctaattaccagctttccatgattgcttcctaaccatattatgaggtcattaacaaaataccttgttgtagttcacagatgtaaccctattttctgtaaataagtgctaaacatggaccaatttgttgattaagtgctcaaaacctattttcattgtgctccaataatattctggtttttggttttgcaatataatttgtgacatatatacaattcttagcaatattctgttgctaatatatatttaaacattacatatttcaatacctatttattattattgtgagagacaattcgtttaatagttacatattacatactttattcttaaaattgcattggaaatatttattaagttaatagtatattgtgaaaccacagaacagcccaaagagtaatatatattttgctatgaaaccaggaaaatgccttttttataaaagagtcatatattttcaaataggaaaaatattccctccattacaattttttaaatcaatttaagaatatataagaatatattttttgatataggagtgcttctcagataaagcaatttgtgttattacttataggaattttaacagggggttacaagaagcttgcctaaccctttcttttagagtgttaagaaggctttttagaattccgtaaatttttgtagacggggctatttaagaagtttttttttccttttttaagacgattctaatgtctttaccgtacatttgcaataatgtgcttcttgaatggccttgtatgtttataagataaaattatataaaatttaatatattgatactatatttcagtatacatagcaata

SEQ ID NO: 1552 - DNA, 4574 bp, Diabrotica virgifera
  SmartBlast Evalue=3E-84; Info=Kayak n=3 Tax=Tribolium castaneum RepID=D6WZA9_TRICA
agtaaatacagtgactggactggcgtatttttattgttcgataaggtttttgtggtttattgttgtactgtgacaattataaaaggaacagtttttttcaaggttacagtttttgtcggtcaacttctgttatgtcgcagttagtgccttttttaaatttcggtttggactgtaggtatagtgccgatgatagtgattttttgtataacaactgcgaatttgttgataaatccaaaatgtttataactctcgaaggcctcaattccggagtcccaactcgaaccacacctactttgactccaaccacgttacgaaacattgagcaaacttttattgagctccaatcgaagcccgagagccacgaaaatgaagcgggatttgtaccaccaatagtgcattctttaggtcacaaccaatacatttccgcttcagacgcagatagtttttcatctaaatctcaaccggcttggcatagtagcactctttcccaatcaagctcggattgtgatacccgtttgactccccctttatcccagaaaagctctggcggacaatcacgcagaaacatgggcggtcgaaaaccgactaaagatctcaattgcagcccggaagaagaggagaggagaagaattagaagagaaagaaacaaagccgctgcagccagatgcagaaagagaagagttgatcatactaattcgctcgtaatggaaactgaggagctagaacacaagaagcaaatacttcaggatgaaatgcacgaactccaacaaatgaaagaccacctagaatacctcctcgagtcccacaaggcgcagtgtcgcttgagcacccaaagtcccccagacgtcaaaccatacaaccactacaacaacgaacgtgttaaatccgaatacatagaacctttacatgatattttcttacttcctagtcctacgaaaaaagtgatgttaagttccacagtgccaatctcgaaacctaccagacctagcactttaaatgtaggagccacagcccccaaatcggtatcagacatactaggaggccctgtgtctactccctctaccggaattatgttcaactttgaatctctaatgggcggcggtaccggtttgacacctgtatccgtcgcgacgccactagtgccatcttgtagttcgcaacagaggaatattccggaatcataatacttaagaaagcttagccgaaacaatcaaagttggactttagtcaaaaatattgaacaacctctgggaaaaatgtctcatgtccaacacttttaccatgtttagtcgagccgacattaaaccaaaaaatatttattgataggagacgaattttaagtgtcatagtatttacgtttaatttatttatatagttaattttttcttgtgaggttcatctgtgaacagtattttgttaatgcagatatgaataactggtacttcgacctttgttgtaaagaaatgtgatattcagtatactttattcactttaggaacggagcgtttggcttatgcacatcagtgttggttgccaaatacttcaggcacgtgttgctactagactgccgctatacgattcattctaatcagacggcgtggcatcggcgcgcttctatcgtccataagaaatacgtagccctatctacgcaatgttccattcttaacgtgagacgctctatagttacaaatttgaaattgataatgtagtaaaactctttcacttcaatgtgtatgtacgcagtatcacgctacgcggagatactaactgccaagaataaaataatatttcgaaatcgagtgtgaaaggaaaataactattatttgagatatctgaagacaatcataatagagaacaggtgtaagactgtaaatttaatgaacaaaatctataccacaatgtaataaaaagtgttagaaacgagaggttatatggagaatacttcagaggtaattaaattatagatatgccagattcgaagagttataagtggactaaacacttctaatatcaatatggcggacaacctcaaaacgatcacagaaacagtcacactaataatgtgcgacactattttcatatatcttttgtacagataggaaatcacgtgtctttaataaaacaaaaatatgtttaaaattgttaattaagacagttgagatggtatcttagtggaatcaggacaaattaacggtacattcggcttcatcaagtaccccagttcccaattaattgcaccaaacatctttaaactcgttgatatatagagtgtaacaatgtagcaaccaatgtgtaacaataaaagttacctgctagatcagtgggtgccaattatttaacaataaaacgacacgtcggtcgtgtaactataaaactacacttgaggtgtcgtttcattgttcaccaattggtacccagtggtcgaggtggtagttgtactgttatattggttgctatatcggccccacgttgggcgccgattttaaccccactttggccgttaaacagccaaaacccgattttactaaatgtgcgtcctgggcaaaagcaaaaaaatcaaagattcttttgagtgtatgtcgtaatgattcagatattggttaaaacgaattattaaaaaaataagattttacaattatttgacatttttcccaccttacggcgaaaaattcttagaaacagtgccacatatctcaatttgaaattagttttcatatccagaaaaaagtttcattcatttaccattacataatttggatggtattgcatataggatatttacactgtgagcgtcatcaacatataaaaaaaaataaaaaccactctggcagtttgtacacatggttatcttcagtaaaaggctttatagtctattttatttttacctatgtagcaaatatttatgcctgtactagtttctcatatatatatatatgcaatttataatgagctaaagatttaattgtaacagcagtaacgacaatcaaataatacagaacataactaaatgctggtttaaattaccaatacttcaaacctttcaaagtgcctctcatatttaatgaattttttttagattttttactcttttcattttgtcacctattgtgtaattatgtgattcaatatatttttcgaaatcttgttctggtcttttgtactgtttcttctttatacacttttattatactagtacactatagtactgattctagttactgagctagtttgtctggccataggactcgagctaccttcgtagatatctcatttgggttctctttaataggttaacacttctttttgcaattttgatctttagtaaccataatatacatatgcattactctaacaactgattttgccttattcgtttcttgcttcttcattgcatatcttcattgatagttaaaaaaatcgagaaattagtaagtctttaattgctttaattattattgttcttttaactattactatcgttttttctttcctcattttaaatgccattcagttttttgtctgtggcagtttaaaattgagttacagttgaccatagattcataaggaaattaatcattaatattctaatggcacttaatgcaattgagtaacaattaatgacatcaagcattgcattaatgcgaatataagtaacgattgatcacaaaatgccttttttattatgttccctttagtacgaagtatcttttgaaagctatatttgtagtagtgttgtaaacattttttatctaattaccagctttccatgattgcttcctaaccatattatgaggtcattaacaaaataccttgttgtagttcacagatgtaaccctattttctgtaaataagtgctaaacatggaccaatttgttgattaagtgctcaaaacctattttcattgtgctccaataatattctggtttttggttttgcaatataatttgtgacatatatacaattcttagcaatattctgttgctaatatatatttaaacattacatatttcaatacctatttattattattgtgagagacaattcgtttaatagttacatattacatactttattcttaaaattgcattggaaatatttattaagttaatagtatattgtgaaaccacagaacagcccaaagagtaatatatattttgctatgaaaccaggaaaatgccttttttataaaagagtcatatattttcaaataggaaaaatattccctccattacaattttttaaatcaatttaagaatatataagaatatattttttgatataggagtgcttctcagataaagcaatttgtgttattacttataggaattttaacagggggttacaagaagcttgcctaaccctttcttttagagtgttaagaaggctttttagaattccgtaaatttttgtagacggggctatttaagaagtttttttttccttttttaagacgattctaatgtctttaccgtacatttgcaataatgtgcttcttgaatggccttgtatgtttataagataaaattatataaaatttaatatattgatactatatttcagtatacatagcaata

SEQ ID NO: 1553 - DNA, 4574 bp, Diabrotica virgifera
  SmartBlast Evalue=7E-94; Info=Kayak n=3 Tax=Tribolium castaneum RepID=D6WZA9_TRICA
attttttttcgacaagtcgagcctcggacaagtcgtgtgctcgactttttaactttttttttattttttacgaacgaacgaatcgctatcgatcggtagtatcgatttctttacgaatttttacgcatacgtatacgcaacaagttttttcgtgcgaatttttttttgtcatttttgcgtgttttatttttttacttaacgataatttttctccgaaatggcgtttttggatcagaaggaaatcactcactttcttgctcaggagttattatatcagcagtttataactctcgaaggcctcaattccggagtcccaactcgaaccacacctactttgactccaaccacgttacgaaacattgagcaaacttttattgagctccaatcgaagcccgagagccacgaaaatgaagcgggatttgtaccaccaatagtgcattctttaggtcacaaccaatacatttccgcttcagacgcagatagtttttcatctaaatctcaaccggcttggcatagtagcactctttcccaatcaagctcggattgtgatacccgtttgactccccctttatcccagaaaagctctggcggacaatcacgcagaaacatgggcggtcgaaaaccgactaaagatctcaattgcagcccggaagaagaggagaggagaagaattagaagagaaagaaacaaagccgctgcagccagatgcagaaagagaagagttgatcatactaattcgctcgtaatggaaactgaggagctagaacacaagaagcaaatacttcaggatgaaatgcacgaactccaacaaatgaaagaccacctagaatacctcctcgagtcccacaaggcgcagtgtcgcttgagcacccaaagtcccccagacgtcaaaccatacaaccactacaacaacgaacgtgttaaatccgaatacatagaacctttacatgatattttcttacttcctagtcctacgaaaaaagtgatgttaagttccacagtgccaatctcgaaacctaccagacctagcactttaaatgtaggagccacagcccccaaatcggtatcagacatactaggaggccctgtgtctactccctctaccggaattatgttcaactttgaatctctaatgggcggcggtaccggtttgacacctgtatccgtcgcgacgccactagtgccatcttgtagttcgcaacagaggaatattccggaatcataatacttaagaaagcttagccgaaacaatcaaagttggactttagtcaaaaatattgaacaacctctgggaaaaatgtctcatgtccaacacttttaccatgtttagtcgagccgacattaaaccaaaaaatatttattgataggagacgaattttaagtgtcatagtatttacgtttaatttatttatatagttaattttttcttgtgaggttcatctgtgaacagtattttgttaatgcagatatgaataactggtacttcgacctttgttgtaaagaaatgtgatattcagtatactttattcactttaggaacggagcgtttggcttatgcacatcagtgttggttgccaaatacttcaggcacgtgttgctactagactgccgctatacgattcattctaatcagacggcgtggcatcggcgcgcttctatcgtccataagaaatacgtagccctatctacgcaatgttccattcttaacgtgagacgctctatagttacaaatttgaaattgataatgtagtaaaactctttcacttcaatgtgtatgtacgcagtatcacgctacgcggagatactaactgccaagaataaaataatatttcgaaatcgagtgtgaaaggaaaataactattatttgagatatctgaagacaatcataatagagaacaggtgtaagactgtaaatttaatgaacaaaatctataccacaatgtaataaaaagtgttagaaacgagaggttatatggagaatacttcagaggtaattaaattatagatatgccagattcgaagagttataagtggactaaacacttctaatatcaatatggcggacaacctcaaaacgatcacagaaacagtcacactaataatgtgcgacactattttcatatatcttttgtacagataggaaatcacgtgtctttaataaaacaaaaatatgtttaaaattgttaattaagacagttgagatggtatcttagtggaatcaggacaaattaacggtacattcggcttcatcaagtaccccagttcccaattaattgcaccaaacatctttaaactcgttgatatatagagtgtaacaatgtagcaaccaatgtgtaacaataaaagttacctgctagatcagtgggtgccaattatttaacaataaaacgacacgtcggtcgtgtaactataaaactacacttgaggtgtcgtttcattgttcaccaattggtacccagtggtcgaggtggtagttgtactgttatattggttgctatatcggccccacgttgggcgccgattttaaccccactttggccgttaaacagccaaaacccgattttactaaatgtgcgtcctgggcaaaagcaaaaaaatcaaagattcttttgagtgtatgtcgtaatgattcagatattggttaaaacgaattattaaaaaaataagattttacaattatttgacatttttcccaccttacggcgaaaaattcttagaaacagtgccacatatctcaatttgaaattagttttcatatccagaaaaaagtttcattcatttaccattacataatttggatggtattgcatataggatatttacactgtgagcgtcatcaacatataaaaaaaaataaaaaccactctggcagtttgtacacatggttatcttcagtaaaaggctttatagtctattttatttttacctatgtagcaaatatttatgcctgtactagtttctcatatatatatatatgcaatttataatgagctaaagatttaattgtaacagcagtaacgacaatcaaataatacagaacataactaaatgctggtttaaattaccaatacttcaaacctttcaaagtgcctctcatatttaatgaattttttttagattttttactcttttcattttgtcacctattgtgtaattatgtgattcaatatatttttcgaaatcttgttctggtcttttgtactgtttcttctttatacacttttattatactagtacactatagtactgattctagttactgagctagtttgtctggccataggactcgagctaccttcgtagatatctcatttgggttctctttaataggttaacacttctttttgcaattttgatctttagtaaccataatatacatatgcattactctaacaactgattttgccttattcgtttcttgcttcttcattgcatatcttcattgatagttaaaaaaatcgagaaattagtaagtctttaattgctttaattattattgttcttttaactattactatcgttttttctttcctcattttaaatgccattcagttttttgtctgtggcagtttaaaattgagttacagttgaccatagattcataaggaaattaatcattaatattctaatggcacttaatgcgaatataagtaacgattgatcacaaaatgccttttttattatgttccctttagtacgaagtatcttttgaaagctatatttgtagtagtgttgtaaacattttttatctaattaccagctttccatgattgcttcctaaccatattatgaggtcattaacaaaataccttgttgtagttcacagatgtaaccctattttctgtaaataagtgctaaacatggaccaatttgttgattaagtgctcaaaacctattttcattgtgctccaataatattctggtttttggttttgcaatataatttgtgacatatatacaattcttagcaatattctgttgctaatatatatttaaacattacatatttcaatacctatttattattattgtgagagacaattcgtttaatagttacatattacatactttattcttaaaattgcattggaaatatttattaagttaatagtatattgtgaaaccacagaacagcccaaagagtaatatatattttgctatgaaaccaggaaaatgccttttttataaaagagtcatatattttcaaataggaaaaatattccctccattacaattttttaaatcaatttaagaatatataagaatatattttttgatataggagtgcttctcagataaagcaatttgtgttattacttataggaattttaacagggggttacaagaagcttgcctaaccctttcttttagagtgttaagaaggctttttagaattccgtaaatttttgtagacggggctatttaagaagtttttttttccttttttaagacgattctaatgtctttaccgtacatttgcaataatgtgcttcttgaatggccttgtatgtttataagataaaattatataaaatttaatatattgatactatatttcagtatacatagcaata

SEQ ID NO: 1554 - DNA, 4565 bp, Diabrotica virgifera
  SmartBlast Evalue=3E-84; Info=Kayak n=3 Tax=Tribolium castaneum RepID=D6WZA9_TRICA
agtaaatacagtgactggactggcgtatttttattgttcgataaggtttttgtggtttattgttgtactgtgacaattataaaaggaacagtttttttcaaggttacagtttttgtcggtcaacttctgttatgtcgcagttagtgccttttttaaatttcggtttggactgtaggtatagtgccgatgatagtgattttttgtataacaactgcgaatttgttgataaatccaaaatgtttataactctcgaaggcctcaattccggagtcccaactcgaaccacacctactttgactccaaccacgttacgaaacattgagcaaacttttattgagctccaatcgaagcccgagagccacgaaaatgaagcgggatttgtaccaccaatagtgcattctttaggtcacaaccaatacatttccgcttcagacgcagatagtttttcatctaaatctcaaccggcttggcatagtagcactctttcccaatcaagctcggattgtgatacccgtttgactccccctttatcccagaaaagctctggcggacaatcacgcagaaacatgggcggtcgaaaaccgactaaagatctcaattgcagcccggaagaagaggagaggagaagaattagaagagaaagaaacaaagccgctgcagccagatgcagaaagagaagagttgatcatactaattcgctcgtaatggaaactgaggagctagaacacaagaagcaaatacttcaggatgaaatgcacgaactccaacaaatgaaagaccacctagaatacctcctcgagtcccacaaggcgcagtgtcgcttgagcacccaaagtcccccagacgtcaaaccatacaaccactacaacaacgaacgtgttaaatccgaatacatagaacctttacatgatattttcttacttcctagtcctacgaaaaaagtgatgttaagttccacagtgccaatctcgaaacctaccagacctagcactttaaatgtaggagccacagcccccaaatcggtatcagacatactaggaggccctgtgtctactccctctaccggaattatgttcaactttgaatctctaatgggcggcggtaccggtttgacacctgtatccgtcgcgacgccactagtgccatcttgtagttcgcaacagaggaatattccggaatcataatacttaagaaagcttagccgaaacaatcaaagttggactttagtcaaaaatattgaacaacctctgggaaaaatgtctcatgtccaacacttttaccatgtttagtcgagccgacattaaaccaaaaaatatttattgataggagacgaattttaagtgtcatagtatttacgtttaatttatttatatagttaattttttcttgtgaggttcatctgtgaacagtattttgttaatgcagatatgaataactggtacttcgacctttgttgtaaagaaatgtgatattcagtatactttaagaacggagtgtttggcttatgcacatcagtgttggttgccaaatacttcaggcacgtgttgctactagactgccgctatacgattcattctaatcagacggcgtggcatcggcgcgcttctatcgtccataagaaatacgtagccctatctacgcaatgttccattcttaacgtgagacgctctatagttacaaatttgaaattgataatgtagtaaaactctttcacttcaatgtgtatgtacgcagtatcacgctacgcggagatactaactgccaagaataaaataatatttcgaaatcgagtgtgaaaggaaaataactattatttgagatatctgaagacaatcataatagagaacaggtgtaagactgtaaatttaatgaacaaaatctataccacaatgtaataaaaagtgttagaaacgagaggttatatggagaatacttcagaggtaattaaattatagatatgccagattcgaagagttataagtggactaaacacttctaatatcaatatggcggacaacctcaaaacgatcacagaaacagtcacactaataatgtgcgacactattttcatatatcttttgtacagataggaaatcacgtgtctttaataaaacaaaaatatgtttaaaattgttaattaagacagttgagatggtatcttagtggaatcaggacaaattaacggtacattcggcttcatcaagtaccccagttcccaattaattgcaccaaacatctttaaactcgttgatatatagagtgtaacaatgtagcaaccaatgtgtaacaataaaagttacctgctagatcagtgggtgccaattatttaacaataaaacgacacgtcggtcgtgtaactataaaactacacttgaggtgtcgtttcattgttcaccaattggtacccagtggtcgaggtggtagttgtactgttatattggttgctatatcggccccacgttgggcgccgattttaaccccactttggccgttaaacagccaaaacccgattttactaaatgtgcgtcctgggcaaaagcaaaaaaatcaaagattcttttgagtgtatgtcgtaatgattcagatattggttaaaacgaattattaaaaaaataagattttacaattatttgacatttttcccaccttacggcgaaaaattcttagaaacagtgccacatatctcaatttgaaattagttttcatatccagaaaaaagtttcattcatttaccattacataatttggatggtattgcatataggatatttacactgtgagcgtcatcaacatataaaaaaaaataaaaaccactctggcagtttgtacacatggttatcttcagtaaaaggctttatagtctattttatttttacctatgtagcaaatatttatgcctgtactagtttctcatatatatatatatgcaatttataatgagctaaagatttaattgtaacagcagtaacgacaatcaaataatacagaacataactaaatgctggtttaaattaccaatacttcaaacctttcaaagtgcctctcatatttaatgaattttttttagattttttactcttttcattttgtcacctattgtgtaattatgtgattcaatatatttttcgaaatcttgttctggtcttttgtactgtttcttctttatacacttttattatactagtacactatagtactgattctagttactgagctagtttgtctggccataggactcgagctaccttcgtagatatctcatttgggttctctttaataggttaacacttctttttgcaattttgatctttagtaaccataatatacatatgcattactctaacaactgattttgccttattcgtttcttgcttcttcattgcatatcttcattgatagttaaaaaaatcgagaaattagtaagtctttaattgctttaattattattgttcttttaactattactatcgttttttctttcctcattttaaatgccattcagttttttgtctgtggcagtttaaaattgagttacagttgaccatagattcataaggaaattaatcattaatattctaatggcacttaatgcaattgagtaacaattaatgacatcaagcattgcattaatgcgaatataagtaacgattgatcacaaaatgccttttttattatgttccctttagtacgaagtatcttttgaaagctatatttgtagtagtgttgtaaacattttttatctaattaccagctttccatgattgcttcctaaccatattatgaggtcattaacaaaataccttgttgtagttcacagatgtaaccctattttctgtaaataagtgctaaacatggaccaatttgttgattaagtgctcaaaacctattttcattgtgctccaataatattctggtttttggttttgcaatataatttgtgacatatatacaattcttagcaatattctgttgctaatatatatttaaacattacatatttcaatacctatttattattattgtgagagacaattcgtttaatagttacatattacatactttattcttaaaattgcattggaaatatttattaagttaatagtatattgtgaaaccacagaacagcccaaagagtaatatatattttgctatgaaaccaggaaaatgccttttttataaaagagtcatatattttcaaataggaaaaatattccctccattacaattttttaaatcaatttaagaatatataagaatatattttttgatataggagtgcttctcagataaagcaatttgtgttattacttataggaattttaacagggggttacaagaagcttgcctaaccctttcttttagagtgttaagaaggctttttagaattccgtaaatttttgtagacggggctatttaagaagtttttttttccttttttaagacgattctaatgtctttaccgtacatttgcaataatgtgcttcttgaatggccttgtatgtttataagataaaattatataaaatttaatatattgatactatatttcagtatacatagcaata

SEQ ID NO: 1555 - DNA, 4563 bp, Diabrotica virgifera
  SmartBlast Evalue=3E-84; Info=Kayak n=3 Tax=Tribolium castaneum RepID=D6WZA9_TRICA
agtaaatacagtgactggactggcgtatttttattgttcgataaggtttttgtggtttattgttgtactgtgacaattataaaaggaacagtttttttcaaggttacagtttttgtcggtcaacttctgttatgtcgcagttagtgccttttttaaatttcggtttggactgtaggtatagtgccgatgatagtgattttttgtataacaactgcgaatttgttgataaatccaaaatgtttataactctcgaaggcctcaattccggagtcccaactcgaaccacacctactttgactccaaccacgttacgaaacattgagcaaacttttattgagctccaatcgaagcccgagagccacgaaaatgaagcgggatttgtaccaccaatagtgcattctttaggtcacaaccaatacatttccgcttcagacgcagatagtttttcatctaaatctcaaccggcttggcatagtagcactctttcccaatcaagctcggattgtgatacccgtttgactccccctttatcccagaaaagctctggcggacaatcacgcagaaacatgggcggtcgaaaaccgactaaagatctcaattgcagcccggaagaagaggagaggagaagaattagaagagaaagaaacaaagccgctgcagccagatgcagaaagagaagagttgatcatactaattcgctcgtaatggaaactgaggagctagaacacaagaagcaaatacttcaggatgaaatgcacgaactccaacaaatgaaagaccacctagaatacctcctcgagtcccacaaggcgcagtgtcgcttgagcacccaaagtcccccagacgtcaaaccatacaaccactacaacaacgaacgtgttaaatccgaatacatagaacctttacatgatattttcttacttcctagtcctacgaaaaaagtgatgttaagttccacagtgccaatctcgaaacctaccagacctagcactttaaatgtaggagccacagcccccaaatcggtatcagacatactaggaggccctgtgtctactccctctaccggaattatgttcaactttgaatctctaatgggcggcggtaccggtttgacacctgtatccgtcgcgacgccactagtgccatcttgtagttcgcaacagaggaatattccggaatcataatacttaagaaagcttagccgaaacaatcaaagttggactttagtcaaaaatattgaacaacctctgggaaaaatgtctcatgtccaacacttttaccatgtttagtcgagccgacattaaaccaaaaaatatttattgataggagacgaattttaagtgtcatagtatttacgtttaatttatttatatagttaattttttcttgtgaggttcatctgtgaacagtattttgttaatgcagatatgaataactggtacttcgacctttgttgtaaagaaatgtgatattcagtatactttattcactttaggaacggagcgtttggcttatgcacatcagtgttggttgccaaatacttcaggcacgtgttgctactagactgccgctatacaattcattttgtggcatcggcgcgcttctatcgtccataagaaatacgtagccctatctacgcaatgttccattcttaacgtgagacgctctatagttacaaatttgaaattgataatgtagtaaaactctttcacttcaatgtgtatgtacgcagtatcacgctacgcggagatactaactgccaagaataaaataatatttcgaaatcgagtgtgaaaggaaaataactattatttgagatatctgaagacaatcataatagagaacaggtgtaagactgtaaatttaatgaacaaaatctataccacaatgtaataaaaagtgttagaaacgagaggttatatggagaatacttcagaggtaattaaattatagatatgccagattcgaagagttataagtggactaaacacttctaatatcaatatggcggacaacctcaaaacgatcacagaaacagtcacactaataatgtgcgacactattttcatatatcttttgtacagataggaaatcacgtgtctttaataaaacaaaaatatgtttaaaattgttaattaagacagttgagatggtatcttagtggaatcaggacaaattaacggtacattcggcttcatcaagtaccccagttcccaattaattgcaccaaacatctttaaactcgttgatatatagagtgtaacaatgtagcaaccaatgtgtaacaataaaagttacctgctagatcagtgggtgccaattatttaacaataaaacgacacgtcggtcgtgtaactataaaactacacttgaggtgtcgtttcattgttcaccaattggtacccagtggtcgaggtggtagttgtactgttatattggttgctatatcggccccacgttgggcgccgattttaaccccactttggccgttaaacagccaaaacccgattttactaaatgtgcgtcctgggcaaaagcaaaaaaatcaaagattcttttgagtgtatgtcgtaatgattcagatattggttaaaacgaattattaaaaaaataagattttacaattatttgacatttttcccaccttacggcgaaaaattcttagaaacagtgccacatatctcaatttgaaattagttttcatatccagaaaaaagtttcattcatttaccattacataatttggatggtattgcatataggatatttacactgtgagcgtcatcaacatataaaaaaaaataaaaaccactctggcagtttgtacacatggttatcttcagtaaaaggctttatagtctattttatttttacctatgtagcaaatatttatgcctgtactagtttctcatatatatatatatgcaatttataatgagctaaagatttaattgtaacagcagtaacgacaatcaaataatacagaacataactaaatgctggtttaaattaccaatacttcaaacctttcaaagtgcctctcatatttaatgaattttttttagattttttactcttttcattttgtcacctattgtgtaattatgtgattcaatatatttttcgaaatcttgttctggtcttttgtactgtttcttctttatacacttttattatactagtacactatagtactgattctagttactgagctagtttgtctggccataggactcgagctaccttcgtagatatctcatttgggttctctttaataggttaacacttctttttgcaattttgatctttagtaaccataatatacatatgcattactctaacaactgattttgccttattcgtttcttgcttcttcattgcatatcttcattgatagttaaaaaaatcgagaaattagtaagtctttaattgctttaattattattgttcttttaactattactatcgttttttctttcctcattttaaatgccattcagttttttgtctgtggcagtttaaaattgagttacagttgaccatagattcataaggaaattaatcattaatattctaatggcacttaatgcaattgagtaacaattaatgacatcaagcattgcattaatgcgaatataagtaacgattgatcacaaaatgccttttttattatgttccctttagtacgaagtatcttttgaaagctatatttgtagtagtgttgtaaacattttttatctaattaccagctttccatgattgcttcctaaccatattatgaggtcattaacaaaataccttgttgtagttcacagatgtaaccctattttctgtaaataagtgctaaacatggaccaatttgttgattaagtgctcaaaacctattttcattgtgctccaataatattctggtttttggttttgcaatataatttgtgacatatatacaattcttagcaatattctgttgctaatatatatttaaacattacatatttcaatacctatttattattattgtgagagacaattcgtttaatagttacatattacatactttattcttaaaattgcattggaaatatttattaagttaatagtatattgtgaaaccacagaacagcccaaagagtaatatatattttgctatgaaaccaggaaaatgccttttttataaaagagtcatatattttcaaataggaaaaatattccctccattacaattttttaaatcaatttaagaatatataagaatatattttttgatataggagtgcttctcagataaagcaatttgtgttattacttataggaattttaacagggggttacaagaagcttgcctaaccctttcttttagagtgttaagaaggctttttagaattccgtaaatttttgtagacggggctatttaagaagtttttttttccttttttaagacgattctaatgtctttaccgtacatttgcaataatgtgcttcttgaatggccttgtatgtttataagataaaattatataaaatttaatatattgatactatatttcagtatacatagcaata

SEQ ID NO: 1556 - DNA, 4565 bp, Diabrotica virgifera
  SmartBlast Evalue=7E-94; Info=Kayak n=3 Tax=Tribolium castaneum RepID=D6WZA9_TRICA
attttttttcgacaagtcgagcctcggacaagtcgtgtgctcgactttttaactttttttttattttttacgaacgaacgaatcgctatcgatcggtagtatcgatttctttacgaatttttacgcatacgtatacgcaacaagttttttcgtgcgaatttttttttgtcatttttgcgtgttttatttttttacttaacgataatttttctccgaaatggcgtttttggatcagaaggaaatcactcactttcttgctcaggagttattatatcagcagtttataactctcgaaggcctcaattccggagtcccaactcgaaccacacctactttgactccaaccacgttacgaaacattgagcaaacttttattgagctccaatcgaagcccgagagccacgaaaatgaagcgggatttgtaccaccaatagtgcattctttaggtcacaaccaatacatttccgcttcagacgcagatagtttttcatctaaatctcaaccggcttggcatagtagcactctttcccaatcaagctcggattgtgatacccgtttgactccccctttatcccagaaaagctctggcggacaatcacgcagaaacatgggcggtcgaaaaccgactaaagatctcaattgcagcccggaagaagaggagaggagaagaattagaagagaaagaaacaaagccgctgcagccagatgcagaaagagaagagttgatcatactaattcgctcgtaatggaaactgaggagctagaacacaagaagcaaatacttcaggatgaaatgcacgaactccaacaaatgaaagaccacctagaatacctcctcgagtcccacaaggcgcagtgtcgcttgagcacccaaagtcccccagacgtcaaaccatacaaccactacaacaacgaacgtgttaaatccgaatacatagaacctttacatgatattttcttacttcctagtcctacgaaaaaagtgatgttaagttccacagtgccaatctcgaaacctaccagacctagcactttaaatgtaggagccacagcccccaaatcggtatcagacatactaggaggccctgtgtctactccctctaccggaattatgttcaactttgaatctctaatgggcggcggtaccggtttgacacctgtatccgtcgcgacgccactagtgccatcttgtagttcgcaacagaggaatattccggaatcataatacttaagaaagcttagccgaaacaatcaaagttggactttagtcaaaaatattgaacaacctctgggaaaaatgtctcatgtccaacacttttaccatgtttagtcgagccgacattaaaccaaaaaatatttattgataggagacgaattttaagtgtcatagtatttacgtttaatttatttatatagttaattttttcttgtgaggttcatctgtgaacagtattttgttaatgcagatatgaataactggtacttcgacctttgttgtaaagaaatgtgatattcagtatactttaagaacggagtgtttggcttatgcacatcagtgttggttgccaaatacttcaggcacgtgttgctactagactgccgctatacgattcattctaatcagacggcgtggcatcggcgcgcttctatcgtccataagaaatacgtagccctatctacgcaatgttccattcttaacgtgagacgctctatagttacaaatttgaaattgataatgtagtaaaactctttcacttcaatgtgtatgtacgcagtatcacgctacgcggagatactaactgccaagaataaaataatatttcgaaatcgagtgtgaaaggaaaataactattatttgagatatctgaagacaatcataatagagaacaggtgtaagactgtaaatttaatgaacaaaatctataccacaatgtaataaaaagtgttagaaacgagaggttatatggagaatacttcagaggtaattaaattatagatatgccagattcgaagagttataagtggactaaacacttctaatatcaatatggcggacaacctcaaaacgatcacagaaacagtcacactaataatgtgcgacactattttcatatatcttttgtacagataggaaatcacgtgtctttaataaaacaaaaatatgtttaaaattgttaattaagacagttgagatggtatcttagtggaatcaggacaaattaacggtacattcggcttcatcaagtaccccagttcccaattaattgcaccaaacatctttaaactcgttgatatatagagtgtaacaatgtagcaaccaatgtgtaacaataaaagttacctgctagatcagtgggtgccaattatttaacaataaaacgacacgtcggtcgtgtaactataaaactacacttgaggtgtcgtttcattgttcaccaattggtacccagtggtcgaggtggtagttgtactgttatattggttgctatatcggccccacgttgggcgccgattttaaccccactttggccgttaaacagccaaaacccgattttactaaatgtgcgtcctgggcaaaagcaaaaaaatcaaagattcttttgagtgtatgtcgtaatgattcagatattggttaaaacgaattattaaaaaaataagattttacaattatttgacatttttcccaccttacggcgaaaaattcttagaaacagtgccacatatctcaatttgaaattagttttcatatccagaaaaaagtttcattcatttaccattacataatttggatggtattgcatataggatatttacactgtgagcgtcatcaacatataaaaaaaaataaaaaccactctggcagtttgtacacatggttatcttcagtaaaaggctttatagtctattttatttttacctatgtagcaaatatttatgcctgtactagtttctcatatatatatatatgcaatttataatgagctaaagatttaattgtaacagcagtaacgacaatcaaataatacagaacataactaaatgctggtttaaattaccaatacttcaaacctttcaaagtgcctctcatatttaatgaattttttttagattttttactcttttcattttgtcacctattgtgtaattatgtgattcaatatatttttcgaaatcttgttctggtcttttgtactgtttcttctttatacacttttattatactagtacactatagtactgattctagttactgagctagtttgtctggccataggactcgagctaccttcgtagatatctcatttgggttctctttaataggttaacacttctttttgcaattttgatctttagtaaccataatatacatatgcattactctaacaactgattttgccttattcgtttcttgcttcttcattgcatatcttcattgatagttaaaaaaatcgagaaattagtaagtctttaattgctttaattattattgttcttttaactattactatcgttttttctttcctcattttaaatgccattcagttttttgtctgtggcagtttaaaattgagttacagttgaccatagattcataaggaaattaatcattaatattctaatggcacttaatgcgaatataagtaacgattgatcacaaaatgccttttttattatgttccctttagtacgaagtatcttttgaaagctatatttgtagtagtgttgtaaacattttttatctaattaccagctttccatgattgcttcctaaccatattatgaggtcattaacaaaataccttgttgtagttcacagatgtaaccctattttctgtaaataagtgctaaacatggaccaatttgttgattaagtgctcaaaacctattttcattgtgctccaataatattctggtttttggttttgcaatataatttgtgacatatatacaattcttagcaatattctgttgctaatatatatttaaacattacatatttcaatacctatttattattattgtgagagacaattcgtttaatagttacatattacatactttattcttaaaattgcattggaaatatttattaagttaatagtatattgtgaaaccacagaacagcccaaagagtaatatatattttgctatgaaaccaggaaaatgccttttttataaaagagtcatatattttcaaataggaaaaatattccctccattacaattttttaaatcaatttaagaatatataagaatatattttttgatataggagtgcttctcagataaagcaatttgtgttattacttataggaattttaacagggggttacaagaagcttgcctaaccctttcttttagagtgttaagaaggctttttagaattccgtaaatttttgtagacggggctatttaagaagtttttttttccttttttaagacgattctaatgtctttaccgtacatttgcaataatgtgcttcttgaatggccttgtatgtttataagataaaattatataaaatttaatatattgatactatatttcagtatacatagcaata

SEQ ID NO: 1557 - DNA, 2368 bp, Diabrotica virgifera
  SmartBlast Evalue=1E-165; Info=Dipeptidyl peptidase 4 n=1 Tax= Camponotus floridanus RepID=E2AF09_9HYME
tttggtaccgaattgttcagcccaccacttatccatcatatggtataaatgcctggagacgtgtcctagggaatggttttcgtctggataactgtgctgcctgaagtcaatatcagcaagttccaatgctttgaccaacatcatggagttttggtagtggacgttgtcatcaccagttccgtgtattataaaatagtttcttcctctgaaattctcaactacatgggtgagatcagtgttattgtagccttgttcattgtcttccggtgttggcagacccataaacctttccgtatatatagaatcataataaataaaacttgtaactggagctaccgataatgctgctttgaatacatgatccttgtctttagctaaagcccaactggagcaaaatcctccatagctccatccccaaatacctgttctttcggcatcgatatatggcaagtgctcttgtaagtactttgtaacctgaatttggtcttccacttccacagtaccaaatcttctgtacatatcgaacattttattgtatccgtctcttccgctgcctcttccgtctatgtaaatatatatgtactctctgtttgtagtcaaataggttctaaattgtatattataagcatcgttgatctggttgttgcctggaccaccataagtgtctataatagcagggtatttcttattggaattttcatccaaattgggaggcaaaaacaatctcactctagctgaaaatccttcgtttatcggtactactaagtccctaacttgtggatgtaacttgtaggctagagcgattcttagaccaaagttatcttcccagattagaatatcatcactctctttggtattttcgatgcctacaagtggtacctggggtcctagacacatttttacgtagtaggataagtcattgctaaataataaagtaccaaacctacagggtgtttcatctacagtaaagaaacatgttagacaacttatagttcccgattcgtccacggagtacgagttttgttgagatggacaatccactgaagtggcactgtaataaattagaccagtgtcttcactccaggcaataatagacaagacagaaaatttcccgtgtgtcagtctttttgctgttttggtcttaacgtcagtaagcaccagatggtcatatctgtcatttccctcaggttgaggtagtacctccagtcttctagtaccatctttactataaattggaacagttggggttatccagcccttgctttctgtttgggaagcttcctcttcacagctgccgtttgttgaacaccttagaatggaacttttgttttgtactcggttggtgcagaccaaagacaattcgtcagcagagatccaggtcagtccgtaaaagatgaagtcgttgggttccacgttgcttatatgaagaggtatttgaatttccttcgttttcttgtttgctatgtcgtacaagtaaattctggctattggattcggagttccagattttgggtacctgatgactgcttcatggggatattgacttccaggtgatcctggttctccgtaaatagtgtaggacaaattatagacttgttcgtcattgaatactgcataagccaagtaagctccatctggtgaaaaccataaggctgaacctgatgccaatacttcctcttcataaacccaatcaggtacaccgcaataaagaacacctggaatccctacaacagtcacagctacaggagtttcaatgtgcttggaaaaatcatcaatgtagtagatgttgttttcaagaacatatactaagccatgtccctctggagaaaactcaactaactgcaatggttgctgattggcaaggtgataaaatttttgttgagcgacatcgtatattgtgtagatggcagttattgaatgccgaaatacagcagagacgttgtattttagtaagacatatgaccggtccggagacaatcttaattctgctgttggatattctgccagtactttgttgtccaggaatagatcaacgctctttgttgacatattaaaaaacaaaatgtcattttcgaatgttttgtacatgaaagcagaatctgagatccatgatccattgaacgcaagtgctgaatacgtctgatttaaatagtcatctaattcaaatggctgttgctcgatttctttaatacttctttgttgagataatgcgacaacacctaatacaattatggtgagaatggcaaccttattaacatttaggcacaccattttctcaacagtcacaaatacaacacttttcaacacttattcttgttttataaagtatctgcttaaactcctctgaactgaatatatacgcatgtca

SEQ ID NO: 1558 - DNA, 2368 bp, Diabrotica virgifera
  SmartBlast Evalue=1E-164; Info=Dipeptidyl peptidase 4 n=1 Tax= Camponotus floridanus RepID=E2AF09_9HYME
tttggtaccgaattgttcagcccaccacttatccatcatatggtataaatgcctggagacgtgtcctagggaatggttttcgtctggataactgtgctgcctgaagtcaatatcagcaagttccaatgctttgaccaacatcatggagttttggtagtggacgttgtcatcaccagttccgtgtattataaaatagtttcttcctctgaaattctcaactacatgggtgagatcagtgttattgtagccttgttcattgtcttccggtgttggtagacccataaacctttccgtatatatagaatcataataaataaaacttgttactggagctaccgataatgctgctttgaatacatgatccttgtctttagctaaagcccaacttgagcaaaatcctccatagctccaaccccaaatacctgttctttcggcatcgatatatggcaggtgctcttgtaagtactttgtaacctgaatttggtcttccacttccacagtaccgaatcttctgtacatatcaaacattttattgtatccgtctcttccgctgcctcttccgtctatgtaaatatatatgtactctctgtttgtagtcaaataggttctaaattgtatattataagcatcgttgatctggttgttgcctggaccaccataagtgtctataatagcagggtatttcttattggaattttcatccaaattgggaggcaaaaacaatctcactctagctgaaaatccttcgtttatcggtactactaagtccctaacttgtggatgtaacttgtaggctagagcgattcttagaccaaagttatcttcccagattagaatatcatcactctctttggtattttcgatgcctacaagtggtacctggggtcctagacacatttttacgtagtaggataagtcattgctaaataataaagtaccaaacctacagggtgtttcatctacagtaaagaaacatgttagacaacttatagttcccgattcgtccacggagtacgagttttgttgagatggacaatccactgaagtggcactgtaataaattaggccagtgtcttcactccatgcaataatagacaagacagaaaatttcccgtgtgtcagtctttttgctgtcttggtcttaacgtcggtaagcaccagatgatcatatcggtcatttccctcaggttgaggtagtacctccagtcttctagtaccatctttactataaattggaacagttggggttatccagcccttgctttctgtttgggaagcttcctcttcacagctgccgtttgttgaacacctcagaatggaacttttgttttgtactcgattggtgcagactaaagataattcgtcagcagagatccagctcagtccgtaaaagatgaagtcgttaggttccacgttgcttatatgaagtggtatttgaaattccttcgttttcttgtttgctatgtcgtacaagtaaattctggctattggattcggagttccagattttgggtacctgatgactgcttcatgaggatattgacttccaggtgatcctggttctccgtaaatagtgtaggacaaattatagacttgttcgtcattgaatactgcataagccaagtaagctccatctggtgaaaaccataaggctgaacctgaggctaatacttcctcttcataaacccaatcaggaacaccgcaataaagaacacctggaatccctacaacagtcacagctacaggagtttcaatgttctttgaaaagtcatcaatgtagtaaatgttgttctcaagaacatatactaacccatgcccctctggagaaaactcaactaactgcaatggttgctgattggcaaggtggtaaaatttttgttgagccacatcgtatattgtgtagacggctgttatcgaatgtcgaaatacagcagagacattgtactttagtaaaacatatgaccggtccggagacaatcttaattctgctgttggatattcctccagtactttgttgtccagaaatagatcaacgctctttgttgacatattaaaaaacaaaatgtcattttcgaatgttttgtacatgaaagcagaatctgagatccatgatccattgaacgcaagtgctgaatacgtctgatttaaatagtcatctaattcaaatggctgttgctcgatttctttaatacttctttgttgagataatgcgacaacacctaatacaattatggtgagaatggcaaccttattaacatttaggcacaccattttctcaacagtcacaaatacaacacttttcaacacttattcttgttttataaagtatctgcttaaactcctctgaactgaatatatacgcatgtca

SEQ ID NO: 1559 - DNA, 2368 bp, Diabrotica virgifera
  SmartBlast Evalue=1E-165; Info=Dipeptidyl peptidase 4 n=1 Tax= Camponotus floridanus RepID=E2AF09_9HYME
tttggtaccgaattgttcagcccaccacttatccatcatatggtataaatgcctggagacgtgtcctagggaatggttttcgtctggataactgtgctgcctgaagtcaatatcagcaagttccaatgctttgaccaacatcatggagttttggtagtggacgttgtcatcaccagttccgtgtattataaaatagtttcttcctctgaaattctcaactacatgggtgagatcagtgttattgtagccttgttcattgtcttccggtgttggtagacccataaacctttccgtatatatagaatcataataaataaaacttgttactggagctaccgataatgctgctttgaatacatgatccttgtctttagctaaagcccaacttgagcaaaatcctccatagctccaaccccaaatacctgttctttcggcatcgatatatggcaggtgctcttgtaagtactttgtaacctgaatttggtcttccacttccacagtaccgaatcttctgtacatatcaaacattttattgtatccgtctcttccgctgcctcttccgtctatgtaaatatatatgtactctctgtttgtagtcaaataggttctaaattgtatattataagcatcgttgatctggttgttgcctggaccaccataagtgtctataatagcagggtatttcttattggaattttcatccaaattgggaggcaaaaacaatctcactctagctgaaaatccttcgtttatcggtactactaagtccctaacttgtggatgtaacttgtaggctagagcgattcttagaccaaagttatcttcccagattagaatatcatcactctctttggtattttcgatgcctacaagtggtacctggggtcctagacacatttttacgtagtaggataagtcattgctaaataataaagtaccaaacctacagggtgtttcatctacagtaaagaaacatgttagacaacttatagttcccgattcgtccacggagtacgagttttgttgagatggacaatccactgaagtggcactgtaataaattagaccagtgtcttcactccaggcaataatagacaagacagaaaatttcccgtgtgtcagtctttttgctgttttggtcttaacgtcagtaagcaccagatggtcatatctgtcatttccctcaggttgaggtagtacctccagtcttctagtaccatctttactataaattggaacagttggggttatccagcccttgctttctgtttgggaagcttcctcttcacagctgccgtttgttgaacaccttagaatggaacttttgttttgtactcggttggtgcagaccaaagacaattcgtcagcagagatccaggtcagtccgtaaaagatgaagtcgttgggttccacgttgcttatatgaagaggtatttgaatttccttcgttttcttgtttgctatgtcgtacaagtaaattctggctattggattcggagttccagattttgggtacctgatgactgcttcatggggatattgacttccaggtgatcctggttctccgtaaatagtgtaggacaaattatagacttgttcgtcattgaatactgcataagccaagtaagctccatctggtgaaaaccataaggctgaacctgatgccaatacttcctcttcataaacccaatcaggtacaccgcaataaagaacacctggaatccctacaacagtcacagctacaggagtttcaatgtgcttggaaaaatcatcaatgtagtagatgttgttttcaagaacatatactaagccatgtccctctggagaaaactcaactaactgcaatggttgctgattggcaaggtgataaaatttttgttgagcgacatcgtatattgtgtagatggcagttattgaatgccgaaatacagcagagacgttgtattttagtaagacatatgaccggtccggagacaatcttaattctgctgttggatattctgccagtactttgttgtccaggaatagatcaacgctctttgttgacatattaaaaaacaaaatgtcattttcgaatgttttgtacatgaaagcagaatctgagatccatgatccattgaacgcaagtgctgaatacgtctgatttaaatagtcatctaattcaaatggctgttgctcgatttctttaatacttctttgttgagataatgcgacaacacctaatacaattatggtgagaatggcaaccttattaacatttaggcacaccattttctcaacagtcacaaatacaacacttttcaacacttattcttgttttataaagtatctgcttaaactcctctgaactgaatatatacgcatgtca

SEQ ID NO: 1560 - DNA, 2418 bp, Diabrotica virgifera
  SmartBlast Evalue=1E-162; Info=Dipeptidyl peptidase 4 n=1 Tax= Camponotus floridanus RepID=E2AF09_9HYME
aataaatcatataagattagttgctttattggaccacgcgtcggcagttggatttttggtaccgaattgttcagcccaccatttatccatcatatggtacaaatgcctggagacgtgtcctagggaatggttttcgtctggataactgtgctgtctaaagtcaatatcagcaagttccaatgctttgaccaacatcatggagttttggtagtggacattgtcatcaccagttccgtggattataaaatagtttcttcctctgaaatgttcaactgcgtgggtgagatcagtattgttgtagccttgttcattgtcttccggtgttggcagacccataaacctttccgtatatatagaatcataataaataaaacttgtaactggagctaccgataatgctgctttgaatacatgatccttgtctttagctaaagcccaactggagcaaaatcctccatagctccatccccaaatacctgttctttcggcatcgatatatggcaagtgctcttgtaagtactttgtaacctgaatttggtcttccacttccacagtaccaaatcttctgtacatatcgaacattttattgtatccgtctcttccgctgcctcttccgtctatgtaaatatatatgtactctctgtttgtagtcaaatacgttctaaattgtatattgtaagcatcgttgatctggttgttgcctggaccaccataagtgtctataatagcagggtatttcttattggaattttcatccaaattgggaggcaaaaacaatctcactctagctgagaatccttcatttatcggtactactaagtccctaacttgtggatgtaacttgtaggctagagcgatttttagatcaaagttatcttcccagattagaaaatcatcactctctttggtatttgcgatgcctacaagtggtacctggggtcctagacacatttttatgtagtaggataagtccttgctaaataatatagtaccaaacctacagggtgcttcatctatagtaaacaaacatgttagacaactgatagttcccgattcatccacggagtacgagttttgttgagacggacaatccactgaagtggcactgtaataaattaggccagtgtcttcattccaggcaataatagacaagacagaaaatttcccgtgtgtcagtctttttgctgttttggtcttaacgtcagtaagcaccagatggtcatatctgtcatttccctcaggttgaggtagtacctccagtcttctagtaccatctttactataaattggaacaattggggttatccagcccttgctttctgtttgggaagcttcctcttcacagctgccgtttgttgaacaccttagaatggaacttttgttttgtactcgattggtgcagaccaaagataattcgtcagcagagatccaggtcagtccgtaaaatatgaagtcgttgggttccacgttgcttatgtgaagtggtacttgaatttccttcgttttcttgtttgctatgtcgtacaagtaaattctggcgattggattcggagttccagattttggatatctgatgactgcttcatggggatattgacttccaggtgatcctggttctccgtaaatagtgtaggacaaattatagacttgttcgtcattgaatacggcataagctaagtaagcgccatctggtgaaaaccataaggctgaccctgaggccaatacttcctcttcataaacccaatcaggaacaccgcaataaagaacacctggaatccctacaacagtcacagctacaggagtttcaatgttctttgaaaagtcatcaatgtagtagatgttgttctcaagaacatatactaatccatgtccctctggagaaaactcaactaattgcaatggttgctgattggcaaggtgataaaatttttgttgagcgacatcgtatattgtgtagacggctgttatcgaatgtcgaaatacagcagagacattgtactttagtaaaacatatgaccggtccggagacaatcttaattctgctgttggatattcctccagtactttgttgtccagaaatagatcaacgctctttgttgacatattaaaaaacaaaatgtcattttcgaatgttttgtacatgaaagcagaatctgagatccatgatccattgaacgcaagtgctgaatatgtgtgatttaagtagtcatctaattcaaatggctgttgctctatttctttaatactcctttgttgtgttaatgcgacaacacctaacacaattattgtgagaatggcgaccttattaacatttaggcacaccattttttcatcagtcacaaacacaacacttttcaacacttattcttgttttataaagtatctgcttaaactcctctgaactgaatagatacgcat

SEQ ID NO: 1561 - DNA, 2422 bp, Diabrotica virgifera
  SmartBlast Evalue=1E-163; Info=Dipeptidyl peptidase 4 n=1 Tax= Camponotus floridanus RepID=E2AF09_9HYME
aataaatcatataagattagttgctttattggaccacgcgtcggcagttggatttttggtaccgaattgttcagcccaccatttatccatcatatggtacaaatgcctggagacgtgtcctagggaatggttttcgtctggataactgtgctgtctaaagtcaatatcagcaagttccaatgctttgaccaacatcatggagttttggtagtggacattgtcatcaccagttccgtggattataaaatagtttcttcctctgaaatgttcaactgcgtgggtgagatcagtattgttgtagccttgttcattgtcttccggtgttggcagacccataaacctttccgtatatatagaatcataataaataaaacttgtaactggagctaccgataatgctgctttgaatacatgatccttgtctttagctaaagcccaactggagcaaaatcctccatagctccatccccaaatacctgttctttcggcatcgatatatggcaagtgctcttgtaagtactttgtaacctgaatttggtcttccacttccacagtaccaaatcttctgtacatatcgaacattttattgtatccgtctcttccgctgcctcttccgtctatgtaaatatatatgtactctctgtttgtagtcaaatacgttctaaattgtatattgtaagcatcgttgatctggttgttgcctggaccaccataagtgtctataatagcagggtatttcttattggaattttcatccaaattgggaggcaaaaacaatctcactctagctgagaatccttcatttatcggtactactaagtccctaacttgtggatgtaacttgtaggctagagcgatttttagatcaaagttatcttcccagattagaaaatcatcactctctttggtatttgcgatgcctacaagtggtacctggggtcctagacacatttttatgtagtaggataagtccttgctaaataatatagtaccaaacctacagggtgcttcatctatagtaaacaaacatgttagacaactgatagttcccgattcatccacggagtacgagttttgttgagacggacaatccactgaagtggcactgtaataaattaggccagtgtcttcattccaggcaataatagacaagacagaaaatttcccgtgtgtcagtctttttgctgttttggtcttaacgtcagtaagcaccagatggtcatatctgtcatttccctcaggttgaggtagtacctccagtcttctagtaccatctttactataaattggaacaattggggttatccagcccttgctttctgtttgggaagcttcctcttcacagctgccgtttgttgaacaccttagaatggaacttttgttttgtactcgattggtgcagaccaaagataattcgtcagcagagatccaggtcagtccgtaaaatatgaagtcgttgggttccacgttgcttatgtgaagtggtacttgaatttccttcgttttcttgtttgctatgtcgtacaagtaaattctggcgattggattcggagttccagattttggatatctgatgactgcttcatggggatattgacttccaggtgatcctggttctccgtaaatagtgtaggacaaattatagacttgttcgtcattgaatacggcataagctaagtaagcgccatctggtgaaaaccataaggctgaccctgaggccaatacttcctcttcataaacccaatcaggaacaccgcaataaagaacacctggaatccctacaacagtcacagctacaggagtttcaatgttctttgaaaagtcatcaatgtagtagatgttgttctcaagaacatatactaatccatgtccctctggagaaaactcaactaattgcaatggttgctgattggcaaggtgataaaatttttgttgagcgacatcgtatattgtgtagacggctgttatcgaatgtcgaaatacagcagagacattgtactttagtaaaacatatgaccggtccggagacaatcttaattctgctgttggatattcctccagtactttgttgtccagaaatagatcaacgctctttgttgacatattaaaaaacaaaatgtcattttcgaatgttttgtacatgaaagcagaatctgagatccatgatccattgaacgcaagtgctgaatacgtctgatttaaatagtcatctaattcaaatggctgttgctcgatttctttaatacttctttgttgagataatgcgacaacacctaatacaattatggtgagaatggcaaccttattaacatttaggcacaccattttctcaacagtcacaaatacaacacttttcaacacttattcttgttttataaagtatctgcttaaactcctctgaactgaatatatacgcatgtca

SEQ ID NO: 1562 - DNA, 2364 bp, Diabrotica virgifera
  SmartBlast Evalue=1E-162; Info=Dipeptidyl peptidase 4 n=1 Tax= Camponotus floridanus RepID=E2AF09_9HYME
tttggtaccgaattgttcagcccaccacttatccatcatatggtataaatgcctggagacgtgtcctagggaatggttttcgtctggataactgtgctgcctgaagtcaatatcagcaagttccaatgctttgaccaacatcatggagttttggtagtggacgttgtcatcaccagttccgtgtattataaaatagtttcttcctctgaaattctcaactacatgggtgagatcagtgttattgtagccttgttcattgtcttccggtgttggcagacccataaacctttccgtatatatagaatcataataaataaaacttgtaactggagctaccgataatgctgctttgaatacatgatccttgtctttagctaaagcccaactggagcaaaatcctccatagctccatccccaaatacctgttctttcggcatcgatatatggcaagtgctcttgtaagtactttgtaacctgaatttggtcttccacttccacagtaccaaatcttctgtacatatcgaacattttattgtatccgtctcttccgctgcctcttccgtctatgtaaatatatatgtactctctgtttgtagtcaaatacgttctaaattgtatattgtaagcatcgttgatctggttgttgcctggaccaccataagtgtctataatagcagggtatttcttattggaattttcatccaaattgggaggcaaaaacaatctcactctagctgagaatccttcatttatcggtactactaagtccctaacttgtggatgtaacttgtaggctagagcgatttttagatcaaagttatcttcccagattagaaaatcatcactctctttggtatttgcgatgcctacaagtggtacctggggtcctagacacatttttatgtagtaggataagtccttgctaaataatatagtaccaaacctacagggtgcttcatctatagtaaacaaacatgttagacaactgatagttcccgattcatccacggagtacgagttttgttgagacggacaatccactgaagtggcactgtaataaattaggccagtgtcttcattccaggcaataatagacaagacagaaaatttcccgtgtgtcagtctttttgctgttttggtcttaacgtcagtaagcaccagatggtcatatctgtcatttccctcaggttgaggtagtacctccagtcttctagtaccatctttactataaattggaacaattggggttatccagcccttgctttctgtttgggaagcttcctcttcacagctgccgtttgttgaacaccttagaatggaacttttgttttgtactcgattggtgcagaccaaagataattcgtcagcagagatccaggtcagtccgtaaaatatgaagtcgttgggttccacgttgcttatgtgaagtggtacttgaatttccttcgttttcttgtttgctatgtcgtacaagtaaattctggcgattggattcggagttccagattttggatatctgatgactgcttcatggggatattgacttccaggtgatcctggttctccgtaaatagtgtaggacaaattatagacttgttcgtcattgaatacggcataagctaagtaagcgccatctggtgaaaaccataaggctgaccctgaggccaatacttcctcttcataaacccaatcaggaacaccgcaataaagaacacctggaatccctacaacagtcacagctacaggagtttcaatgttctttgaaaagtcatcaatgtagtagatgttgttctcaagaacatatactaatccatgtccctctggagaaaactcaactaattgcaatggttgctgattggcaaggtgataaaatttttgttgagcgacatcgtatattgtgtagacggctgttatcgaatgtcgaaatacagcagagacattgtactttagtaaaacatatgaccggtccggagacaatcttaattctgctgttggatattcctccagtactttgttgtccagaaatagatcaacgctctttgttgacatattaaaaaacaaaatgtcattttcgaatgttttgtacatgaaagcagaatctgagatccatgatccattgaacgcaagtgctgaatatgtgtgatttaagtagtcatctaattcaaatggctgttgctctatttctttaatactcctttgttgtgttaatgcgacaacacctaacacaattattgtgagaatggcgaccttattaacatttaggcacaccattttttcatcagtcacaaacacaacacttttcaacacttattcttgttttataaagtatctgcttaaactcctctgaactgaatagatacgcat

SEQ ID NO: 1563 - DNA, 2364 bp, Diabrotica virgifera
  SmartBlast Evalue=1E-162; Info=Dipeptidyl peptidase 4 n=1 Tax= Camponotus floridanus RepID=E2AF09_9HYME
tttggtaccgaattgttcagcccaccacttatccatcatatggtataaatgcctggagacgtgtcctagggaatggttttcgtctggataactgtgctgcctgaagtcaatatcagcaagttccaatgctttgaccaacatcatggagttttggtagtggacgttgtcatcaccagttccgtgtattataaaatagtttcttcctctgaaattctcaactacatgggtgagatcagtgttattgtagccttgttcattgtcttccggtgttggtagacccataaacctttccgtatatatagaatcataataaataaaacttgttactggagctaccgataatgctgctttgaatacatgatccttgtctttagctaaagcccaacttgagcaaaatcctccatagctccaaccccaaatacctgttctttcggcatcgatatatggcaggtgctcttgtaagtactttgtaacctgaatttggtcttccacttccacagtaccgaatcttctgtacatatcaaacattttattgtatccgtctcttccgctgcctcttccgtctatgtaaatatatatgtactctctgtttgtagtcaaatacgttctaaattgtatattgtaagcatcgttgatctggttgttgcctggaccaccataagtgtctataatagcagggtatttcttattggaattttcatccaaattgggaggcaaaaacaatctcactctagctgagaatccttcatttatcggtactactaagtccctaacttgtggatgtaacttgtaggctagagcgatttttagatcaaagttatcttcccagattagaaaatcatcactctctttggtatttgcgatgcctacaagtggtacctggggtcctagacacatttttatgtagtaggataagtccttgctaaataatatagtaccaaacctacagggtgcttcatctatagtaaacaaacatgttagacaactgatagttcccgattcatccacggagtacgagttttgttgagacggacaatccactgaagtggcactgtaataaattaggccagtgtcttcattccaggcaataatagacaagacagaaaatttcccgtgtgtcagtctttttgctgttttggtcttaacgtcagtaagcaccagatggtcatatctgtcatttccctcaggttgaggtagtacctccagtcttctagtaccatctttactataaattggaacaattggggttatccagcccttgctttctgtttgggaagcttcctcttcacagctgccgtttgttgaacaccttagaatggaacttttgttttgtactcgattggtgcagaccaaagataattcgtcagcagagatccaggtcagtccgtaaaatatgaagtcgttgggttccacgttgcttatgtgaagtggtacttgaatttccttcgttttcttgtttgctatgtcgtacaagtaaattctggcgattggattcggagttccagattttggatatctgatgactgcttcatggggatattgacttccaggtgatcctggttctccgtaaatagtgtaggacaaattatagacttgttcgtcattgaatacggcataagctaagtaagcgccatctggtgaaaaccataaggctgaccctgaggccaatacttcctcttcataaacccaatcaggaacaccgcaataaagaacacctggaatccctacaacagtcacagctacaggagtttcaatgttctttgaaaagtcatcaatgtagtagatgttgttctcaagaacatatactaatccatgtccctctggagaaaactcaactaattgcaatggttgctgattggcaaggtgataaaatttttgttgagcgacatcgtatattgtgtagacggctgttatcgaatgtcgaaatacagcagagacattgtactttagtaaaacatatgaccggtccggagacaatcttaattctgctgttggatattcctccagtactttgttgtccagaaatagatcaacgctctttgttgacatattaaaaaacaaaatgtcattttcgaatgttttgtacatgaaagcagaatctgagatccatgatccattgaacgcaagtgctgaatatgtgtgatttaagtagtcatctaattcaaatggctgttgctctatttctttaatactcctttgttgtgttaatgcgacaacacctaacacaattattgtgagaatggcgaccttattaacatttaggcacaccattttttcatcagtcacaaacacaacacttttcaacacttattcttgttttataaagtatctgcttaaactcctctgaactgaatagatacgcat

SEQ ID NO: 1564 - DNA, 2368 bp, Diabrotica virgifera
  SmartBlast Evalue=1E-163; Info=Dipeptidyl peptidase 4 n=1 Tax= Camponotus floridanus RepID=E2AF09_9HYME
tttggtaccgaattgttcagcccaccacttatccatcatatggtataaatgcctggagacgtgtcctagggaatggttttcgtctggataactgtgctgcctgaagtcaatatcagcaagttccaatgctttgaccaacatcatggagttttggtagtggacgttgtcatcaccagttccgtgtattataaaatagtttcttcctctgaaattctcaactacatgggtgagatcagtgttattgtagccttgttcattgtcttccggtgttggcagacccataaacctttccgtatatatagaatcataataaataaaacttgtaactggagctaccgataatgctgctttgaatacatgatccttgtctttagctaaagcccaactggagcaaaatcctccatagctccatccccaaatacctgttctttcggcatcgatatatggcaagtgctcttgtaagtactttgtaacctgaatttggtcttccacttccacagtaccaaatcttctgtacatatcgaacattttattgtatccgtctcttccgctgcctcttccgtctatgtaaatatatatgtactctctgtttgtagtcaaatacgttctaaattgtatattgtaagcatcgttgatctggttgttgcctggaccaccataagtgtctataatagcagggtatttcttattggaattttcatccaaattgggaggcaaaaacaatctcactctagctgagaatccttcatttatcggtactactaagtccctaacttgtggatgtaacttgtaggctagagcgatttttagatcaaagttatcttcccagattagaaaatcatcactctctttggtatttgcgatgcctacaagtggtacctggggtcctagacacatttttatgtagtaggataagtccttgctaaataatatagtaccaaacctacagggtgcttcatctatagtaaacaaacatgttagacaactgatagttcccgattcatccacggagtacgagttttgttgagacggacaatccactgaagtggcactgtaataaattaggccagtgtcttcattccaggcaataatagacaagacagaaaatttcccgtgtgtcagtctttttgctgttttggtcttaacgtcagtaagcaccagatggtcatatctgtcatttccctcaggttgaggtagtacctccagtcttctagtaccatctttactataaattggaacaattggggttatccagcccttgctttctgtttgggaagcttcctcttcacagctgccgtttgttgaacaccttagaatggaacttttgttttgtactcgattggtgcagaccaaagataattcgtcagcagagatccaggtcagtccgtaaaatatgaagtcgttgggttccacgttgcttatgtgaagtggtacttgaatttccttcgttttcttgtttgctatgtcgtacaagtaaattctggcgattggattcggagttccagattttggatatctgatgactgcttcatggggatattgacttccaggtgatcctggttctccgtaaatagtgtaggacaaattatagacttgttcgtcattgaatacggcataagctaagtaagcgccatctggtgaaaaccataaggctgaccctgaggccaatacttcctcttcataaacccaatcaggaacaccgcaataaagaacacctggaatccctacaacagtcacagctacaggagtttcaatgttctttgaaaagtcatcaatgtagtagatgttgttctcaagaacatatactaatccatgtccctctggagaaaactcaactaattgcaatggttgctgattggcaaggtgataaaatttttgttgagcgacatcgtatattgtgtagacggctgttatcgaatgtcgaaatacagcagagacattgtactttagtaaaacatatgaccggtccggagacaatcttaattctgctgttggatattcctccagtactttgttgtccagaaatagatcaacgctctttgttgacatattaaaaaacaaaatgtcattttcgaatgttttgtacatgaaagcagaatctgagatccatgatccattgaacgcaagtgctgaatacgtctgatttaaatagtcatctaattcaaatggctgttgctcgatttctttaatacttctttgttgagataatgcgacaacacctaatacaattatggtgagaatggcaaccttattaacatttaggcacaccattttctcaacagtcacaaatacaacacttttcaacacttattcttgttttataaagtatctgcttaaactcctctgaactgaatatatacgcatgtca

SEQ ID NO: 1565 - DNA, 2368 bp, Diabrotica virgifera
  SmartBlast Evalue=1E-163; Info=Dipeptidyl peptidase 4 n=1 Tax= Camponotus floridanus RepID=E2AF09_9HYME
tttggtaccgaattgttcagcccaccacttatccatcatatggtataaatgcctggagacgtgtcctagggaatggttttcgtctggataactgtgctgcctgaagtcaatatcagcaagttccaatgctttgaccaacatcatggagttttggtagtggacgttgtcatcaccagttccgtgtattataaaatagtttcttcctctgaaattctcaactacatgggtgagatcagtgttattgtagccttgttcattgtcttccggtgttggtagacccataaacctttccgtatatatagaatcataataaataaaacttgttactggagctaccgataatgctgctttgaatacatgatccttgtctttagctaaagcccaacttgagcaaaatcctccatagctccaaccccaaatacctgttctttcggcatcgatatatggcaggtgctcttgtaagtactttgtaacctgaatttggtcttccacttccacagtaccgaatcttctgtacatatcaaacattttattgtatccgtctcttccgctgcctcttccgtctatgtaaatatatatgtactctctgtttgtagtcaaatacgttctaaattgtatattgtaagcatcgttgatctggttgttgcctggaccaccataagtgtctataatagcagggtatttcttattggaattttcatccaaattgggaggcaaaaacaatctcactctagctgagaatccttcatttatcggtactactaagtccctaacttgtggatgtaacttgtaggctagagcgatttttagatcaaagttatcttcccagattagaaaatcatcactctctttggtatttgcgatgcctacaagtggtacctggggtcctagacacatttttatgtagtaggataagtccttgctaaataatatagtaccaaacctacagggtgcttcatctatagtaaacaaacatgttagacaactgatagttcccgattcatccacggagtacgagttttgttgagacggacaatccactgaagtggcactgtaataaattaggccagtgtcttcattccaggcaataatagacaagacagaaaatttcccgtgtgtcagtctttttgctgttttggtcttaacgtcagtaagcaccagatggtcatatctgtcatttccctcaggttgaggtagtacctccagtcttctagtaccatctttactataaattggaacaattggggttatccagcccttgctttctgtttgggaagcttcctcttcacagctgccgtttgttgaacaccttagaatggaacttttgttttgtactcgattggtgcagaccaaagataattcgtcagcagagatccaggtcagtccgtaaaatatgaagtcgttgggttccacgttgcttatgtgaagtggtacttgaatttccttcgttttcttgtttgctatgtcgtacaagtaaattctggcgattggattcggagttccagattttggatatctgatgactgcttcatggggatattgacttccaggtgatcctggttctccgtaaatagtgtaggacaaattatagacttgttcgtcattgaatacggcataagctaagtaagcgccatctggtgaaaaccataaggctgaccctgaggccaatacttcctcttcataaacccaatcaggaacaccgcaataaagaacacctggaatccctacaacagtcacagctacaggagtttcaatgttctttgaaaagtcatcaatgtagtagatgttgttctcaagaacatatactaatccatgtccctctggagaaaactcaactaattgcaatggttgctgattggcaaggtgataaaatttttgttgagcgacatcgtatattgtgtagacggctgttatcgaatgtcgaaatacagcagagacattgtactttagtaaaacatatgaccggtccggagacaatcttaattctgctgttggatattcctccagtactttgttgtccagaaatagatcaacgctctttgttgacatattaaaaaacaaaatgtcattttcgaatgttttgtacatgaaagcagaatctgagatccatgatccattgaacgcaagtgctgaatacgtctgatttaaatagtcatctaattcaaatggctgttgctcgatttctttaatacttctttgttgagataatgcgacaacacctaatacaattatggtgagaatggcaaccttattaacatttaggcacaccattttctcaacagtcacaaatacaacacttttcaacacttattcttgttttataaagtatctgcttaaactcctctgaactgaatatatacgcatgtca

SEQ ID NO: 1566 - DNA, 2418 bp, Diabrotica virgifera
  SmartBlast Evalue=1E-164; Info=Dipeptidyl peptidase 4 n=1 Tax= Camponotus floridanus RepID=E2AF09_9HYME
aataaatcatataagattagttgctttattggaccacgcgtcggcagttggatttttggtaccgaattgttcagcccaccatttatccatcatatggtacaaatgcctggagacgtgtcctagggaatggttttcgtctggataactgtgctgtctaaagtcaatatcagcaagttccaatgctttgaccaacatcatggagttttggtagtggacattgtcatcaccagttccgtggattataaaatagtttcttcctctgaaatgttcaactgcgtgggtgagatcagtattgttgtagccttgttcattgtcttccggtgttggcagacccataaacctttccgtatatatagaatcataataaataaaacttgtaactggagctaccgataatgctgctttgaatacatgatccttgtctttagctaaagcccaactggagcaaaatcctccatagctccatccccaaatacctgttctttcggcatcgatatatggcaagtgctcttgtaagtactttgtaacctgaatttggtcttccacttccacagtaccaaatcttctgtacatatcgaacattttattgtatccgtctcttccgctgcctcttccgtctatgtaaatatatatgtactctctgtttgtagtcaaataggttctaaattgtatattataagcatcgttgatctggttgttgcctggaccaccataagtgtctataatagcagggtatttcttattggaattttcatccaaattgggaggcaaaaacaatctcactctagctgaaaatccttcgtttatcggtactactaagtccctaacttgtggatgtaacttgtaggctagagcgattcttagaccaaagttatcttcccagattagaatatcatcactctctttggtattttcgatgcctacaagtggtacctggggtcctagacacatttttacgtagtaggataagtcattgctaaataataaagtaccaaacctacagggtgtttcatctacagtaaagaaacatgttagacaacttatagttcccgattcgtccacggagtacgagttttgttgagatggacaatccactgaagtggcactgtaataaattaggccagtgtcttcactccatgcaataatagacaagacagaaaatttcccgtgtgtcagtctttttgctgtcttggtcttaacgtcggtaagcaccagatgatcatatcggtcatttccctcaggttgaggtagtacctccagtcttctagtaccatctttactataaattggaacagttggggttatccagcccttgctttctgtttgggaagcttcctcttcacagctgccgtttgttgaacacctcagaatggaacttttgttttgtactcgattggtgcagactaaagataattcgtcagcagagatccagctcagtccgtaaaagatgaagtcgttaggttccacgttgcttatatgaagtggtatttgaaattccttcgttttcttgtttgctatgtcgtacaagtaaattctggctattggattcggagttccagattttgggtacctgatgactgcttcatgaggatattgacttccaggtgatcctggttctccgtaaatagtgtaggacaaattatagacttgttcgtcattgaatactgcataagccaagtaagctccatctggtgaaaaccataaggctgaacctgaggctaatacttcctcttcataaacccaatcaggaacaccgcaataaagaacacctggaatccctacaacagtcacagctacaggagtttcaatgttctttgaaaagtcatcaatgtagtaaatgttgttctcaagaacatatactaacccatgcccctctggagaaaactcaactaactgcaatggttgctgattggcaaggtggtaaaatttttgttgagccacatcgtatattgtgtagacggctgttatcgaatgtcgaaatacagcagagacattgtactttagtaaaacatatgaccggtccggagacaatcttaattctgctgttggatattcctccagtactttgttgtccagaaatagatcaacgctctttgttgacatattaaaaaacaaaatgtcattttcgaatgttttgtacatgaaagcagaatctgagatccatgatccattgaacgcaagtgctgaatatgtgtgatttaagtagtcatctaattcaaatggctgttgctctatttctttaatactcctttgttgtgttaatgcgacaacacctaacacaattattgtgagaatggcgaccttattaacatttaggcacaccattttttcatcagtcacaaacacaacacttttcaacacttattcttgttttataaagtatctgcttaaactcctctgaactgaatagatacgcat

SEQ ID NO: 1567 - DNA, 2418 bp, Diabrotica virgifera
  SmartBlast Evalue=1E-164; Info=Dipeptidyl peptidase 4 n=1 Tax= Camponotus floridanus RepID=E2AF09_9HYME
aataaatcatataagattagttgctttattggaccacgcgtcggcagttggatttttggtaccgaattgttcagcccaccatttatccatcatatggtacaaatgcctggagacgtgtcctagggaatggttttcgtctggataactgtgctgtctaaagtcaatatcagcaagttccaatgctttgaccaacatcatggagttttggtagtggacattgtcatcaccagttccgtggattataaaatagtttcttcctctgaaatgttcaactgcgtgggtgagatcagtattgttgtagccttgttcattgtcttccggtgttggcagacccataaacctttccgtatatatagaatcataataaataaaacttgtaactggagctaccgataatgctgctttgaatacatgatccttgtctttagctaaagcccaactggagcaaaatcctccatagctccatccccaaatacctgttctttcggcatcgatatatggcaagtgctcttgtaagtactttgtaacctgaatttggtcttccacttccacagtaccaaatcttctgtacatatcgaacattttattgtatccgtctcttccgctgcctcttccgtctatgtaaatatatatgtactctctgtttgtagtcaaataggttctaaattgtatattataagcatcgttgatctggttgttgcctggaccaccataagtgtctataatagcagggtatttcttattggaattttcatccaaattgggaggcaaaaacaatctcactctagctgaaaatccttcgtttatcggtactactaagtccctaacttgtggatgtaacttgtaggctagagcgattcttagaccaaagttatcttcccagattagaatatcatcactctctttggtattttcgatgcctacaagtggtacctggggtcctagacacatttttacgtagtaggataagtcattgctaaataataaagtaccaaacctacagggtgtttcatctacagtaaagaaacatgttagacaacttatagttcccgattcgtccacggagtacgagttttgttgagatggacaatccactgaagtggcactgtaataaattagaccagtgtcttcactccaggcaataatagacaagacagaaaatttcccgtgtgtcagtctttttgctgttttggtcttaacgtcagtaagcaccagatggtcatatctgtcatttccctcaggttgaggtagtacctccagtcttctagtaccatctttactataaattggaacagttggggttatccagcccttgctttctgtttgggaagcttcctcttcacagctgccgtttgttgaacaccttagaatggaacttttgttttgtactcggttggtgcagaccaaagacaattcgtcagcagagatccaggtcagtccgtaaaagatgaagtcgttgggttccacgttgcttatatgaagaggtatttgaatttccttcgttttcttgtttgctatgtcgtacaagtaaattctggctattggattcggagttccagattttgggtacctgatgactgcttcatggggatattgacttccaggtgatcctggttctccgtaaatagtgtaggacaaattatagacttgttcgtcattgaatactgcataagccaagtaagctccatctggtgaaaaccataaggctgaacctgatgccaatacttcctcttcataaacccaatcaggtacaccgcaataaagaacacctggaatccctacaacagtcacagctacaggagtttcaatgtgcttggaaaaatcatcaatgtagtagatgttgttttcaagaacatatactaagccatgtccctctggagaaaactcaactaactgcaatggttgctgattggcaaggtgataaaatttttgttgagcgacatcgtatattgtgtagatggcagttattgaatgccgaaatacagcagagacgttgtattttagtaagacatatgaccggtccggagacaatcttaattctgctgttggatattctgccagtactttgttgtccaggaatagatcaacgctctttgttgacatattaaaaaacaaaatgtcattttcgaatgttttgtacatgaaagcagaatctgagatccatgatccattgaacgcaagtgctgaatatgtgtgatttaagtagtcatctaattcaaatggctgttgctctatttctttaatactcctttgttgtgttaatgcgacaacacctaacacaattattgtgagaatggcgaccttattaacatttaggcacaccattttttcatcagtcacaaacacaacacttttcaacacttattcttgttttataaagtatctgcttaaactcctctgaactgaatagatacgcat

SEQ ID NO: 1568 - DNA, 2422 bp, Diabrotica virgifera
  SmartBlast Evalue=1E-164; Info=Dipeptidyl peptidase 4 n=1 Tax= Camponotus floridanus RepID=E2AF09_9HYME
aataaatcatataagattagttgctttattggaccacgcgtcggcagttggatttttggtaccgaattgttcagcccaccatttatccatcatatggtacaaatgcctggagacgtgtcctagggaatggttttcgtctggataactgtgctgtctaaagtcaatatcagcaagttccaatgctttgaccaacatcatggagttttggtagtggacattgtcatcaccagttccgtggattataaaatagtttcttcctctgaaatgttcaactgcgtgggtgagatcagtattgttgtagccttgttcattgtcttccggtgttggcagacccataaacctttccgtatatatagaatcataataaataaaacttgtaactggagctaccgataatgctgctttgaatacatgatccttgtctttagctaaagcccaactggagcaaaatcctccatagctccatccccaaatacctgttctttcggcatcgatatatggcaagtgctcttgtaagtactttgtaacctgaatttggtcttccacttccacagtaccaaatcttctgtacatatcgaacattttattgtatccgtctcttccgctgcctcttccgtctatgtaaatatatatgtactctctgtttgtagtcaaataggttctaaattgtatattataagcatcgttgatctggttgttgcctggaccaccataagtgtctataatagcagggtatttcttattggaattttcatccaaattgggaggcaaaaacaatctcactctagctgaaaatccttcgtttatcggtactactaagtccctaacttgtggatgtaacttgtaggctagagcgattcttagaccaaagttatcttcccagattagaatatcatcactctctttggtattttcgatgcctacaagtggtacctggggtcctagacacatttttacgtagtaggataagtcattgctaaataataaagtaccaaacctacagggtgtttcatctacagtaaagaaacatgttagacaacttatagttcccgattcgtccacggagtacgagttttgttgagatggacaatccactgaagtggcactgtaataaattaggccagtgtcttcactccatgcaataatagacaagacagaaaatttcccgtgtgtcagtctttttgctgtcttggtcttaacgtcggtaagcaccagatgatcatatcggtcatttccctcaggttgaggtagtacctccagtcttctagtaccatctttactataaattggaacagttggggttatccagcccttgctttctgtttgggaagcttcctcttcacagctgccgtttgttgaacacctcagaatggaacttttgttttgtactcgattggtgcagactaaagataattcgtcagcagagatccagctcagtccgtaaaagatgaagtcgttaggttccacgttgcttatatgaagtggtatttgaaattccttcgttttcttgtttgctatgtcgtacaagtaaattctggctattggattcggagttccagattttgggtacctgatgactgcttcatgaggatattgacttccaggtgatcctggttctccgtaaatagtgtaggacaaattatagacttgttcgtcattgaatactgcataagccaagtaagctccatctggtgaaaaccataaggctgaacctgaggctaatacttcctcttcataaacccaatcaggaacaccgcaataaagaacacctggaatccctacaacagtcacagctacaggagtttcaatgttctttgaaaagtcatcaatgtagtaaatgttgttctcaagaacatatactaacccatgcccctctggagaaaactcaactaactgcaatggttgctgattggcaaggtggtaaaatttttgttgagccacatcgtatattgtgtagacggctgttatcgaatgtcgaaatacagcagagacattgtactttagtaaaacatatgaccggtccggagacaatcttaattctgctgttggatattcctccagtactttgttgtccagaaatagatcaacgctctttgttgacatattaaaaaacaaaatgtcattttcgaatgttttgtacatgaaagcagaatctgagatccatgatccattgaacgcaagtgctgaatacgtctgatttaaatagtcatctaattcaaatggctgttgctcgatttctttaatacttctttgttgagataatgcgacaacacctaatacaattatggtgagaatggcaaccttattaacatttaggcacaccattttctcaacagtcacaaatacaacacttttcaacacttattcttgttttataaagtatctgcttaaactcctctgaactgaatatatacgcatgtca

SEQ ID NO: 1569 - DNA, 2422 bp, Diabrotica virgifera
  SmartBlast Evalue=1E-165; Info=Dipeptidyl peptidase 4 n=1 Tax= Camponotus floridanus RepID=E2AF09_9HYME
aataaatcatataagattagttgctttattggaccacgcgtcggcagttggatttttggtaccgaattgttcagcccaccatttatccatcatatggtacaaatgcctggagacgtgtcctagggaatggttttcgtctggataactgtgctgtctaaagtcaatatcagcaagttccaatgctttgaccaacatcatggagttttggtagtggacattgtcatcaccagttccgtggattataaaatagtttcttcctctgaaatgttcaactgcgtgggtgagatcagtattgttgtagccttgttcattgtcttccggtgttggcagacccataaacctttccgtatatatagaatcataataaataaaacttgtaactggagctaccgataatgctgctttgaatacatgatccttgtctttagctaaagcccaactggagcaaaatcctccatagctccatccccaaatacctgttctttcggcatcgatatatggcaagtgctcttgtaagtactttgtaacctgaatttggtcttccacttccacagtaccaaatcttctgtacatatcgaacattttattgtatccgtctcttccgctgcctcttccgtctatgtaaatatatatgtactctctgtttgtagtcaaataggttctaaattgtatattataagcatcgttgatctggttgttgcctggaccaccataagtgtctataatagcagggtatttcttattggaattttcatccaaattgggaggcaaaaacaatctcactctagctgaaaatccttcgtttatcggtactactaagtccctaacttgtggatgtaacttgtaggctagagcgattcttagaccaaagttatcttcccagattagaatatcatcactctctttggtattttcgatgcctacaagtggtacctggggtcctagacacatttttacgtagtaggataagtcattgctaaataataaagtaccaaacctacagggtgtttcatctacagtaaagaaacatgttagacaacttatagttcccgattcgtccacggagtacgagttttgttgagatggacaatccactgaagtggcactgtaataaattagaccagtgtcttcactccaggcaataatagacaagacagaaaatttcccgtgtgtcagtctttttgctgttttggtcttaacgtcagtaagcaccagatggtcatatctgtcatttccctcaggttgaggtagtacctccagtcttctagtaccatctttactataaattggaacagttggggttatccagcccttgctttctgtttgggaagcttcctcttcacagctgccgtttgttgaacaccttagaatggaacttttgttttgtactcggttggtgcagaccaaagacaattcgtcagcagagatccaggtcagtccgtaaaagatgaagtcgttgggttccacgttgcttatatgaagaggtatttgaatttccttcgttttcttgtttgctatgtcgtacaagtaaattctggctattggattcggagttccagattttgggtacctgatgactgcttcatggggatattgacttccaggtgatcctggttctccgtaaatagtgtaggacaaattatagacttgttcgtcattgaatactgcataagccaagtaagctccatctggtgaaaaccataaggctgaacctgatgccaatacttcctcttcataaacccaatcaggtacaccgcaataaagaacacctggaatccctacaacagtcacagctacaggagtttcaatgtgcttggaaaaatcatcaatgtagtagatgttgttttcaagaacatatactaagccatgtccctctggagaaaactcaactaactgcaatggttgctgattggcaaggtgataaaatttttgttgagcgacatcgtatattgtgtagatggcagttattgaatgccgaaatacagcagagacgttgtattttagtaagacatatgaccggtccggagacaatcttaattctgctgttggatattctgccagtactttgttgtccaggaatagatcaacgctctttgttgacatattaaaaaacaaaatgtcattttcgaatgttttgtacatgaaagcagaatctgagatccatgatccattgaacgcaagtgctgaatacgtctgatttaaatagtcatctaattcaaatggctgttgctcgatttctttaatacttctttgttgagataatgcgacaacacctaatacaattatggtgagaatggcaaccttattaacatttaggcacaccattttctcaacagtcacaaatacaacacttttcaacacttattcttgttttataaagtatctgcttaaactcctctgaactgaatatatacgcatgtca

SEQ ID NO: 1570 - DNA, 2364 bp, Diabrotica virgifera
  SmartBlast Evalue=1E-164; Info=Dipeptidyl peptidase 4 n=1 Tax= Camponotus floridanus RepID=E2AF09_9HYME
tttggtaccgaattgttcagcccaccacttatccatcatatggtataaatgcctggagacgtgtcctagggaatggttttcgtctggataactgtgctgcctgaagtcaatatcagcaagttccaatgctttgaccaacatcatggagttttggtagtggacgttgtcatcaccagttccgtgtattataaaatagtttcttcctctgaaattctcaactacatgggtgagatcagtgttattgtagccttgttcattgtcttccggtgttggcagacccataaacctttccgtatatatagaatcataataaataaaacttgtaactggagctaccgataatgctgctttgaatacatgatccttgtctttagctaaagcccaactggagcaaaatcctccatagctccatccccaaatacctgttctttcggcatcgatatatggcaagtgctcttgtaagtactttgtaacctgaatttggtcttccacttccacagtaccaaatcttctgtacatatcgaacattttattgtatccgtctcttccgctgcctcttccgtctatgtaaatatatatgtactctctgtttgtagtcaaataggttctaaattgtatattataagcatcgttgatctggttgttgcctggaccaccataagtgtctataatagcagggtatttcttattggaattttcatccaaattgggaggcaaaaacaatctcactctagctgaaaatccttcgtttatcggtactactaagtccctaacttgtggatgtaacttgtaggctagagcgattcttagaccaaagttatcttcccagattagaatatcatcactctctttggtattttcgatgcctacaagtggtacctggggtcctagacacatttttacgtagtaggataagtcattgctaaataataaagtaccaaacctacagggtgtttcatctacagtaaagaaacatgttagacaacttatagttcccgattcgtccacggagtacgagttttgttgagatggacaatccactgaagtggcactgtaataaattaggccagtgtcttcactccatgcaataatagacaagacagaaaatttcccgtgtgtcagtctttttgctgtcttggtcttaacgtcggtaagcaccagatgatcatatcggtcatttccctcaggttgaggtagtacctccagtcttctagtaccatctttactataaattggaacagttggggttatccagcccttgctttctgtttgggaagcttcctcttcacagctgccgtttgttgaacacctcagaatggaacttttgttttgtactcgattggtgcagactaaagataattcgtcagcagagatccagctcagtccgtaaaagatgaagtcgttaggttccacgttgcttatatgaagtggtatttgaaattccttcgttttcttgtttgctatgtcgtacaagtaaattctggctattggattcggagttccagattttgggtacctgatgactgcttcatgaggatattgacttccaggtgatcctggttctccgtaaatagtgtaggacaaattatagacttgttcgtcattgaatactgcataagccaagtaagctccatctggtgaaaaccataaggctgaacctgaggctaatacttcctcttcataaacccaatcaggaacaccgcaataaagaacacctggaatccctacaacagtcacagctacaggagtttcaatgttctttgaaaagtcatcaatgtagtaaatgttgttctcaagaacatatactaacccatgcccctctggagaaaactcaactaactgcaatggttgctgattggcaaggtggtaaaatttttgttgagccacatcgtatattgtgtagacggctgttatcgaatgtcgaaatacagcagagacattgtactttagtaaaacatatgaccggtccggagacaatcttaattctgctgttggatattcctccagtactttgttgtccagaaatagatcaacgctctttgttgacatattaaaaaacaaaatgtcattttcgaatgttttgtacatgaaagcagaatctgagatccatgatccattgaacgcaagtgctgaatatgtgtgatttaagtagtcatctaattcaaatggctgttgctctatttctttaatactcctttgttgtgttaatgcgacaacacctaacacaattattgtgagaatggcgaccttattaacatttaggcacaccattttttcatcagtcacaaacacaacacttttcaacacttattcttgttttataaagtatctgcttaaactcctctgaactgaatagatacgcat

SEQ ID NO: 1571 - DNA, 2364 bp, Diabrotica virgifera
  SmartBlast Evalue=1E-165; Info=Dipeptidyl peptidase 4 n=1 Tax= Camponotus floridanus RepID=E2AF09_9HYME
tttggtaccgaattgttcagcccaccacttatccatcatatggtataaatgcctggagacgtgtcctagggaatggttttcgtctggataactgtgctgcctgaagtcaatatcagcaagttccaatgctttgaccaacatcatggagttttggtagtggacgttgtcatcaccagttccgtgtattataaaatagtttcttcctctgaaattctcaactacatgggtgagatcagtgttattgtagccttgttcattgtcttccggtgttggcagacccataaacctttccgtatatatagaatcataataaataaaacttgtaactggagctaccgataatgctgctttgaatacatgatccttgtctttagctaaagcccaactggagcaaaatcctccatagctccatccccaaatacctgttctttcggcatcgatatatggcaagtgctcttgtaagtactttgtaacctgaatttggtcttccacttccacagtaccaaatcttctgtacatatcgaacattttattgtatccgtctcttccgctgcctcttccgtctatgtaaatatatatgtactctctgtttgtagtcaaataggttctaaattgtatattataagcatcgttgatctggttgttgcctggaccaccataagtgtctataatagcagggtatttcttattggaattttcatccaaattgggaggcaaaaacaatctcactctagctgaaaatccttcgtttatcggtactactaagtccctaacttgtggatgtaacttgtaggctagagcgattcttagaccaaagttatcttcccagattagaatatcatcactctctttggtattttcgatgcctacaagtggtacctggggtcctagacacatttttacgtagtaggataagtcattgctaaataataaagtaccaaacctacagggtgtttcatctacagtaaagaaacatgttagacaacttatagttcccgattcgtccacggagtacgagttttgttgagatggacaatccactgaagtggcactgtaataaattagaccagtgtcttcactccaggcaataatagacaagacagaaaatttcccgtgtgtcagtctttttgctgttttggtcttaacgtcagtaagcaccagatggtcatatctgtcatttccctcaggttgaggtagtacctccagtcttctagtaccatctttactataaattggaacagttggggttatccagcccttgctttctgtttgggaagcttcctcttcacagctgccgtttgttgaacaccttagaatggaacttttgttttgtactcggttggtgcagaccaaagacaattcgtcagcagagatccaggtcagtccgtaaaagatgaagtcgttgggttccacgttgcttatatgaagaggtatttgaatttccttcgttttcttgtttgctatgtcgtacaagtaaattctggctattggattcggagttccagattttgggtacctgatgactgcttcatggggatattgacttccaggtgatcctggttctccgtaaatagtgtaggacaaattatagacttgttcgtcattgaatactgcataagccaagtaagctccatctggtgaaaaccataaggctgaacctgatgccaatacttcctcttcataaacccaatcaggtacaccgcaataaagaacacctggaatccctacaacagtcacagctacaggagtttcaatgtgcttggaaaaatcatcaatgtagtagatgttgttttcaagaacatatactaagccatgtccctctggagaaaactcaactaactgcaatggttgctgattggcaaggtgataaaatttttgttgagcgacatcgtatattgtgtagatggcagttattgaatgccgaaatacagcagagacgttgtattttagtaagacatatgaccggtccggagacaatcttaattctgctgttggatattctgccagtactttgttgtccaggaatagatcaacgctctttgttgacatattaaaaaacaaaatgtcattttcgaatgttttgtacatgaaagcagaatctgagatccatgatccattgaacgcaagtgctgaatatgtgtgatttaagtagtcatctaattcaaatggctgttgctctatttctttaatactcctttgttgtgttaatgcgacaacacctaacacaattattgtgagaatggcgaccttattaacatttaggcacaccattttttcatcagtcacaaacacaacacttttcaacacttattcttgttttataaagtatctgcttaaactcctctgaactgaatagatacgcat

SEQ ID NO: 1572 - DNA, 2364 bp, Diabrotica virgifera
  SmartBlast Evalue=1E-164; Info=Dipeptidyl peptidase 4 n=1 Tax= Camponotus floridanus RepID=E2AF09_9HYME
tttggtaccgaattgttcagcccaccacttatccatcatatggtataaatgcctggagacgtgtcctagggaatggttttcgtctggataactgtgctgcctgaagtcaatatcagcaagttccaatgctttgaccaacatcatggagttttggtagtggacgttgtcatcaccagttccgtgtattataaaatagtttcttcctctgaaattctcaactacatgggtgagatcagtgttattgtagccttgttcattgtcttccggtgttggtagacccataaacctttccgtatatatagaatcataataaataaaacttgttactggagctaccgataatgctgctttgaatacatgatccttgtctttagctaaagcccaacttgagcaaaatcctccatagctccaaccccaaatacctgttctttcggcatcgatatatggcaggtgctcttgtaagtactttgtaacctgaatttggtcttccacttccacagtaccgaatcttctgtacatatcaaacattttattgtatccgtctcttccgctgcctcttccgtctatgtaaatatatatgtactctctgtttgtagtcaaataggttctaaattgtatattataagcatcgttgatctggttgttgcctggaccaccataagtgtctataatagcagggtatttcttattggaattttcatccaaattgggaggcaaaaacaatctcactctagctgaaaatccttcgtttatcggtactactaagtccctaacttgtggatgtaacttgtaggctagagcgattcttagaccaaagttatcttcccagattagaatatcatcactctctttggtattttcgatgcctacaagtggtacctggggtcctagacacatttttacgtagtaggataagtcattgctaaataataaagtaccaaacctacagggtgtttcatctacagtaaagaaacatgttagacaacttatagttcccgattcgtccacggagtacgagttttgttgagatggacaatccactgaagtggcactgtaataaattaggccagtgtcttcactccatgcaataatagacaagacagaaaatttcccgtgtgtcagtctttttgctgtcttggtcttaacgtcggtaagcaccagatgatcatatcggtcatttccctcaggttgaggtagtacctccagtcttctagtaccatctttactataaattggaacagttggggttatccagcccttgctttctgtttgggaagcttcctcttcacagctgccgtttgttgaacacctcagaatggaacttttgttttgtactcgattggtgcagactaaagataattcgtcagcagagatccagctcagtccgtaaaagatgaagtcgttaggttccacgttgcttatatgaagtggtatttgaaattccttcgttttcttgtttgctatgtcgtacaagtaaattctggctattggattcggagttccagattttgggtacctgatgactgcttcatgaggatattgacttccaggtgatcctggttctccgtaaatagtgtaggacaaattatagacttgttcgtcattgaatactgcataagccaagtaagctccatctggtgaaaaccataaggctgaacctgaggctaatacttcctcttcataaacccaatcaggaacaccgcaataaagaacacctggaatccctacaacagtcacagctacaggagtttcaatgttctttgaaaagtcatcaatgtagtaaatgttgttctcaagaacatatactaacccatgcccctctggagaaaactcaactaactgcaatggttgctgattggcaaggtggtaaaatttttgttgagccacatcgtatattgtgtagacggctgttatcgaatgtcgaaatacagcagagacattgtactttagtaaaacatatgaccggtccggagacaatcttaattctgctgttggatattcctccagtactttgttgtccagaaatagatcaacgctctttgttgacatattaaaaaacaaaatgtcattttcgaatgttttgtacatgaaagcagaatctgagatccatgatccattgaacgcaagtgctgaatatgtgtgatttaagtagtcatctaattcaaatggctgttgctctatttctttaatactcctttgttgtgttaatgcgacaacacctaacacaattattgtgagaatggcgaccttattaacatttaggcacaccattttttcatcagtcacaaacacaacacttttcaacacttattcttgttttataaagtatctgcttaaactcctctgaactgaatagatacgcat

SEQ ID NO: 1573 - DNA, 2364 bp, Diabrotica virgifera
  SmartBlast Evalue=1E-165; Info=Dipeptidyl peptidase 4 n=1 Tax= Camponotus floridanus RepID=E2AF09_9HYME
tttggtaccgaattgttcagcccaccacttatccatcatatggtataaatgcctggagacgtgtcctagggaatggttttcgtctggataactgtgctgcctgaagtcaatatcagcaagttccaatgctttgaccaacatcatggagttttggtagtggacgttgtcatcaccagttccgtgtattataaaatagtttcttcctctgaaattctcaactacatgggtgagatcagtgttattgtagccttgttcattgtcttccggtgttggtagacccataaacctttccgtatatatagaatcataataaataaaacttgttactggagctaccgataatgctgctttgaatacatgatccttgtctttagctaaagcccaacttgagcaaaatcctccatagctccaaccccaaatacctgttctttcggcatcgatatatggcaggtgctcttgtaagtactttgtaacctgaatttggtcttccacttccacagtaccgaatcttctgtacatatcaaacattttattgtatccgtctcttccgctgcctcttccgtctatgtaaatatatatgtactctctgtttgtagtcaaataggttctaaattgtatattataagcatcgttgatctggttgttgcctggaccaccataagtgtctataatagcagggtatttcttattggaattttcatccaaattgggaggcaaaaacaatctcactctagctgaaaatccttcgtttatcggtactactaagtccctaacttgtggatgtaacttgtaggctagagcgattcttagaccaaagttatcttcccagattagaatatcatcactctctttggtattttcgatgcctacaagtggtacctggggtcctagacacatttttacgtagtaggataagtcattgctaaataataaagtaccaaacctacagggtgtttcatctacagtaaagaaacatgttagacaacttatagttcccgattcgtccacggagtacgagttttgttgagatggacaatccactgaagtggcactgtaataaattagaccagtgtcttcactccaggcaataatagacaagacagaaaatttcccgtgtgtcagtctttttgctgttttggtcttaacgtcagtaagcaccagatggtcatatctgtcatttccctcaggttgaggtagtacctccagtcttctagtaccatctttactataaattggaacagttggggttatccagcccttgctttctgtttgggaagcttcctcttcacagctgccgtttgttgaacaccttagaatggaacttttgttttgtactcggttggtgcagaccaaagacaattcgtcagcagagatccaggtcagtccgtaaaagatgaagtcgttgggttccacgttgcttatatgaagaggtatttgaatttccttcgttttcttgtttgctatgtcgtacaagtaaattctggctattggattcggagttccagattttgggtacctgatgactgcttcatggggatattgacttccaggtgatcctggttctccgtaaatagtgtaggacaaattatagacttgttcgtcattgaatactgcataagccaagtaagctccatctggtgaaaaccataaggctgaacctgatgccaatacttcctcttcataaacccaatcaggtacaccgcaataaagaacacctggaatccctacaacagtcacagctacaggagtttcaatgtgcttggaaaaatcatcaatgtagtagatgttgttttcaagaacatatactaagccatgtccctctggagaaaactcaactaactgcaatggttgctgattggcaaggtgataaaatttttgttgagcgacatcgtatattgtgtagatggcagttattgaatgccgaaatacagcagagacgttgtattttagtaagacatatgaccggtccggagacaatcttaattctgctgttggatattctgccagtactttgttgtccaggaatagatcaacgctctttgttgacatattaaaaaacaaaatgtcattttcgaatgttttgtacatgaaagcagaatctgagatccatgatccattgaacgcaagtgctgaatatgtgtgatttaagtagtcatctaattcaaatggctgttgctctatttctttaatactcctttgttgtgttaatgcgacaacacctaacacaattattgtgagaatggcgaccttattaacatttaggcacaccattttttcatcagtcacaaacacaacacttttcaacacttattcttgttttataaagtatctgcttaaactcctctgaactgaatagatacgcat

SEQ ID NO: 1574 - DNA, 2368 bp, Diabrotica virgifera
  SmartBlast Evalue=1E-164; Info=Dipeptidyl peptidase 4 n=1 Tax= Camponotus floridanus RepID=E2AF09_9HYME
tttggtaccgaattgttcagcccaccacttatccatcatatggtataaatgcctggagacgtgtcctagggaatggttttcgtctggataactgtgctgcctgaagtcaatatcagcaagttccaatgctttgaccaacatcatggagttttggtagtggacgttgtcatcaccagttccgtgtattataaaatagtttcttcctctgaaattctcaactacatgggtgagatcagtgttattgtagccttgttcattgtcttccggtgttggcagacccataaacctttccgtatatatagaatcataataaataaaacttgtaactggagctaccgataatgctgctttgaatacatgatccttgtctttagctaaagcccaactggagcaaaatcctccatagctccatccccaaatacctgttctttcggcatcgatatatggcaagtgctcttgtaagtactttgtaacctgaatttggtcttccacttccacagtaccaaatcttctgtacatatcgaacattttattgtatccgtctcttccgctgcctcttccgtctatgtaaatatatatgtactctctgtttgtagtcaaataggttctaaattgtatattataagcatcgttgatctggttgttgcctggaccaccataagtgtctataatagcagggtatttcttattggaattttcatccaaattgggaggcaaaaacaatctcactctagctgaaaatccttcgtttatcggtactactaagtccctaacttgtggatgtaacttgtaggctagagcgattcttagaccaaagttatcttcccagattagaatatcatcactctctttggtattttcgatgcctacaagtggtacctggggtcctagacacatttttacgtagtaggataagtcattgctaaataataaagtaccaaacctacagggtgtttcatctacagtaaagaaacatgttagacaacttatagttcccgattcgtccacggagtacgagttttgttgagatggacaatccactgaagtggcactgtaataaattaggccagtgtcttcactccatgcaataatagacaagacagaaaatttcccgtgtgtcagtctttttgctgtcttggtcttaacgtcggtaagcaccagatgatcatatcggtcatttccctcaggttgaggtagtacctccagtcttctagtaccatctttactataaattggaacagttggggttatccagcccttgctttctgtttgggaagcttcctcttcacagctgccgtttgttgaacacctcagaatggaacttttgttttgtactcgattggtgcagactaaagataattcgtcagcagagatccagctcagtccgtaaaagatgaagtcgttaggttccacgttgcttatatgaagtggtatttgaaattccttcgttttcttgtttgctatgtcgtacaagtaaattctggctattggattcggagttccagattttgggtacctgatgactgcttcatgaggatattgacttccaggtgatcctggttctccgtaaatagtgtaggacaaattatagacttgttcgtcattgaatactgcataagccaagtaagctccatctggtgaaaaccataaggctgaacctgaggctaatacttcctcttcataaacccaatcaggaacaccgcaataaagaacacctggaatccctacaacagtcacagctacaggagtttcaatgttctttgaaaagtcatcaatgtagtaaatgttgttctcaagaacatatactaacccatgcccctctggagaaaactcaactaactgcaatggttgctgattggcaaggtggtaaaatttttgttgagccacatcgtatattgtgtagacggctgttatcgaatgtcgaaatacagcagagacattgtactttagtaaaacatatgaccggtccggagacaatcttaattctgctgttggatattcctccagtactttgttgtccagaaatagatcaacgctctttgttgacatattaaaaaacaaaatgtcattttcgaatgttttgtacatgaaagcagaatctgagatccatgatccattgaacgcaagtgctgaatacgtctgatttaaatagtcatctaattcaaatggctgttgctcgatttctttaatacttctttgttgagataatgcgacaacacctaatacaattatggtgagaatggcaaccttattaacatttaggcacaccattttctcaacagtcacaaatacaacacttttcaacacttattcttgttttataaagtatctgcttaaactcctctgaactgaatatatacgcatgtca

SEQ ID NO: 1575 - DNA, 1278 bp, Diabrotica virgifera
cttaaaaggcctgtttcggcaagccgtccccagattgacgatttgcttgtaataagaagctatggaatattagccgataggcaaccaattatacattccccgtatttatttgaatggcaagtcacggcagataccaatctgccgagcggtgatctgcaaacggcagcaaggcacgtacctagccacgtaccttgctggcgcgcccgggataaaattatgaaataggtaagtagttttacttcgtttaattattgttattgtatttttttaagttgttaggaattaccatttaggggacagattgaatcggagcattcgttaaatcaagttaattatagagaacaaataaaattgtttaacaaaacgatctggaattttctaatttactttctgactcgaagacatttagcgtcgtacctaaaacagcacagaatgaaagaatcaattagtagttacattttgatccttttcggtagaagtagacgaaactactgatagaggtaacatgtcattcacaattatcaattattgttcttcgatacgcgttacgtctaatatttatgagaggtttttaggttttcagacgtgagtagaagccataagacagaatatattgttggtgttttaaaagacagattaaaattttttgatatcaaaaataaattggtaaggcaaacttatgacggcgctgccttgatgtccggtgaattgtatggtctccaggcaaaagttaaaactattgcacccccactttatttactcactgttataagtcattcacctctttgacgattcaaaatttaaaagttacgccaaagaattttcaaaatatctattagacaagttcattaaaattatccatcattctttaatcaaataaaataagaaaatggattaacaggtttatatgctgatccaaatattttcggaaggtgggataagttacaaaatatgtataattttatatactgcaattcattaggtacaacaaactgttcccgaaattaataaattattgtgctcaaatgtgggcaaattctgcctcaaatgaacgggatttctcttgtctcaaaagagtcaaaacgtattgtcgaaacaccatgaaacaagagagaatgtcaaacttgtctcaaatgtcaatagaaaaaaacttttaaagtcctctccaaaacaataataaattttacaatgacgttctaacccattttgctacttcgaaacaacatagactagagttaatttataaacaggtttaggttctcaatttataggaaaaac

SEQ ID NO: 1576 - DNA, 1268 bp, Diabrotica virgifera
cttaaaaggcctgtttcggcaagccgtccccagattgacgatttgcttgtaataagaagctatggaatattagccgataggcaaccaattatacattccccgtatttatttgaatggcaagtcacggcagataccaatctgccgagcggtgatctgcaaacggcagcaaggcacgtacctagccacgtaccttgctggcgcgcccgggataaaattatgaaataggtaagtagttttacttcgtttaattattgttattgtatttttttaagttgttaggaattaccatttaggggacagattgaatcggagcattcgttaaatcaagttaattatagagaacaaataaaattgtttaacaaaacgatctggaattttctaatttactttctgactcgaagacatttagcgtcgtacctaaaacagcacagaatgaaagaatcaattagtagttacattttgatccttttcggtagaagtagacgaaactactgatagaggtaacatgtcattcacaattatcaattattgttcttcgatacgcgttacgtctaatatttatgagaggtttttaggttttcagacgtgagtagaagccataagacagaatatattgttggtgttttaaaagacagattaaaattttttgatatcaaaaataaattggtaaggcaaatttatgaccggtgaattgtacggtctccgcaggtaaaagttaaaactattgcaccaggcaaaactattattttctcactgttataagtcattcacctctttgacgattcaaaatttaaaagttacgccaaagaattttcaaaatatctattagacaagttcattaaaattatccatcattctttaatcaaataaaataagaaaatggattaacaggtttatatgctgatccaaatattttcggaaggtgggataagttacaaaatatgtataattttatatactgcaattcattaggtacaacaaactgttcccgaaattaataaattattgtgctcaaatgtgggcaaattctgcctcaaatgaacgggatttctcttgtctcaaaagagtcaaaacgtattgtcgaaacaccatgaaacaagagagaatgtcaaacttgtctcaaatgtcaatagaaaaaaacttttaaagtcctctccaaaacaataataaattttacaatgacgttctaacccattttgctacttcgaaacaacatagactagagttaatttataaacaggtttaggttctcaatttataggaaaaac

SEQ ID NO: 1577 - DNA, 1230 bp, Diabrotica virgifera
cttaaaaggcctgtttcggcaagccgtccccagattgacgatttgcttgtaataagaagctatggaatattagccgataggcaaccaattatacattccccgtatttatttgaatggcaagtcacggcagataccaatctgccgagcggtgatctgcaaacggcagcaaggcacgtacctagccacgtaccttgctggcgcgcccgggataaaattatgaaataggtaagtagttttacttcgtttaattattgttattgtatttttttaagttgttaggaattaccatttaggggacagattgaatcggagcattcgttaaatcaagttaattatagagaacaaataaaattgtttaacaaaacgatctggaattttctaatttactttctgactcgaagacatttagcgtcgtacctaaaacagcacagaatgaaagaatcaattagtagttacattttgatccttttcggtagaagtagacgaaactactgatagaggtaacatgtcattcacaattatcaattattgttcttcgatacgcgttacgtctaatatttatgagaggtttttaggttttcagacgtgagtagaagccataagacagaatatattgttggtgttttaaaagacagattaaaattttttgatatcaaaaataaattggtaaggcaaacttatgacggcgctgccttgatgtccggtgaattgtatggtctccaggcaaaagttaaaactattgcacccccactttatttactcactgttataagtcattcacctctttgacgattcaaaatttaaaagttacgccaaagaattttcaaaatatctattagacaagttcattaaaattatccatcattctttaatcaaataaaataagaaaatggattaacaggtttatatgctgatccaaatattttcggaaggtgggataagttacaaaatatgtataattttatatactgcaattcattaggtacaacaaactgttcccgaaattaataaattattgtgctcaaatgtgggcaaattctgcctcaaatgaacgggatttctcttgtctcaaaagagtcaaaacgtattgtcgaaacaccatgaaacaagagagaatgtcaagcttgtctccaatgtcaatagaaaaaacttttaaaatctctccaaaacaataataaattttacaattacgttatagttataaaacccatttccctacttcgaaacaac

SEQ ID NO: 1578 - DNA, 1220 bp, Diabrotica virgifera
cttaaaaggcctgtttcggcaagccgtccccagattgacgatttgcttgtaataagaagctatggaatattagccgataggcaaccaattatacattccccgtatttatttgaatggcaagtcacggcagataccaatctgccgagcggtgatctgcaaacggcagcaaggcacgtacctagccacgtaccttgctggcgcgcccgggataaaattatgaaataggtaagtagttttacttcgtttaattattgttattgtatttttttaagttgttaggaattaccatttaggggacagattgaatcggagcattcgttaaatcaagttaattatagagaacaaataaaattgtttaacaaaacgatctggaattttctaatttactttctgactcgaagacatttagcgtcgtacctaaaacagcacagaatgaaagaatcaattagtagttacattttgatccttttcggtagaagtagacgaaactactgatagaggtaacatgtcattcacaattatcaattattgttcttcgatacgcgttacgtctaatatttatgagaggtttttaggttttcagacgtgagtagaagccataagacagaatatattgttggtgttttaaaagacagattaaaattttttgatatcaaaaataaattggtaaggcaaatttatgaccggtgaattgtacggtctccgcaggtaaaagttaaaactattgcaccaggcaaaactattattttctcactgttataagtcattcacctctttgacgattcaaaatttaaaagttacgccaaagaattttcaaaatatctattagacaagttcattaaaattatccatcattctttaatcaaataaaataagaaaatggattaacaggtttatatgctgatccaaatattttcggaaggtgggataagttacaaaatatgtataattttatatactgcaattcattaggtacaacaaactgttcccgaaattaataaattattgtgctcaaatgtgggcaaattctgcctcaaatgaacgggatttctcttgtctcaaaagagtcaaaacgtattgtcgaaacaccatgaaacaagagagaatgtcaagcttgtctccaatgtcaatagaaaaaacttttaaaatctctccaaaacaataataaattttacaattacgttatagttataaaacccatttccctacttcgaaacaac

SEQ ID NO: 1579 - DNA, 734 bp, Diabrotica virgifera
tattgtacaaaattgtatatcgatgattcaaatattttcggaaggtgagataaggtataaaatatgtataattttatatactgtaattcattaggtacaacaaactgttcccgaaattaataaattattgttctcaaatgtgggcaaattctgattcaaatgaacgggatttctcttgtctcaaaagagtcaaaacgtattgtcgaaacaccataaaacaatagagaatgtcaagcttgtctcagatgtcaatagaaaaaaacttttaaaatctctccaaaacaataataaattttacaatgacattataacccattttgctacttcgaaacaacatagactagagttaatttataaacaggtttaggttctaaattataggaaaaaaataaaaataaacaaaaaccaaaaatctcctatgaaattgaagccttttaattagatggcatacctatctgacgagacaaaaccttgccgaccctgtccctaaagccacgagccgccactgcctcctagcttttgggaaagaacaaaaaattaaatttgtattgtatatacatatatagacaaacgtatttttgtcaaaaaatacgtttggcccaccttaaaaatttttatatgggcgctttttgatggcagcagttacttccttgtattaaccctttcaactgcgttcaacgcgtacgcgcgtccaaatatgactagattagtgccattggacgcgtaagcgcgtc

SEQ ID NO: 1580 - DNA, 4355 bp, Diabrotica virgifera
  SmartBlast Evalue=0; Info=Glutamate--cysteine ligase catalytic subunit n=2 Tax=Formicidae RepID=E2BWC4_9HYME
gccctgttgttgtaaaatactgcaacattctatttctataaatacatataaaaattcttctttaagtataacaaaactaaaaatgactaaacagtttacgtttaaaacaaagcgcatgttggcacctgaaaaaaatcttgttacataacaaacatgttaaattttattagaaacatctaaataagtcatttatatattagctaaaaactaagaacattattggaattaaggaactttttaaaatgctatttataagtaatacgttttatttgaagaatgatattttttgaagagcatcagtccagaagtagaaatttagtcgattgtctaaccagaccctagatggctaatattatccatatattgttcaataattgtatactatgaccacctgtggattgtttttgttgcacaaaaaaatttctattattattattacggatactgataaatattaatatctattgggatgtatccttcagttatatcagtggcggcttgtcagggtcggcagtgccgacccacacatttatggacacattatagtttttttaaatatttaatttaatcagagttgatgatattcgtttctgggaaataaaaaaatatctgagataatacagactaaattttattcattgtttttaaaagaattcgatcgatccgatacgttatgtgatccctgtgcgctgtgcgtaagagacttttcaaattattgatcctatagccatgcacccgattgcgataggcccgcttcggcaagccgtccccagattgacgatttgcttgtaataagaagctatggaatattagccgataggcaaccaattatacatttccccgtattcatttgaatgacaagtccggcagataccaatctgccgatcggtgatctgcaaacagcagcaaggaacgtacctagccacgtaccttgctagcgcgcccaggatgaaactatgaaataagtagttttacgtcgtttaattattgatattgcagttttttttaagttgccaggaattaccatttaggggacaggatgaatcggagcattcgttaaatcaagttaattatacagaaccaataaaattgtttaacaaatacgatctggaattttctaatttattttctgtctcgaagagatttagcgacgtaacaaaaacagcacagaatgaaagaatcaattagtagttacgttttgatccttttcggtataaatagacgaaactactgatagaggtaacatgtcattcacaattatcaattattgttcttcgatacgcgttacgtctaatatttatgagaggtttttaggttttcagacgtgagtagaagccataagacagaatatattgttggtgttttaaaagacagattaaaattttttgatatcaaaaataaattggtaaggcaaacttatgacggcgctgccttgatgtccggtgaattgtatggtctccaggcaaaagttaaaactattgcacccccactttatttactcactgtcataagtcatttacctctttgacgattcaaaatttaaaagttacgccaaagaattttcaaaatatctattagacaagttcattaaaaattatccatcattctttaatcaaataaaataagaaaattaaattttatatgctgatccaaatatttttggaaggtgggataagttacaaaatatgtattattttatatacgcaattcattaggtacaacaaactgggcaaaatgtgggcaaattctgcctcaaatgaacgggatttctcttgtctcaaacgagtcaaaacgtattgtcgaaacaccataaaacaatagagaatgtcaagcttgtctcagatgtcaatagaaaaaaacttttaaaatctctccaaaacaataataaattttacaatgacattataacccattttgctacttcgaaacaacatagactagagttaatttataaacaggtttaggttctaaattataggaaaaaaataaaaataaacaaaaaccaaaaatctcctatgaaattgaagccttttaattagatggcatacctatctgaggagacaaaaccttaccgaccctgtccataaagccacgagccgtcactgagttatatggaatgacaagagcagtgtttaaaagtgtatacagtatcaaatcaagatgaagcataaattatattgaatgaatagcatcatgaataggcttataccttttgtcaaataagaaaattaatgaaaatgtagattatacatatttatgtacatccagtcttcaattatatttaaactactgatcagattgtctgattctaatgagtcttaataaaacaaattttctttcagtgccaattcgctgttgtttgttttaagtactataataacattttaacaatcatttcttaaagccgttggtatattttctttagtttttgacatcgtgcttgttcctaaaagcaggggacagtattttttgccggattgaatttcctcgattgtcttgagtaagtcataatttattcgctctgatactacagaatcgtacctatattctgggtgttctgtaacaaactttcttatccatgaagctgttgtaaggatttcacctgatgctcgcctttgtataaacttcaaatactgttgaattgtgcagtgcgtatcggcgtcaacatccatgccgcttaagtagttgttaataagtggaataagaccgggaaattcttccccttttccattaatgatttcgttaatagtcatttgaacaaacatatcacagtcttttgtcgttcctttgcaacactcgtttgctgcgggtggactcacgtgtgtggtgatatctctcctaaaccagaatttctggtctcttgcggcgtttctcttttgcgcattttgcatgttttcatccactttactaattggtattaagaagtttaactgataggaaagtatcacccgggttaatagtactacgaagcacactatagcggcgttttcgaaatctgtaatttgagcctcacacggtctaaattccactctccatccgatcgttgattgaggaggtggaggtttaaatctcatcgtctgccaattggtcgactgaatattttcaaaatggtccgaatcctcttcatcattttgatgaaccttttcagaaaacaacgatactgtatctctaataaataaatgcgctatatgtcctgctagcaacggatctattccattatcgatcaacttcttgtaatcctcctcgttatataagagaggtatatcgttatatttttcgccttgaggagataagtaagaatcgatggaatcatatcgggactttttaatgacgaatttgttctctttcaacggtttaagaccacgttcttcttccgttcgacagtccaccgatcccgcgattatgttccatcgacagtctatgtctgtaatgaatcctctatggaggggtgaggcagctgtaaacgccaacataatgggacacaaaggtgtaagttggtcgtataacgttctggcttctgtgatattacatgcttgaaacgtgagctgcaagcaacaacaacccataccaaaacccatagcgtccaaatagacatgatcttctaacgctgcgttgctgtgtttactggaatcatctaccggtatcttcgtatttatgtctttatatattggtaaattaatggcaactttttcaccacgtctcattctaatattcctgactaagttctcgaatctaggatgaccgggatagatagcttcatccgggaaaaatagagacctggtagctcctttgtcaggtgttgcttttgtagacggatccgtaaaattttcacaacctaatcttggaaaactagtaatgctcataatagtttcatttggctgaagcaactccatgacctcttgtctcctatgtttcatattggcctccacaatattaaaatgagccagcaaaccaccatagggatgtcctggagttccttcaatcatgtaagctccaaactctggtctccacaaagacttcacaccattaggatcatcttgttctttctggttaaggatggtaagcagctcatgacttcttaaactaacctttgcctctttcttgtcatcaaagaacttaactataatgtactccacttcatcaccccatttgagtatgtctccttcacgatctcttagtttcttgtagagattaataaactgtgttattccatgttcccggacgtgttgggcatgttttttggtctcctcccaggacaatggactaccttcagttagaagacccatagtctttttcagtcactatgaattaaacgtttacaactaccgaacacacctcctcgatcaacaccaatg

SEQ ID NO: 1581 - DNA, 3616 bp, Diabrotica virgifera
  SmartBlast Evalue=0; Info=Glutamate--cysteine ligase catalytic subunit n=2 Tax=Formicidae RepID=E2BWC4_9HYME
cttaaaaggcctgtttcggcaagccgtccccagattgacgatttgcttgtaataagaagctatggaatattagccgataggcaaccaattatacattccccgtatttatttgaatggcaagtcacggcagataccaatctgccgagcggtgatctgcaaacggcagcaaggcacgtacctagccacgtaccttgctggcgcgcccgggataaaattatgaaataggtaagtagttttacttcgtttaattattgttattgtatttttttaagttgttaggaattaccatttaggggacagattgaatcggagcattcgttaaatcaagttaattatagagaacaaataaaattgtttaacaaaacgatctggaattttctaatttactttctgactcgaagacatttagcgtcgtacctaaaacagcacagaatgaaagaatcaattagtagttacattttgatccttttcggtagaagtagacgaaactactgatagaggtaacatgtcattcacaattatcaattattgttcttcgatacgcgttacgtctaatatttatgagaggtttttaggttttcagacgtgagtagaagccataagacagaatatattgttggtgttttaaaagacagattaaaattttttgatatcaaaaataaattggtaaggcaaacttatgacggcgctgccttgatgtccggtgaattgtatggtctccaggcaaaagttaaaactattgcacccccactttatttactcactgtcataagtcatttacctctttgacgattcaaaatttaaaagttacgccaaagaattttcaaaatatctattagacaagttcattaaaaattatccatcattctttaatcaaataaaataagaaaattaaattttatatgctgatccaaatatttttggaaggtgggataagttacaaaatatgtattattttatatacgcaattcattaggtacaacaaactgggcaaaatgtgggcaaattctgcctcaaatgaacgggatttctcttgtctcaaacgagtcaaaacgtattgtcgaaacaccataaaacaatagagaatgtcaagcttgtctcagatgtcaatagaaaaaaacttttaaaatctctccaaaacaataataaattttacaatgacattataacccattttgctacttcgaaacaacatagactagagttaatttataaacaggtttaggttctaaattataggaaaaaaataaaaataaacaaaaaccaaaaatctcctatgaaattgaagccttttaattagatggcatacctatctgaggagacaaaaccttaccgaccctgtccataaagccacgagccgtcactgagttatatggaatgacaagagcagtgtttaaaagtgtatacagtatcaaatcaagatgaagcataaattatattgaatgaatagcatcatgaataggcttataccttttgtcaaataagaaaattaatgaaaatgtagattatacatatttatgtacatccagtcttcaattatatttaaactactgatcagattgtctgattctaatgagtcttaataaaacaaattttctttcagtgccaattcgctgttgtttgttttaagtactataataacattttaacaatcatttcttaaagccgttggtatattttctttagtttttgacatcgtgcttgttcctaaaagcaggggacagtattttttgccggattgaatttcctcgattgtcttgagtaagtcataatttattcgctctgatactacagaatcgtacctatattctgggtgttctgtaacaaactttcttatccatgaagctgttgtaaggatttcacctgatgctcgcctttgtataaacttcaaatactgttgaattgtgcagtgcgtatcggcgtcaacatccatgccgcttaagtagttgttaataagtggaataagaccgggaaattcttccccttttccattaatgatttcgttaatagtcatttgaacaaacatatcacagtcttttgtcgttcctttgcaacactcgtttgctgcgggtggactcacgtgtgtggtgatatctctcctaaaccagaatttctggtctcttgcggcgtttctcttttgcgcattttgcatgttttcatccactttactaattggtattaagaagtttaactgataggaaagtatcacccgggttaatagtactacgaagcacactatagcggcgttttcgaaatctgtaatttgagcctcacacggtctaaattccactctccatccgatcgttgattgaggaggtggaggtttaaatctcatcgtctgccaattggtcgactgaatattttcaaaatggtccgaatcctcttcatcattttgatgaaccttttcagaaaacaacgatactgtatctctaataaataaatgcgctatatgtcctgctagcaacggatctattccattatcgatcaacttcttgtaatcctcctcgttatataagagaggtatatcgttatatttttcgccttgaggagataagtaagaatcgatggaatcatatcgggactttttaatgacgaatttgttctctttcaacggtttaagaccacgttcttcttccgttcgacagtccaccgatcccgcgattatgttccatcgacagtctatgtctgtaatgaatcctctatggaggggtgaggcagctgtaaacgccaacataatgggacacaaaggtgtaagttggtcgtataacgttctggcttctgtgatattacatgcttgaaacgtgagctgcaagcaacaacaacccataccaaaacccatagcgtccaaatagacatgatcttctaacgctgcgttgctgtgtttactggaatcatctaccggtatcttcgtatttatgtctttatatattggtaaattaatggcaactttttcaccacgtctcattctaatattcctgactaagttctcgaatctaggatgaccgggatagatagcttcatccgggaaaaatagagacctggtagctcctttgtcaggtgttgcttttgtagacggatccgtaaaattttcacaacctaatcttggaaaactagtaatgctcataatagtttcatttggctgaagcaactccatgacctcttgtctcctatgtttcatattggcctccacaatattaaaatgagccagcaaaccaccatagggatgtcctggagttccttcaatcatgtaagctccaaactctggtctccacaaagacttcacaccattaggatcatcttgttctttctggttaaggatggtaagcagctcatgacttcttaaactaacctttgcctctttcttgtcatcaaagaacttaactataatgtactccacttcatcaccccatttgagtatgtctccttcacgatctcttagtttcttgtagagattaataaactgtgttattccatgttcccggacgtgttgggcatgttttttggtctcctcccaggacaatggactaccttcagttagaagacccatagtctttttcagtcactatgaattaaacgtttacaactaccgaacacacctcctcgatcaacaccaatg

SEQ ID NO: 1582 - DNA, 2758 bp, Diabrotica virgifera
  SmartBlast Evalue=0; Info=Glutamate--cysteine ligase catalytic subunit n=2 Tax=Formicidae RepID=E2BWC4_9HYME
tattgtacaaaattgtatatcgatgattcaaatattttcggaaggtgagataaggtataaaatatgtataattttatatactgtaattcattaggtacaacaaactgttcccgaaattaataaattattgttctcaaatgtgggcaaattctgattcaaatgaacgggatttctcttgtctcaaaagagtcaaaacgtattgtcgaaacaccataaaacaatagagaatgtcaagcttgtctcagatgtcaatagaaaaaaacttttaaaatctctccaaaacaataataaattttacaatgacattataacccattttgctacttcgaaacaacatagactagagttaatttataaacaggtttaggttctaaattataggaaaaaaataaaaataaacaaaaaccaaaaatctcctatgaaattgaagccttttaattagatggcatacctatctgaggagacaaaaccttaccgaccctgtccataaagccacgagccgtcactgagttatatggaatgacaagagcagtgtttaaaagtgtatacagtatcaaatcaagatgaagcataaattatattgaatgaatagcatcatgaataggcttataccttttgtcaaataagaaaattaatgaaaatgtagattatacatatttatgtacatccagtcttcaattatatttaaactactgatcagattgtctgattctaatgagtcttaataaaacaaattttctttcagtgccaattcgctgttgtttgttttaagtactataataacattttaacaatcatttcttaaagccgttggtatattttctttagtttttgacatcgtgcttgttcctaaaagcaggggacagtattttttgccggattgaatttcctcgattgtcttgagtaagtcataatttattcgctctgatactacagaatcgtacctatattctgggtgttctgtaacaaactttcttatccatgaagctgttgtaaggatttcacctgatgctcgcctttgtataaacttcaaatactgttgaattgtgcagtgcgtatcggcgtcaacatccatgccgcttaagtagttgttaataagtggaataagaccgggaaattcttccccttttccattaatgatttcgttaatagtcatttgaacaaacatatcacagtcttttgtcgttcctttgcaacactcgtttgctgcgggtggactcacgtgtgtggtgatatctctcctaaaccagaatttctggtctcttgcggcgtttctcttttgcgcattttgcatgttttcatccactttactaattggtattaagaagtttaactgataggaaagtatcacccgggttaatagtactacgaagcacactatagcggcgttttcgaaatctgtaatttgagcctcacacggtctaaattccactctccatccgatcgttgattgaggaggtggaggtttaaatctcatcgtctgccaattggtcgactgaatattttcaaaatggtccgaatcctcttcatcattttgatgaaccttttcagaaaacaacgatactgtatctctaataaataaatgcgctatatgtcctgctagcaacggatctattccattatcgatcaacttcttgtaatcctcctcgttatataagagaggtatatcgttatatttttcgccttgaggagataagtaagaatcgatggaatcatatcgggactttttaatgacgaatttgttctctttcaacggtttaagaccacgttcttcttccgttcgacagtccaccgatcccgcgattatgttccatcgacagtctatgtctgtaatgaatcctctatggaggggtgaggcagctgtaaacgccaacataatgggacacaaaggtgtaagttggtcgtataacgttctggcttctgtgatattacatgcttgaaacgtgagctgcaagcaacaacaacccataccaaaacccatagcgtccaaatagacatgatcttctaacgctgcgttgctgtgtttactggaatcatctaccggtatcttcgtatttatgtctttatatattggtaaattaatggcaactttttcaccacgtctcattctaatattcctgactaagttctcgaatctaggatgaccgggatagatagcttcatccgggaaaaatagagacctggtagctcctttgtcaggtgttgcttttgtagacggatccgtaaaattttcacaacctaatcttggaaaactagtaatgctcataatagtttcatttggctgaagcaactccatgacctcttgtctcctatgtttcatattggcctccacaatattaaaatgagccagcaaaccaccatagggatgtcctggagttccttcaatcatgtaagctccaaactctggtctccacaaagacttcacaccattaggatcatcttgttctttctggttaaggatggtaagcagctcatgacttcttaaactaacctttgcctctttcttgtcatcaaagaacttaactataatgtactccacttcatcaccccatttgagtatgtctccttcacgatctcttagtttcttgtagagattaataaactgtgttattccatgttcccggacgtgttgggcatgttttttggtctcctcccaggacaatggactaccttcagttagaagacccatagtctttttcagtcactatgaattaaacgtttacaactaccgaacacacctcctcgatcaacaccaatg

SEQ ID NO: 1583 - DNA, 2331 bp, Diabrotica virgifera
gccctgttgttgtaaaatactgcaacattctatttctataaatacatataaaaattcttctttaagtataacaaaactaaaaatgactaaacagtttacgtttaaaacaaagcgcatgttggcacctgaaaaaaatcttgttacataacaaacatgttaaattttattagaaacatctaaataagtcatttatatattagctaaaaactaagaacattattggaattaaggaactttttaaaatgctatttataagtaatacgttttatttgaagaatgatattttttgaagagcatcagtccagaagtagaaatttagtcgattgtctaaccagaccctagatggctaatattatccatatattgttcaataattgtatactatgaccacctgtggattgtttttgttgcacaaaaaaatttctattattattattacggatactgataaatattaatatctattgggatgtatccttcagttatatcagtggcggcttgtcagggtcggcagtgccgacccacacatttatggacacattatagtttttttaaatatttaatttaatcagagttgatgatattcgtttctgggaaataaaaaaatatctgagataatacagactaaattttattcattgtttttaaaagaattcgatcgatccgatacgttatgtgatccctgtgcgctgtgcgtaagagacttttcaaattattgatcctatagccatgcacccgattgcgataggcccgcttcggcaagccgtccccagattgacgatttgcttgtaataagaagctatggaatattagccgataggcaaccaattatacatttccccgtattcatttgaatgacaagtccggcagataccaatctgccgatcggtgatctgcaaacagcagcaaggaacgtacctagccacgtaccttgctagcgcgcccaggatgaaactatgaaataagtagttttacgtcgtttaattattgatattgcagttttttttaagttgccaggaattaccatttaggggacaggatgaatcggagcattcgttaaatcaagttaattatacagaaccaataaaattgtttaacaaatacgatctggaattttctaatttattttctgtctcgaagagatttagcgacgtaacaaaaacagcacagaatgaaagaatcaattagtagttacgttttgatccttttcggtataaatagacgaaactactgatagaggtaacatgtcattcacaattatcaattattgttcttcgatacgcgttacgtctaatatttatgagaggtttttaggttttcagacgtgagtagaagccataagacagaatatattgttggtgttttaaaagacagattaaaattttttgatatcaaaaataaattggtaaggcaaacttatgacggcgctgccttgatgtccggtgaattgtatggtctccaggcaaaagttaaaactattgcacccccactttatttactcactgtcataagtcatttacctctttgacgattcaaaatttaaaagttacgccaaagaattttcaaaatatctattagacaagttcattaaaaattatccatcattctttaatcaaataaaataagaaaattaaattttatatgctgatccaaatatttttggaaggtgggataagttacaaaatatgtattattttatatacgcaattcattaggtacaacaaactgggcaaaatgtgggcaaattctgcctcaaatgaacgggatttctcttgtctcaaacgagtcaaaacgtattgtcgaaacaccataaaacaatagagaatgtcaagcttgtctcagatgtcaatagaaaaaaacttttaaaatctctccaaaacaataataaattttacaatgacattataacccattttgctacttcgaaacaacatagactagagttaatttataaacaggtttaggttctaaattataggaaaaaaataaaaataaacaaaaaccaaaaatctcctatgaaattgaagccttttaattagatggcatacctatctgacgagacaaaaccttgccgaccctgtccctaaagccacgagccgccactgcctcctagcttttgggaaagaacaaaaaattaaatttgtattgtatatacatatatagacaaacgtatttttgtcaaaaaatacgtttggcccaccttaaaaatttttatatgggcgctttttgatggcagcagttacttccttgtattaaccctttcaactgcgttcaacgcgtacgcgcgtccaaatatgactagattagtgccattggacgcgtaagcgcgtc

SEQ ID NO: 1584 - DNA, 2017 bp, Diabrotica virgifera
gccctgttgttgtaaaatactgcaacattctatttctataaatacatataaaaattcttctttaagtataacaaaactaaaaatgactaaacagtttacgtttaaaacaaagcgcatgttggcacctgaaaaaaatcttgttacataacaaacatgttaaattttattagaaacatctaaataagtcatttatatattagctaaaaactaagaacattattggaattaaggaactttttaaaatgctatttataagtaatacgttttatttgaagaatgatattttttgaagagcatcagtccagaagtagaaatttagtcgattgtctaaccagaccctagatggctaatattatccatatattgttcaataattgtatactatgaccacctgtggattgtttttgttgcacaaaaaaatttctattattattattacggatactgataaatattaatatctattgggatgtatccttcagttatatcagtggcggcttgtcagggtcggcagtgccgacccacacatttatggacacattatagtttttttaaatatttaatttaatcagagttgatgatattcgtttctgggaaataaaaaaatatctgagataatacagactaaattttattcattgtttttaaaagaattcgatcgatccgatacgttatgtgatccctgtgcgctgtgcgtaagagacttttcaaattattgatcctatagccatgcacccgattgcgataggcccgcttcggcaagccgtccccagattgacgatttgcttgtaataagaagctatggaatattagccgataggcaaccaattatacatttccccgtattcatttgaatgacaagtccggcagataccaatctgccgatcggtgatctgcaaacagcagcaaggaacgtacctagccacgtaccttgctagcgcgcccaggatgaaactatgaaataagtagttttacgtcgtttaattattgatattgcagttttttttaagttgccaggaattaccatttaggggacaggatgaatcggagcattcgttaaatcaagttaattatacagaaccaataaaattgtttaacaaatacgatctggaattttctaatttattttctgtctcgaagagatttagcgacgtaacaaaaacagcacagaatgaaagaatcaattagtagttacgttttgatccttttcggtataaatagacgaaactactgatagaggtaacatgtcattcacaattatcaattattgttcttcgatacgcgttacgtctaatatttatgagaggtttttaggttttcagacgtgagtagaagccataagacagaatatattgttggtgttttaaaagacagattaaaattttttgatatcaaaaataaattggtaaggcaaacttatgacggcgctgccttgatgtccggtgaattgtatggtctccaggcaaaagttaaaactattgcacccccactttatttactcactgttataagtcattcacctctttgacgattcaaaatttaaaagttacgccaaagaattttcaaaatatctattagacaagttcattaaaattatccatcattctttaatcaaataaaataagaaaatggattaacaggtttatatgctgatccaaatattttcggaaggtgggataagttacaaaatatgtataattttatatactgcaattcattaggtacaacaaactgttcccgaaattaataaattattgtgctcaaatgtgggcaaattctgcctcaaatgaacgggatttctcttgtctcaaaagagtcaaaacgtattgtcgaaacaccatgaaacaagagagaatgtcaaacttgtctcaaatgtcaatagaaaaaaacttttaaagtcctctccaaaacaataataaattttacaatgacgttctaacccattttgctacttcgaaacaacatagactagagttaatttataaacaggtttaggttctcaatttataggaaaaac

SEQ ID NO: 1585 - DNA, 2007 bp, Diabrotica virgifera
gccctgttgttgtaaaatactgcaacattctatttctataaatacatataaaaattcttctttaagtataacaaaactaaaaatgactaaacagtttacgtttaaaacaaagcgcatgttggcacctgaaaaaaatcttgttacataacaaacatgttaaattttattagaaacatctaaataagtcatttatatattagctaaaaactaagaacattattggaattaaggaactttttaaaatgctatttataagtaatacgttttatttgaagaatgatattttttgaagagcatcagtccagaagtagaaatttagtcgattgtctaaccagaccctagatggctaatattatccatatattgttcaataattgtatactatgaccacctgtggattgtttttgttgcacaaaaaaatttctattattattattacggatactgataaatattaatatctattgggatgtatccttcagttatatcagtggcggcttgtcagggtcggcagtgccgacccacacatttatggacacattatagtttttttaaatatttaatttaatcagagttgatgatattcgtttctgggaaataaaaaaatatctgagataatacagactaaattttattcattgtttttaaaagaattcgatcgatccgatacgttatgtgatccctgtgcgctgtgcgtaagagacttttcaaattattgatcctatagccatgcacccgattgcgataggcccgcttcggcaagccgtccccagattgacgatttgcttgtaataagaagctatggaatattagccgataggcaaccaattatacatttccccgtattcatttgaatgacaagtccggcagataccaatctgccgatcggtgatctgcaaacagcagcaaggaacgtacctagccacgtaccttgctagcgcgcccaggatgaaactatgaaataagtagttttacgtcgtttaattattgatattgcagttttttttaagttgccaggaattaccatttaggggacaggatgaatcggagcattcgttaaatcaagttaattatacagaaccaataaaattgtttaacaaatacgatctggaattttctaatttattttctgtctcgaagagatttagcgacgtaacaaaaacagcacagaatgaaagaatcaattagtagttacgttttgatccttttcggtataaatagacgaaactactgatagaggtaacatgtcattcacaattatcaattattgttcttcgatacgcgttacgtctaatatttatgagaggtttttaggttttcagacgtgagtagaagccataagacagaatatattgttggtgttttaaaagacagattaaaattttttgatatcaaaaataaattggtaaggcaaatttatgaccggtgaattgtacggtctccgcaggtaaaagttaaaactattgcaccaggcaaaactattattttctcactgttataagtcattcacctctttgacgattcaaaatttaaaagttacgccaaagaattttcaaaatatctattagacaagttcattaaaattatccatcattctttaatcaaataaaataagaaaatggattaacaggtttatatgctgatccaaatattttcggaaggtgggataagttacaaaatatgtataattttatatactgcaattcattaggtacaacaaactgttcccgaaattaataaattattgtgctcaaatgtgggcaaattctgcctcaaatgaacgggatttctcttgtctcaaaagagtcaaaacgtattgtcgaaacaccatgaaacaagagagaatgtcaaacttgtctcaaatgtcaatagaaaaaaacttttaaagtcctctccaaaacaataataaattttacaatgacgttctaacccattttgctacttcgaaacaacatagactagagttaatttataaacaggtttaggttctcaatttataggaaaaac

SEQ ID NO: 1586 - DNA, 1969 bp, Diabrotica virgifera
gccctgttgttgtaaaatactgcaacattctatttctataaatacatataaaaattcttctttaagtataacaaaactaaaaatgactaaacagtttacgtttaaaacaaagcgcatgttggcacctgaaaaaaatcttgttacataacaaacatgttaaattttattagaaacatctaaataagtcatttatatattagctaaaaactaagaacattattggaattaaggaactttttaaaatgctatttataagtaatacgttttatttgaagaatgatattttttgaagagcatcagtccagaagtagaaatttagtcgattgtctaaccagaccctagatggctaatattatccatatattgttcaataattgtatactatgaccacctgtggattgtttttgttgcacaaaaaaatttctattattattattacggatactgataaatattaatatctattgggatgtatccttcagttatatcagtggcggcttgtcagggtcggcagtgccgacccacacatttatggacacattatagtttttttaaatatttaatttaatcagagttgatgatattcgtttctgggaaataaaaaaatatctgagataatacagactaaattttattcattgtttttaaaagaattcgatcgatccgatacgttatgtgatccctgtgcgctgtgcgtaagagacttttcaaattattgatcctatagccatgcacccgattgcgataggcccgcttcggcaagccgtccccagattgacgatttgcttgtaataagaagctatggaatattagccgataggcaaccaattatacatttccccgtattcatttgaatgacaagtccggcagataccaatctgccgatcggtgatctgcaaacagcagcaaggaacgtacctagccacgtaccttgctagcgcgcccaggatgaaactatgaaataagtagttttacgtcgtttaattattgatattgcagttttttttaagttgccaggaattaccatttaggggacaggatgaatcggagcattcgttaaatcaagttaattatacagaaccaataaaattgtttaacaaatacgatctggaattttctaatttattttctgtctcgaagagatttagcgacgtaacaaaaacagcacagaatgaaagaatcaattagtagttacgttttgatccttttcggtataaatagacgaaactactgatagaggtaacatgtcattcacaattatcaattattgttcttcgatacgcgttacgtctaatatttatgagaggtttttaggttttcagacgtgagtagaagccataagacagaatatattgttggtgttttaaaagacagattaaaattttttgatatcaaaaataaattggtaaggcaaacttatgacggcgctgccttgatgtccggtgaattgtatggtctccaggcaaaagttaaaactattgcacccccactttatttactcactgttataagtcattcacctctttgacgattcaaaatttaaaagttacgccaaagaattttcaaaatatctattagacaagttcattaaaattatccatcattctttaatcaaataaaataagaaaatggattaacaggtttatatgctgatccaaatattttcggaaggtgggataagttacaaaatatgtataattttatatactgcaattcattaggtacaacaaactgttcccgaaattaataaattattgtgctcaaatgtgggcaaattctgcctcaaatgaacgggatttctcttgtctcaaaagagtcaaaacgtattgtcgaaacaccatgaaacaagagagaatgtcaagcttgtctccaatgtcaatagaaaaaacttttaaaatctctccaaaacaataataaattttacaattacgttatagttataaaacccatttccctacttcgaaacaac

SEQ ID NO: 1587 - DNA, 1959 bp, Diabrotica virgifera
gccctgttgttgtaaaatactgcaacattctatttctataaatacatataaaaattcttctttaagtataacaaaactaaaaatgactaaacagtttacgtttaaaacaaagcgcatgttggcacctgaaaaaaatcttgttacataacaaacatgttaaattttattagaaacatctaaataagtcatttatatattagctaaaaactaagaacattattggaattaaggaactttttaaaatgctatttataagtaatacgttttatttgaagaatgatattttttgaagagcatcagtccagaagtagaaatttagtcgattgtctaaccagaccctagatggctaatattatccatatattgttcaataattgtatactatgaccacctgtggattgtttttgttgcacaaaaaaatttctattattattattacggatactgataaatattaatatctattgggatgtatccttcagttatatcagtggcggcttgtcagggtcggcagtgccgacccacacatttatggacacattatagtttttttaaatatttaatttaatcagagttgatgatattcgtttctgggaaataaaaaaatatctgagataatacagactaaattttattcattgtttttaaaagaattcgatcgatccgatacgttatgtgatccctgtgcgctgtgcgtaagagacttttcaaattattgatcctatagccatgcacccgattgcgataggcccgcttcggcaagccgtccccagattgacgatttgcttgtaataagaagctatggaatattagccgataggcaaccaattatacatttccccgtattcatttgaatgacaagtccggcagataccaatctgccgatcggtgatctgcaaacagcagcaaggaacgtacctagccacgtaccttgctagcgcgcccaggatgaaactatgaaataagtagttttacgtcgtttaattattgatattgcagttttttttaagttgccaggaattaccatttaggggacaggatgaatcggagcattcgttaaatcaagttaattatacagaaccaataaaattgtttaacaaatacgatctggaattttctaatttattttctgtctcgaagagatttagcgacgtaacaaaaacagcacagaatgaaagaatcaattagtagttacgttttgatccttttcggtataaatagacgaaactactgatagaggtaacatgtcattcacaattatcaattattgttcttcgatacgcgttacgtctaatatttatgagaggtttttaggttttcagacgtgagtagaagccataagacagaatatattgttggtgttttaaaagacagattaaaattttttgatatcaaaaataaattggtaaggcaaatttatgaccggtgaattgtacggtctccgcaggtaaaagttaaaactattgcaccaggcaaaactattattttctcactgttataagtcattcacctctttgacgattcaaaatttaaaagttacgccaaagaattttcaaaatatctattagacaagttcattaaaattatccatcattctttaatcaaataaaataagaaaatggattaacaggtttatatgctgatccaaatattttcggaaggtgggataagttacaaaatatgtataattttatatactgcaattcattaggtacaacaaactgttcccgaaattaataaattattgtgctcaaatgtgggcaaattctgcctcaaatgaacgggatttctcttgtctcaaaagagtcaaaacgtattgtcgaaacaccatgaaacaagagagaatgtcaagcttgtctccaatgtcaatagaaaaaacttttaaaatctctccaaaacaataataaattttacaattacgttatagttataaaacccatttccctacttcgaaacaac

SEQ ID NO: 1588 - DNA, 1592 bp, Diabrotica virgifera
cttaaaaggcctgtttcggcaagccgtccccagattgacgatttgcttgtaataagaagctatggaatattagccgataggcaaccaattatacattccccgtatttatttgaatggcaagtcacggcagataccaatctgccgagcggtgatctgcaaacggcagcaaggcacgtacctagccacgtaccttgctggcgcgcccgggataaaattatgaaataggtaagtagttttacttcgtttaattattgttattgtatttttttaagttgttaggaattaccatttaggggacagattgaatcggagcattcgttaaatcaagttaattatagagaacaaataaaattgtttaacaaaacgatctggaattttctaatttactttctgactcgaagacatttagcgtcgtacctaaaacagcacagaatgaaagaatcaattagtagttacattttgatccttttcggtagaagtagacgaaactactgatagaggtaacatgtcattcacaattatcaattattgttcttcgatacgcgttacgtctaatatttatgagaggtttttaggttttcagacgtgagtagaagccataagacagaatatattgttggtgttttaaaagacagattaaaattttttgatatcaaaaataaattggtaaggcaaacttatgacggcgctgccttgatgtccggtgaattgtatggtctccaggcaaaagttaaaactattgcacccccactttatttactcactgtcataagtcatttacctctttgacgattcaaaatttaaaagttacgccaaagaattttcaaaatatctattagacaagttcattaaaaattatccatcattctttaatcaaataaaataagaaaattaaattttatatgctgatccaaatatttttggaaggtgggataagttacaaaatatgtattattttatatacgcaattcattaggtacaacaaactgggcaaaatgtgggcaaattctgcctcaaatgaacgggatttctcttgtctcaaacgagtcaaaacgtattgtcgaaacaccataaaacaatagagaatgtcaagcttgtctcagatgtcaatagaaaaaaacttttaaaatctctccaaaacaataataaattttacaatgacattataacccattttgctacttcgaaacaacatagactagagttaatttataaacaggtttaggttctaaattataggaaaaaaataaaaataaacaaaaaccaaaaatctcctatgaaattgaagccttttaattagatggcatacctatctgacgagacaaaaccttgccgaccctgtccctaaagccacgagccgccactgcctcctagcttttgggaaagaacaaaaaattaaatttgtattgtatatacatatatagacaaacgtatttttgtcaaaaaatacgtttggcccaccttaaaaatttttatatgggcgctttttgatggcagcagttacttccttgtattaaccctttcaactgcgttcaacgcgtacgcgcgtccaaatatgactagattagtgccattggacgcgtaagcgcgtc

SEQ ID NO: 1589 - DNA, 2644 bp, Diabrotica virgifera
  SmartBlast Evalue=3E-11; Info=Endonuclease-reverse transcriptase n=1 Tax=Bombyx mori RepID=D7F170_BOMMO
cttttctatgttaatgagaaattttctataatctataactccaaaataaaattattattatacactaatggggtactattttttctacctacctgtttatcttcgagccgacctgggctgttttttaaatgtaggtacctgaggtatcataaaggactaaagaattacagtgagccgagatggtaataccccacagtcccattcaagacattggaaaaatttcactgttttcattctgattttagtaaatacattatgtgttttggtttgagtgtatctaaatgaaataaattgtagaaacataaataagacccttgactttaaagatcacgtaatcataaaatcttgctttcttccatatatttcggtctaaaagtgtccaccgaaatacaaagatgagaatctataaaaccaatattcgtccaacagctacagcagtgaagcctgggtcctgaaagaaacatccaaaaacaaactcgacacattcgaaaggaaagtactgaggagaatactaggacctgtgagggaaaacggaatcttcagaagtcgatacaacaacgaacttgatcaactttataaggaagcaaccctgtcagacttcattagaatacaaagattgcaataggccggataagaatgggagaggataggctaccagaaagagcactgaatgctagaatgcagggaaagagaccggttggaaagacaagaaagcgctgagaaaacacagtaagcagcgacgcacaagcccttttaggagtccgtgtatagagaaaagcagccacagacaaacaagggtggaggcaaaaaatgaaggaggtcaaagctcaatttgggccgtagaagaaaaagaagaatcataaaaccttaatttatatgcaaattgcgcaagatacatacatattggtggtacgtttggccgaacttacagaaatgacatattataaccataaccttttcctctacatttattatttttctgtatattgaaacattctgtagctatacagtgatgagccagagctgggttaatactcgggtacaagtacccgaattttgtattctaagtacattttgggtactcagtacccagtaccggagtacattttcaattaagtactcggtactcgtacctgtagcgtatgggtaaaatacccggtatccgcgtttattgtacgagtactttttgcaagtcaacttgtcgctgcatgtagaacagcaaattaatagcaacacgcaaaacgccgttttcagtatcagtccatttgcaaaatcaagcaaacgcccattttcttatgccataatagttattaggcctcgaagttattaagcccttaaaattagttatcttaaaagccaataaaattaatcagtgagtgtgagtggtgttatactgattacagtaaaacctgcgttaccggccacctgtacttacggctcgtttcaaaattccccaaaccaattattatgtatattcccttatttatgacctggtatttacgaccacctttataacacaaacgcagccaaataatcacatatttttaaagcccattttatagaaattgaatgtgaatgtcggccgaaataattttgttaaaatcattttgtctatttgttgatcgaaattcccagtactatttattaggacctattgtatctacctaaacaggagattaaataacctgcatcgggtcggtggtcacaaggttcttaaaatcctataataaaatgtcgtaaaagcgttgtaaaagagaaacgtttgtcactatataaatatgatttaaattcacaaaaagttggccgaaaaatatggtgtaaaaactcaaattatcaaaggatataaaaaataaaagtgagtaaaacataaatcggttttttccatagtatagtatgtacctacctagttttgttttatattaggatattaagtagttttagtagtttccgtttatgtatagaattatatttgcttttattaacaaaataaacaaagttccaattatcttttatgtatttgtggactacaaaaactggaaataccggccacctttctatatcggcccatagttccttcatttttagtggccgttactgacaggttttactgtattaatcaatgatcaatttttaaaattcttatttttttatttaagttggaattgtacgttattttatgttttcatgactcataaataaatatgtttagagaggcagagataattattaccttcttaccttcttttcgggttctatattcaaatgtactcgaaataagtacccgagaaattcgggtaattgtactttgagtattgtactctgagtactttttttgagcaatgtactcggtactctgtactcgttcctcaaatatgaaaagtacccggtactctgtacccgagtacagtttatcagtacccggcccagctctgatgccaagtagtgccaaggtgtatttaatgctgctggaagaaaactcagattattaaacacatttgttgttagatttttgttttacgttgacttacaaaaaaatttcattaaattagtgcagttcttaacttttatttgattatttcatcatagcgaaatcatattacactgaaagtaagatgaattcattgttgactaatcaggtattata

SEQ ID NO: 1590 - DNA, 2532 bp, Diabrotica virgifera
  SmartBlast Evalue=5E-24; Info=Endonuclease-reverse transcriptase n=1 Tax=Bombyx mori RepID=D7F170_BOMMO
attgaaacggttggaaagtttacatacttgggatttaaaaaatatatgccgacggatcagaagacggagaaatacggaagagaataacgcaggcaaacagagcttattttgccctctcccatatatttcggtctaaaagtgtccaccgaaatacaaagatgagaatctataaaactttaattcgaccaataacatgctatggcagtgaagcctgggtcctgaaagaaacatccaaaaacaaactcgacacattcgaaaggaaagtactgaggagaatactaggacctgtgagggaaaacggaatcttcagaagtcgatacaacaacgaacttgatcaactttataaggaagcaaccctgtcagacttcattagaatacaaagattgcaataggccggataagaatgggagaggataggctaccagaaagagcactgaatgctagaatgcagggaaagagaccggttggaaagacaagaaagcgctgagaaaacacagtaagcagcgacgcacaagcccttttaggagtccgtgtatagagaaaagcagccacagacaaacaagggtggaggcaaaaaatgaaggaggtcaaagctcaatttgggccgtagaagaaaaagaagaatcataaaaccttaatttatatgcaaattgcgcaagatacatacatattggtggtacgtttggccgaacttacagaaatgacatattataaccataaccttttcctctacatttattatttttctgtatattgaaacattctgtagctatacagtgatgagccagagctgggttaatactcgggtacaagtacccgaattttgtattctaagtacattttgggtactcagtacccagtaccggagtacattttcaattaagtactcggtactcgtacctgtagcgtatgggtaaaatacccggtatccgcgtttattgtacgagtactttttgcaagtcaacttgtcgctgcatgtagaacagcaaattaatagcaacacgcaaaacgccgttttcagtatcagtccatttgcaaaatcaagcaaacgcccattttcttatgccataatagttattaggcctcgaagttattaagcccttaaaattagttatcttaaaagccaataaaattaatcagtgagtgtgagtggtgttatactgattacagtaaaacctgcgttaccggccacctgtacttacggctcgtttcaaaattccccaaaccaattattatgtatattcccttatttatgacctggtatttacgaccacctttataacacaaacgcagccaaataatcacatatttttaaagcccattttatagaaattgaatgtgaatgtcggccgaaataattttgttaaaatcattttgtctatttgttgatcgaaattcccagtactatttattaggacctattgtatctacctaaacaggagattaaataacctgcatcgggtcggtggtcacaaggttcttaaaatcctataataaaatgtcgtaaaagcgttgtaaaagagaaacgtttgtcactatataaatatgatttaaattcacaaaaagttggccgaaaaatatggtgtaaaaactcaaattatcaaaggatataaaaaataaaagggaattgaaaaattctttaaaaaagcttaacatcaatctgttttttccgtagtatacagtatatacctacctagatttgttttatattatgatattaaagtagctttagtagtttccgtttatgtatagaattatatttgcttttattaacaaaataaacaaagttccaattatcttttatgtatttgtggactacaaaaactggaaataccggccacctttctatatcggccaatagttccttcatttttagtggccgttactgacaggttttactgtatttattgcagttatatttacaaaaatataattgctcatactgaatgaaagtctacatacagctccacctttataacttttatattatgtaaagtttgtgcaattaattttaataacacatagcgcacatttcttaatacaatccattaataaccaattgatataacaaaaagaattttttagtggtttaatttatttaaatttggatttatatattcaacctcaaccttaaaattcaagtttattttgacagtaaactgtgtacagcgttatgaaaggagcgcatcctgaatattttaaattttcaattaagttcattgtaggtactaaaatctactaaaaaattctagctggtgctgaataccgtatttctatcaaatttgtcatttattttccctgtataactgtagactttataccagcatttcccaaccggtggatcgcgacccactagtgttccttatgctatcatcatggatgagggatgggtcgcgaacatcagaaagtggcttggaaccactgctttatactattggcataccttgtgtatatttatctctttctattatataccattaatatactagaatcacccaatatattagatgtatttagttttatcatagggct

SEQ ID NO: 1591 - DNA, 2536 bp, Diabrotica virgifera
gatatgtaatatcattaatatgtaatgtcaatgaaataattaggacatggatattagcggtggacatattttataaagttataatgtacatttatatttaactgtggtataatatatttaacataatataactttataaaataatatataatagtctcccgttttataccgctcacgtggttttgggagtatagcagggtagtctgctatatctagggtctacggtatacaaggaaggtaacagggccagtgctacgcttcaaccgcctataattacccctggttttacccaaggtactcattttattcaggttgagtcgacctggggcctataaacattttaaaaatgtagttgttcttgccggcggtagcatttgaactccggaagcacactgccgcttagctactccccaggcaaccaaataacgtttacaaaacgttgaaaaaacgtcataattatcaccaaatgacgtcagtttatcacgttttttcaacgtcgaaaatcacgtgaatatgtcccaccataattcacgtcatttttatcacgttttaaatacatatgaaaaacgtagtttttacgtcgatttgtcccaccataattcacgtaatttttatcacgttttaaatacgtgatatgaaaaacgtagttttcttagaagcaatcttagaaggctaaaaattaatttaattaaactcaatatcatttgtatcattgttatataagaataacttatgacgtagatatattaatattatgtgacacatgactgaagctcgaaacaaatgactgtgaatgaaaagccctataacagacgccctatggtttgtgtcaaacatgttatgttttttccatactagaggtccagtcattggactgacctaaagtcaattttttacttcgagccccaaagttgcttattgttagaatgtttataagtaatatattgctaaataaaagtttcaaaaaaaattactcatactttaaacgatacaaatacataggcatatttttgttattggtatacgttgatagtaattaacacaataaatacacacttaaaagactaatagataaatactcatgatgaagaagtacattataattaaaaatgaatatccattttcatatcgccccaacacgaagccaaagccgtcttatatttcagtttgtttagagagcgcaacaagcactctgaccgaacagtttcaaaactcattagtttttcatcagagaatgcatatgttgctatctccaaaccatgtacatagctgtaacgtctgtacatgcattgggttcttcttctctcttgctgtggacacactcagctgcacgccggccctaactttataaaataaactcagtataagttgtaaattccaataaacacaacaaatgcgctaatgtcactgtaactaaaaattataaacgtcaaaatttatagtaaacaaggtatcaaagacgtattgtttatccttgtttaacttattgtggtttctatggacaagctgtttaattttgcggtactagtttctgtgcgtaaaaaaagatacgtagtataaaaagtaattcgtgaataatttcatgcatgtgcaaagatataatggaaggactataataatattgtgatggtataaaaattattaggatcatcattaatatattagtacacagtcacagtatagtaggtgtacttaatggtactgtacacacataatatacagaatcttcaccttaagcatctttagatagtaatttatttatacctacggtcaaatatattagttttgcatgtaaaatgttaataaaaataatttatttactgttaattatttaatattttatatacctagttggacgtttaatatacagggtatgccacgttcaactgaacagagcctactgtgtcaatagctaaccttattaggatcaattcatataaaggtactataccttgtttttaatccaggaggagtaaactaaaaagacagatccacacccaataatttcactacaaaaattatcaaatacatcttctttttggttgatcatgtcggcattcgacggtaatcatatcgttatactaaatacgtcgctaaaaagttctaaaaacaactgttttttatataaaagcagacaaagaatctaaaaattacataaaaatttcataacactggagtaaacttgtctgcggttggatcaattacaaacaagcattacctcgcggtgaatttgaattactccttctggtttaaagacagagcatagctagagccaattcaggcgcttatgcactgggttgcatgagcccaaaattcagaagatgttatgaaataatcagataccgtatgcgagaataatttacgccattgtaatacacataacaatactatcaatgtatacgtacgtcatacagtattgtcatacagtaaaacctgtgttgccggccacctgccaaaatctgccacctgtacttacgacttacggtttcaaaattccccaaaccaattatatgtatattcccttatttatgacctg

SEQ ID NO: 1592 - DNA, 2411 bp, Diabrotica virgifera
  SmartBlast Evalue=5E-24; Info=Endonuclease-reverse transcriptase n=1 Tax=Bombyx mori RepID=D7F170_BOMMO
attgaaacggttggaaagtttacatacttgggatttaaaaaatatatgccgacggatcagaagacggagaaatacggaagagaataacgcaggcaaacagagcttattttgccctctcccatatatttcggtctaaaagtgtccaccgaaatacaaagatgagaatctataaaactttaattcgaccaataacatgctatggcagtgaagcctgggtcctgaaagaaacatccaaaaacaaactcgacacattcgaaaggaaagtactgaggagaatactaggacctgtgagggaaaacggaatcttcagaagtcgatacaacaacgaacttgatcaactttataaggaagcaaccctgtcagacttcattagaatacaaagattgcaataggccggataagaatgggagaggataggctaccagaaagagcactgaatgctagaatgcagggaaagagaccggttggaaagacaagaaagcgctgagaaaacacagtaagcagcgacgcacaagcccttttaggagtccgtgtatagagaaaagcagccacagacaaacaagggtggaggcaaaaaatgaaggaggtcaaagctcaatttgggccgtagaagaaaaagaagaatcataaaaccttaatttatatgcaaattgcgcaagatacatacatattggtggtacgtttggccgaacttacagaaatgacatattataaccataaccttttcctctacatttattatttttctgtatattgaaacattctgtagctatacagtgatgagccagagctgggttaatactcgggtacaagtacccgaattttgtattctaagtacattttgggtactcagtacccagtaccggagtacattttcaattaagtactcggtactcgtacctgtagcgtatgggtaaaatacccggtatccgcgtttattgtacgagtactttttgcaagtcaacttgtcgctgcatgtagaacagcaaattaatagcaacacgcaaaacgccgttttcagtatcagtccatttgcaaaatcaagcaaacgcccattttcttatgccataatagttattaggcctcgaagttattaagcccttaaaattagttatcttaaaagccaataaaattaatcagtgagtgtgagtggtgttatactgattacagtaaaacctgcgttaccggccacctgtacttacggctcgtttcaaaattccccaaaccaattattatgtatattcccttatttatgacctggtatttacgaccacctttataacacaaacgcagccaaataatcacatatttttaaagcccattttatagaaattgaatgtgaatgtcggccgaaataattttgttaaaatcattttgtctatttgttgatcgaaattcccagtactatttattaggacctattgtatctacctaaacaggagattaaataacctgcatcgggtcggtggtcacaaggttcttaaaatcctataataaaatgtcgtaaaagcgttgtaaaagagaaacgtttgtcactatataaatatgatttaaattcacaaaaagttggccgaaaaatatggtgtaaaaactcaaattatcaaaggatataaaaaataaaagtgagtaaaacataaatcggttttttccatagtatagtatgtacctacctagttttgttttatattaggatattaagtagttttagtagtttccgtttatgtatagaattatatttgcttttattaacaaaataaacaaagttccaattatcttttatgtatttgtggactacaaaaactggaaataccggccacctttctatatcggcccatagttccttcatttttagtggccgttactgacaggttttactgtattaatcaatgatcaatttttaaaattcttatttttttatttaagttggaattgtacgttattttatgttttcatgactcataaataaatatgtttagagaggcagagataattattaccttcttaccttcttttcgggttctatattcaaatgtactcgaaataagtacccgagaaattcgggtaattgtactttgagtattgtactctgagtactttttttgagcaatgtactcggtactctgtactcgttcctcaaatatgaaaagtacccggtactctgtacccgagtacagtttatcagtacccggcccagctctgatgccaagtagtgccaaggtgtatttaatgctgctggaagaaaactcagattattaaacacatttgttgttagatttttgttttacgttgacttacaaaaaaatttcattaaattagtgcagttcttaacttttatttgattatttcatcatagcgaaatcatattacactgaaagtaagatgaattcattgttgactaatcaggtattata

SEQ ID NO: 1593 - DNA, 5929 bp, Diabrotica virgifera
gatatgtaatatcattaatatgtaatgtcaatgaaataattaggacatggatattagcggtggacatattttataaagttataatgtacatttatatttaactgtggtataatatatttaacataatataactttataaaataatatataatagtctcccgttttataccgctcacgtggttttgggagtatagcagggtagtctgctatatctagggtctacggtatacaaggaaggtaacagggccagtgctacgcttcaaccgcctataattacccctggttttacccaaggtactcattttattcaggttgagtcgacctggggcctataaacattttaaaaatgtagttgttcttgccggcggtagcatttgaactccggaagcacactgccgcttagctactccccaggcaaccaaataacgtttacaaaacgttgaaaaaacgtcataattatcaccaaatgacgtcagtttatcacgttttttcaacgtcgaaaatcacgtgaatatgtcccaccataattcacgtcatttttatcacgttttaaatacatatgaaaaacgtagtttttacgtcgatttgtcccaccataattcacgtaatttttatcacgttttaaatacgtgatatgaaaaacgtagttttcttagaagcaatcttagaaggctaaaaattaatttaattaaactcaatatcatttgtatcattgttatataagaataacttatgacgtagatatattaatattatgtgacacatgactgaagctcgaaacaaatgactgtgaatgaaaagccctataacagacgccctatggtttgtgtcaaacatgttatgttttttccatactagaggtccagtcattggactgacctaaagtcaattttttacttcgagccccaaagttgcttattgttagaatgtttataagtaatatattgctaaataaaagtttcaaaaaaaattactcatactttaaacgatacaaatacataggcatatttttgttattggtatacgttgatagtaattaacacaataaatacacacttaaaagactaatagataaatactcatgatgaagaagtacattataattaaaaatgaatatccattttcatatcgccccaacacgaagccaaagccgtcttatatttcagtttgtttagagagcgcaacaagcactctgaccgaacagtttcaaaactcattagtttttcatcagagaatgcatatgttgctatctccaaaccatgtacatagctgtaacgtctgtacatgcattgggttcttcttctctcttgctgtggacacactcagctgcacgccggccctaactttataaaataaactcagtataagttgtaaattccaataaacacaacaaatgcgctaatgtcactgtaactaaaaattataaacgtcaaaatttatagtaaacaaggtatcaaagacgtattgtttatccttgtttaacttattgtggtttctatggacaagctgtttaattttgcggtactagtttctgtgcgtaaaaaaagatacgtagtataaaaagtaattcgtgaataatttcatgcatgtgcaaagatataatggaaggactataataatattgtgatggtataaaaattattaggatcatcattaatatattagtacacagtcacagtatagtaggtgtacttaatggtactgtacacacataatatacagaatcttcaccttaagcatctttagatagtaatttatttatacctacggtcaaatatattagttttgcatgtaaaatgttaataaaaataatttatttactgttaattatttaatattttatatacctagttggacgtttaatatacagggtatgccacgttcaactgaacagagcctactgtgtcaatagctaaccttattaggatcaattcatataaaggtactataccttgtttttaatccaggaggagtaaactaaaaagacagatccacacccaataatttcactacaaaaattatcaaatacatcttctttttggttgatcatgtcggcattcgacggtaatcatatcgttatactaaatacgtcgctaaaaagttctaaaaacaactgttttttatataaaagcagacaaagaatctaaaaattacataaaaatttcataacactggagtaaacttgtctgcggttggatcaattacaaacaagcattacctcgcggtgaatttgaattactccttctggtttaaagacagagcatagctagagccaattcaggcgcttatgcactgggttgcatgagcccaaaattcagaagatgttatgaaataatcagataccgtatgcgagaataatttacgccattgtaatacagtaaaacctgtgttgccggccacctgccaaaatctgccacctgtacttacgacttacggtttcaaaattccccaaaccaattattatgtatattcccttatttatgacctggtatttacgaccacctttataacacaaacgcagccaaataatcacatatttttaaagcccattttatagaaattgaatgtgaatgtcggccgaaataattttgttaaaatcattttgtctatttgttgatcgaaattcccagtactatttattaggacctattgtatctacctaaacaggagattaaataacctgcatcgggtcggtggtcacaaggttcttaaaatcctataataaaatgtcgtaaaagcgttgtaaaagagaaacgtttgtcactatataaatatgatttaaattcacaaaaagttggccgaaaaatatggtgtaaaaactcaaattatcaaaggatataaaaaataaaagtgagtaaaacataaatcggttttttccatagtatagtatgtacctacctagttttgttttatattaggatattaagtagttttagtagtttccgtttatgtatagaattatatttgcttttattaacaaaataaacaaagttccaattatcttttatgtatttgtggactacaaaaactggaaataccggccacctttctatatcggcccatagttccttcatttttagtggccgttactgacaggttttactgtattaatcaatgatcaatttttaaaattcttatttttttatttaagttggaattgtacgttattttatgttttcatgactcataaataaatatgtttagagaggcagagataattattaccttcttaccttcttttcgggttctatattcaaatgtactcgaaataagtacccgagaaattcgggtaattgtactttgagtactttttttgagcaatatactcggtactctatactcgtttctcaaatatgaaaagtacccagtactctgtacccaagtacaatttatcagtaaccggtctagctctggtaccacgcttattcgattctagttattacacgatattttatggattttggattccaaaccacggatggattattataaaatatcatgtaataacttttttctagatgcaactctgcatgtactgaattattaccctgataactattctactgtacatacgtgtaagttttctgggtgtaaacaaacctcttcttacgtgacgcataattagagataaccatttactcatctaggatagcatatgtctacttaaaatcatggctttggtcttgataccaataaactgaagtactttcccagtttttattctctgaagtactttcctagtttttattcccttaagtactactgtatccgctgtgagctttaccggaacgtaacgtttaccggaaatttgacataaatgtcaaagtgattaatgtaaaattaaaattaaaaactttaattataaaaaatattagttggtcaaagctgtggtatatatttttaccttaaatatacttacgttttaaatactgaatttaagtttttttaatgttccgtaatatgtaattataatttaatctaaaaatcttagcgccatctacacgataattgtgaaagtatccgaagtaagaaattcatattttatcaatagaacgtcaaaattattagcaaaatcttaaaaaaatcgattacaatttaattaattttttgcgttgtaaatgttaagcgataacaattaaataataaatttaaaaattaccggtgaaagataattccagtaatccgctaggagcgtcaccagcgaagctcagagcgtatatatatttaatacaatggtagattttaaaaaaaggttaaatacttggatatttttaacgaaaatggcgaaagtagaccgtatttttaattaaattgtggtttattcgcaccaaatttagtggcaagtggcgaattgcactctaccacttaggctttgttctcaaatttttttgttaactgtataatatcgttatcaaactgtcactaaagctttctaaaaacatacggatgtcagctgtcaaatcacgtggttatgcagtttcttaggaaatacactgttgcagtgtcttaagaatatttaggtcaaggaaaagttctacttaaaattagccaaaaatgttgtattatatatttccattatttttaaaattatgtgcgataagaatgggcattgtgattttttaactagattatattacacagattaaaagtattcaaaattatgtattaactatgtattaacattttgtgttagacacacaccacaaaagtaatagttcaatagaaccagctaatgttaaaatctggtaataataattcacactacctaattgctttcgatgtacacttaattaatgttaacaccgacaactaaactataacgaaaaagtgaagaaaagcccttaaattgatattttcttcagagaacttcaaaatgtcgttttttaatttgacgtttatttgacacttgaacttatttgtataataaattttatcaaaaatagtaaataaaaatattacattaacgtcaaatacgtcatattatgtgtatcatatgtttaacgtcaaattgtgttcgccaaaaatttcaggccactacgctaggtgtcgcgtcagtcatgcacggagtgaatatcggcagtctaatagcaacacgtgcctgggagttttggcaacactgatctgcataatccaaacattccgttcttgacgtgaaataaagtacatacaagcgtatttgttttccgctggataaactcagcgggtgcttgggcatgcgtagtacgcaataatgagtttataactcattattatttaatgttttaaagtttgaattaataatttcgattgatctaaaaaatagatttacagtggaataatggacgtacagtttggtactgaactagaatatttatttatagaagtatttatttaaatattgaggttagattcgtcgatacgtcaaacatgaaatgaaatgttagacaaatacgttcaggcggtttttctctgctggatttaagccgctggttacaaccactaagccgctttttgcttaaagtcagtcgctgaggtcgcctgaacgcacccaatgaacataaattttcttgtgagctttaatttagtcttattagtttgttaggaaataagcagtgctcagctcgtgtgctgatataatactgaaaatataatcgtagttaaatgatgtatagcaaatttcccattcttattgatgctttattctttgttagatttaaaagattccttggaacctaaatgtaaattctcggtcaatcattttgctacttattattaaatgaaatatctccaaagttactgtcaaatagtacaatagttatcttaatgaagtgttagtatttatttcatttgtaaagactactgtttattatatttcttatttttaatattgcgcattttattttattttattaaaaattgtagaataattttatatatacttcgataaaat

SEQ ID NO: 1594 - DNA, 4934 bp, Diabrotica virgifera
  SmartBlast Evalue=6E-11; Info=Endonuclease-reverse transcriptase n=1 Tax=Bombyx mori RepID=D7F170_BOMMO
cttttctatgttaatgagaaattttctataatctataactccaaaataaaattattattatacactaatggggtactattttttctacctacctgtttatcttcgagccgacctgggctgttttttaaatgtaggtacctgaggtatcataaaggactaaagaattacagtgagccgagatggtaataccccacagtcccattcaagacattggaaaaatttcactgttttcattctgattttagtaaatacattatgtgttttggtttgagtgtatctaaatgaaataaattgtagaaacataaataagacccttgactttaaagatcacgtaatcataaaatcttgctttcttccatatatttcggtctaaaagtgtccaccgaaatacaaagatgagaatctataaaaccaatattcgtccaacagctacagcagtgaagcctgggtcctgaaagaaacatccaaaaacaaactcgacacattcgaaaggaaagtactgaggagaatactaggacctgtgagggaaaacggaatcttcagaagtcgatacaacaacgaacttgatcaactttataaggaagcaaccctgtcagacttcattagaatacaaagattgcaataggccggataagaatgggagaggataggctaccagaaagagcactgaatgctagaatgcagggaaagagaccggttggaaagacaagaaagcgctgagaaaacacagtaagcagcgacgcacaagcccttttaggagtccgtgtatagagaaaagcagccacagacaaacaagggtggaggcaaaaaatgaaggaggtcaaagctcaatttgggccgtagaagaaaaagaagaatcataaaaccttaatttatatgcaaattgcgcaagatacatacatattggtggtacgtttggccgaacttacagaaatgacatattataaccataaccttttcctctacatttattatttttctgtatattgaaacattctgtagctatacagtgatgagccagagctgggttaatactcgggtacaagtacccgaattttgtattctaagtacattttgggtactcagtacccagtaccggagtacattttcaattaagtactcggtactcgtacctgtagcgtatgggtaaaatacccggtatccgcgtttattgtacgagtactttttgcaagtcaacttgtcgctgcatgtagaacagcaaattaatagcaacacgcaaaacgccgttttcagtatcagtccatttgcaaaatcaagcaaacgcccattttcttatgccataatagttattaggcctcgaagttattaagcccttaaaattagttatcttaaaagccaataaaattaatcagtgagtgtgagtggtgttatactgattacagtaaaacctgcgttaccggccacctgtacttacggctcgtttcaaaattccccaaaccaattattatgtatattcccttatttatgacctggtatttacgaccacctttataacacaaacgcagccaaataatcacatatttttaaagcccattttatagaaattgaatgtgaatgtcggccgaaataattttgttaaaatcattttgtctatttgttgatcgaaattcccagtactatttattaggacctattgtatctacctaaacaggagattaaataacctgcatcgggtcggtggtcacaaggttcttaaaatcctataataaaatgtcgtaaaagcgttgtaaaagagaaacgtttgtcactatataaatatgatttaaattcacaaaaagttggccgaaaaatatggtgtaaaaactcaaattatcaaaggatataaaaaataaaagtgagtaaaacataaatcggttttttccatagtatagtatgtacctacctagttttgttttatattaggatattaagtagttttagtagtttccgtttatgtatagaattatatttgcttttattaacaaaataaacaaagttccaattatcttttatgtatttgtggactacaaaaactggaaataccggccacctttctatatcggcccatagttccttcatttttagtggccgttactgacaggttttactgtattaatcaatgatcaatttttaaaattcttatttttttatttaagttggaattgtacgttattttatgttttcatgactcataaataaatatgtttagagaggcagagataattattaccttcttaccttcttttcgggttctatattcaaatgtactcgaaataagtacccgagaaattcgggtaattgtactttgagtactttttttgagcaatatactcggtactctatactcgtttctcaaatatgaaaagtacccagtactctgtacccaagtacaatttatcagtaaccggtctagctctggtaccacgcttattcgattctagttattacacgatattttatggattttggattccaaaccacggatggattattataaaatatcatgtaataacttttttctagatgcaactctgcatgtactgaattattaccctgataactattctactgtacatacgtgtaagttttctgggtgtaaacaaacctcttcttacgtgacgcataattagagataaccatttactcatctaggatagcatatgtctacttaaaatcatggctttggtcttgataccaataaactgaagtactttcccagtttttattctctgaagtactttcctagtttttattcccttaagtactactgtatccgctgtgagctttaccggaacgtaacgtttaccggaaatttgacataaatgtcaaagtgattaatgtaaaattaaaattaaaaactttaattataaaaaatattagttggtcaaagctgtggtatatatttttaccttaaatatacttacgttttaaatactgaatttaagtttttttaatgttccgtaatatgtaattataatttaatctaaaaatcttagcgccatctacacgataattgtgaaagtatccgaagtaagaaattcatattttatcaatagaacgtcaaaattattagcaaaatcttaaaaaaatcgattacaatttaattaattttttgcgttgtaaatgttaagcgataacaattaaataataaatttaaaaattaccggtgaaagataattccagtaatccgctaggagcgtcaccagcgaagctcagagcgtatatatatttaatacaatggtagattttaaaaaaaggttaaatacttggatatttttaacgaaaatggcgaaagtagaccgtatttttaattaaattgtggtttattcgcaccaaatttagtggcaagtggcgaattgcactctaccacttaggctttgttctcaaatttttttgttaactgtataatatcgttatcaaactgtcactaaagctttctaaaaacatacggatgtcagctgtcaaatcacgtggttatgcagtttcttaggaaatacactgttgcagtgtcttaagaatatttaggtcaaggaaaagttctacttaaaattagccaaaaatgttgtattatatatttccattatttttaaaattatgtgcgataagaatgggcattgtgattttttaactagattatattacacagattaaaagtattcaaaattatgtattaactatgtattaacattttgtgttagacacacaccacaaaagtaatagttcaatagaaccagctaatgttaaaatctggtaataataattcacactacctaattgctttcgatgtacacttaattaatgttaacaccgacaactaaactataacgaaaaagtgaagaaaagcccttaaattgatattttcttcagagaacttcaaaatgtcgttttttaatttgacgtttatttgacacttgaacttatttgtataataaattttatcaaaaatagtaaataaaaatattacattaacgtcaaatacgtcatattatgtgtatcatatgtttaacgtcaaattgtgttcgccaaaaatttcaggccactacgctaggtgtcgcgtcagtcatgcacggagtgaatatcggcagtctaatagcaacacgtgcctgggagttttggcaacactgatctgcataatccaaacattccgttcttgacgtgaaataaagtacatacaagcgtatttgttttccgctggataaactcagcgggtgcttgggcatgcgtagtacgcaataatgagtttataactcattattatttaatgttttaaagtttgaattaataatttcgattgatctaaaaaatagatttacagtggaataatggacgtacagtttggtactgaactagaatatttatttatagaagtatttatttaaatattgaggttagattcgtcgatacgtcaaacatgaaatgaaatgttagacaaatacgttcaggcggtttttctctgctggatttaagccgctggttacaaccactaagccgctttttgcttaaagtcagtcgctgaggtcgcctgaacgcacccaatgaacataaattttcttgtgagctttaatttagtcttattagtttgttaggaaataagcagtgctcagctcgtgtgctgatataatactgaaaatataatcgtagttaaatgatgtatagcaaatttcccattcttattgatgctttattctttgttagatttaaaagattccttggaacctaaatgtaaattctcggtcaatcattttgctacttattattaaatgaaatatctccaaagttactgtcaaatagtacaatagttatcttaatgaagtgttagtatttatttcatttgtaaagactactgtttattatatttcttatttttaatattgcgcattttattttattttattaaaaattgtagaataattttatatatacttcgataaaat

SEQ ID NO: 1595 - DNA, 4701 bp, Diabrotica virgifera
  SmartBlast Evalue=1E-23; Info=Endonuclease-reverse transcriptase n=1 Tax=Bombyx mori RepID=D7F170_BOMMO
attgaaacggttggaaagtttacatacttgggatttaaaaaatatatgccgacggatcagaagacggagaaatacggaagagaataacgcaggcaaacagagcttattttgccctctcccatatatttcggtctaaaagtgtccaccgaaatacaaagatgagaatctataaaactttaattcgaccaataacatgctatggcagtgaagcctgggtcctgaaagaaacatccaaaaacaaactcgacacattcgaaaggaaagtactgaggagaatactaggacctgtgagggaaaacggaatcttcagaagtcgatacaacaacgaacttgatcaactttataaggaagcaaccctgtcagacttcattagaatacaaagattgcaataggccggataagaatgggagaggataggctaccagaaagagcactgaatgctagaatgcagggaaagagaccggttggaaagacaagaaagcgctgagaaaacacagtaagcagcgacgcacaagcccttttaggagtccgtgtatagagaaaagcagccacagacaaacaagggtggaggcaaaaaatgaaggaggtcaaagctcaatttgggccgtagaagaaaaagaagaatcataaaaccttaatttatatgcaaattgcgcaagatacatacatattggtggtacgtttggccgaacttacagaaatgacatattataaccataaccttttcctctacatttattatttttctgtatattgaaacattctgtagctatacagtgatgagccagagctgggttaatactcgggtacaagtacccgaattttgtattctaagtacattttgggtactcagtacccagtaccggagtacattttcaattaagtactcggtactcgtacctgtagcgtatgggtaaaatacccggtatccgcgtttattgtacgagtactttttgcaagtcaacttgtcgctgcatgtagaacagcaaattaatagcaacacgcaaaacgccgttttcagtatcagtccatttgcaaaatcaagcaaacgcccattttcttatgccataatagttattaggcctcgaagttattaagcccttaaaattagttatcttaaaagccaataaaattaatcagtgagtgtgagtggtgttatactgattacagtaaaacctgcgttaccggccacctgtacttacggctcgtttcaaaattccccaaaccaattattatgtatattcccttatttatgacctggtatttacgaccacctttataacacaaacgcagccaaataatcacatatttttaaagcccattttatagaaattgaatgtgaatgtcggccgaaataattttgttaaaatcattttgtctatttgttgatcgaaattcccagtactatttattaggacctattgtatctacctaaacaggagattaaataacctgcatcgggtcggtggtcacaaggttcttaaaatcctataataaaatgtcgtaaaagcgttgtaaaagagaaacgtttgtcactatataaatatgatttaaattcacaaaaagttggccgaaaaatatggtgtaaaaactcaaattatcaaaggatataaaaaataaaagtgagtaaaacataaatcggttttttccatagtatagtatgtacctacctagttttgttttatattaggatattaagtagttttagtagtttccgtttatgtatagaattatatttgcttttattaacaaaataaacaaagttccaattatcttttatgtatttgtggactacaaaaactggaaataccggccacctttctatatcggcccatagttccttcatttttagtggccgttactgacaggttttactgtattaatcaatgatcaatttttaaaattcttatttttttatttaagttggaattgtacgttattttatgttttcatgactcataaataaatatgtttagagaggcagagataattattaccttcttaccttcttttcgggttctatattcaaatgtactcgaaataagtacccgagaaattcgggtaattgtactttgagtactttttttgagcaatatactcggtactctatactcgtttctcaaatatgaaaagtacccagtactctgtacccaagtacaatttatcagtaaccggtctagctctggtaccacgcttattcgattctagttattacacgatattttatggattttggattccaaaccacggatggattattataaaatatcatgtaataacttttttctagatgcaactctgcatgtactgaattattaccctgataactattctactgtacatacgtgtaagttttctgggtgtaaacaaacctcttcttacgtgacgcataattagagataaccatttactcatctaggatagcatatgtctacttaaaatcatggctttggtcttgataccaataaactgaagtactttcccagtttttattctctgaagtactttcctagtttttattcccttaagtactactgtatccgctgtgagctttaccggaacgtaacgtttaccggaaatttgacataaatgtcaaagtgattaatgtaaaattaaaattaaaaactttaattataaaaaatattagttggtcaaagctgtggtatatatttttaccttaaatatacttacgttttaaatactgaatttaagtttttttaatgttccgtaatatgtaattataatttaatctaaaaatcttagcgccatctacacgataattgtgaaagtatccgaagtaagaaattcatattttatcaatagaacgtcaaaattattagcaaaatcttaaaaaaatcgattacaatttaattaattttttgcgttgtaaatgttaagcgataacaattaaataataaatttaaaaattaccggtgaaagataattccagtaatccgctaggagcgtcaccagcgaagctcagagcgtatatatatttaatacaatggtagattttaaaaaaaggttaaatacttggatatttttaacgaaaatggcgaaagtagaccgtatttttaattaaattgtggtttattcgcaccaaatttagtggcaagtggcgaattgcactctaccacttaggctttgttctcaaatttttttgttaactgtataatatcgttatcaaactgtcactaaagctttctaaaaacatacggatgtcagctgtcaaatcacgtggttatgcagtttcttaggaaatacactgttgcagtgtcttaagaatatttaggtcaaggaaaagttctacttaaaattagccaaaaatgttgtattatatatttccattatttttaaaattatgtgcgataagaatgggcattgtgattttttaactagattatattacacagattaaaagtattcaaaattatgtattaactatgtattaacattttgtgttagacacacaccacaaaagtaatagttcaatagaaccagctaatgttaaaatctggtaataataattcacactacctaattgctttcgatgtacacttaattaatgttaacaccgacaactaaactataacgaaaaagtgaagaaaagcccttaaattgatattttcttcagagaacttcaaaatgtcgttttttaatttgacgtttatttgacacttgaacttatttgtataataaattttatcaaaaatagtaaataaaaatattacattaacgtcaaatacgtcatattatgtgtatcatatgtttaacgtcaaattgtgttcgccaaaaatttcaggccactacgctaggtgtcgcgtcagtcatgcacggagtgaatatcggcagtctaatagcaacacgtgcctgggagttttggcaacactgatctgcataatccaaacattccgttcttgacgtgaaataaagtacatacaagcgtatttgttttccgctggataaactcagcgggtgcttgggcatgcgtagtacgcaataatgagtttataactcattattatttaatgttttaaagtttgaattaataatttcgattgatctaaaaaatagatttacagtggaataatggacgtacagtttggtactgaactagaatatttatttatagaagtatttatttaaatattgaggttagattcgtcgatacgtcaaacatgaaatgaaatgttagacaaatacgttcaggcggtttttctctgctggatttaagccgctggttacaaccactaagccgctttttgcttaaagtcagtcgctgaggtcgcctgaacgcacccaatgaacataaattttcttgtgagctttaatttagtcttattagtttgttaggaaataagcagtgctcagctcgtgtgctgatataatactgaaaatataatcgtagttaaatgatgtatagcaaatttcccattcttattgatgctttattctttgttagatttaaaagattccttggaacctaaatgtaaattctcggtcaatcattttgctacttattattaaatgaaatatctccaaagttactgtcaaatagtacaatagttatcttaatgaagtgttagtatttatttcatttgtaaagactactgtttattatatttcttatttttaatattgcgcattttattttattttattaaaaattgtagaataattttatatatacttcgataaaat

SEQ ID NO: 1596 - DNA, 3952 bp, Diabrotica virgifera
gatatgtaatatcattaatatgtaatgtcaatgaaataattaggacatggatattagcggtggacatattttataaagttataatgtacatttatatttaactgtggtataatatatttaacataatataactttataaaataatatataatagtctcccgttttataccgctcacgtggttttgggagtatagcagggtagtctgctatatctagggtctacggtatacaaggaaggtaacagggccagtgctacgcttcaaccgcctataattacccctggttttacccaaggtactcattttattcaggttgagtcgacctggggcctataaacattttaaaaatgtagttgttcttgccggcggtagcatttgaactccggaagcacactgccgcttagctactccccaggcaaccaaataacgtttacaaaacgttgaaaaaacgtcataattatcaccaaatgacgtcagtttatcacgttttttcaacgtcgaaaatcacgtgaatatgtcccaccataattcacgtcatttttatcacgttttaaatacatatgaaaaacgtagtttttacgtcgatttgtcccaccataattcacgtaatttttatcacgttttaaatacgtgatatgaaaaacgtagttttcttagaagcaatcttagaaggctaaaaattaatttaattaaactcaatatcatttgtatcattgttatataagaataacttatgacgtagatatattaatattatgtgacacatgactgaagctcgaaacaaatgactgtgaatgaaaagccctataacagacgccctatggtttgtgtcaaacatgttatgttttttccatactagaggtccagtcattggactgacctaaagtcaattttttacttcgagccccaaagttgcttattgttagaatgtttataagtaatatattgctaaataaaagtttcaaaaaaaattactcatactttaaacgatacaaatacataggcatatttttgttattggtatacgttgatagtaattaacacaataaatacacacttaaaagactaatagataaatactcatgatgaagaagtacattataattaaaaatgaatatccattttcatatcgccccaacacgaagccaaagccgtcttatatttcagtttgtttagagagcgcaacaagcactctgaccgaacagtttcaaaactcattagtttttcatcagagaatgcatatgttgctatctccaaaccatgtacatagctgtaacgtctgtacatgcattgggttcttcttctctcttgctgtggacacactcagctgcacgccggccctaactttataaaataaactcagtataagttgtaaattccaataaacacaacaaatgcgctaatgtcactgtaactaaaaattataaacgtcaaaatttatagtaaacaaggtatcaaagacgtattgtttatccttgtttaacttattgtggtttctatggacaagctgtttaattttgcggtactagtttctgtgcgtaaaaaaagatacgtagtataaaaagtaattcgtgaataatttcatgcatgtgcaaagatataatggaaggactataataatattgtgatggtataaaaattattaggatcatcattaatatattagtacacagtcacagtatagtaggtgtacttaatggtactgtacacacataatatacagaatcttcaccttaagcatctttagatagtaatttatttatacctacggtcaaatatattagttttgcatgtaaaatgttaataaaaataatttatttactgttaattatttaatattttatatacctagttggacgtttaatatacagggtatgccacgttcaactgaacagagcctactgtgtcaatagctaaccttattaggatcaattcatataaaggtactataccttgtttttaatccaggaggagtaaactaaaaagacagatccacacccaataatttcactacaaaaattatcaaatacatcttctttttggttgatcatgtcggcattcgacggtaatcatatcgttatactaaatacgtcgctaaaaagttctaaaaacaactgttttttatataaaagcagacaaagaatctaaaaattacataaaaatttcataacactggagtaaacttgtctgcggttggatcaattacaaacaagcattacctcgcggtgaatttgaattactccttctggtttaaagacagagcatagctagagccaattcaggcgcttatgcactgggttgcatgagcccaaaattcagaagatgttatgaaataatcagataccgtatgcgagaataatttacgccattgtaatacagtaaaacctgtgttgccggccacctgccaaaatctgccacctgtacttacgacttacggtttcaaaattccccaaaccaattattatgtatattcccttatttatgacctggtatttacgaccacctttataacacaaacgcagccaaataatcacatatttttaaagcccattttatagaaattgaatgtgaatgtcggccgaaataattttgttaaaatcattttgtctatttgttgatcgaaattcccagtactatttattaggacctattgtatctacctaaacaggagattaaataacctgcatcgggtcggtggtcacaaggttcttaaaatcctataataaaatgtcgtaaaagcgttgtaaaagagaaacgtttgtcactatataaatatgatttaaattcacaaaaagttggccgaaaaatatggtgtaaaaactcaaattatcaaaggatataaaaaataaaagtgagtaaaacataaatcggttttttccatagtatagtatgtacctacctagttttgttttatattaggatattaagtagttttagtagtttccgtttatgtatagaattatatttgcttttattaacaaaataaacaaagttccaattatcttttatgtatttgtggactacaaaaactggaaataccggccacctttctatatcggcccatagttccttcatttttagtggccgttactgacaggttttactgtattaatcaatgatcaatttttaaaattcttatttttttatttaagttggaattgtacgttattttatgttttcatgactcataaataaatatgtttagagaggcagagataattattaccttcttaccttcttttcgggttctatattcaaatgtactcgaaataagtacccgagaaattcgggtaattgtactttgagtactttttttgagcaatatactcggtactctatactcgtttctcaaatatgaaaagtacccagtactctgtacccaagtacaatttatcagtaaccggtctagctctggtaccacgcttattcgattctagttattacacgatattttatggattttggattccaaaccacggatggattattataaaatatcatgtaataacttttttctagatgcaactctgcatgtactgaattattaccctgataactattctactgtacatacgtgtaagttttctgggtgtaaacaaacctcttcttacgtgacgcataattagagataaccatttactcatctaggatagcatatgtctacttaaaatcatggctttggtcttgataccaataaactgaagtactttcccagtttttattctctgaagtactttcctagtttttattcccttaagtactactgtatccgctgtgagctcgtacgtagaggggatatttacaaattctcgagcgccagtagtggcaagtctgtaaacgtttaccggaaatttgacataaatgtcaaagtgattaatgtaaaattaaaattaaaaactttaattataaaaaatattagttggtcaaagctgtggtatatatttttaccttaa

SEQ ID NO: 1597 - DNA, 3760 bp, Diabrotica virgifera
gatatgtaatatcattaatatgtaatgtcaatgaaataattaggacatggatattagcggtggacatattttataaagttataatgtacatttatatttaactgtggtataatatatttaacataatataactttataaaataatatataatagtctcccgttttataccgctcacgtggttttgggagtatagcagggtagtctgctatatctagggtctacggtatacaaggaaggtaacagggccagtgctacgcttcaaccgcctataattacccctggttttacccaaggtactcattttattcaggttgagtcgacctggggcctataaacattttaaaaatgtagttgttcttgccggcggtagcatttgaactccggaagcacactgccgcttagctactccccaggcaaccaaataacgtttacaaaacgttgaaaaaacgtcataattatcaccaaatgacgtcagtttatcacgttttttcaacgtcgaaaatcacgtgaatatgtcccaccataattcacgtcatttttatcacgttttaaatacatatgaaaaacgtagtttttacgtcgatttgtcccaccataattcacgtaatttttatcacgttttaaatacgtgatatgaaaaacgtagttttcttagaagcaatcttagaaggctaaaaattaatttaattaaactcaatatcatttgtatcattgttatataagaataacttatgacgtagatatattaatattatgtgacacatgactgaagctcgaaacaaatgactgtgaatgaaaagccctataacagacgccctatggtttgtgtcaaacatgttatgttttttccatactagaggtccagtcattggactgacctaaagtcaattttttacttcgagccccaaagttgcttattgttagaatgtttataagtaatatattgctaaataaaagtttcaaaaaaaattactcatactttaaacgatacaaatacataggcatatttttgttattggtatacgttgatagtaattaacacaataaatacacacttaaaagactaatagataaatactcatgatgaagaagtacattataattaaaaatgaatatccattttcatatcgccccaacacgaagccaaagccgtcttatatttcagtttgtttagagagcgcaacaagcactctgaccgaacagtttcaaaactcattagtttttcatcagagaatgcatatgttgctatctccaaaccatgtacatagctgtaacgtctgtacatgcattgggttcttcttctctcttgctgtggacacactcagctgcacgccggccctaactttataaaataaactcagtataagttgtaaattccaataaacacaacaaatgcgctaatgtcactgtaactaaaaattataaacgtcaaaatttatagtaaacaaggtatcaaagacgtattgtttatccttgtttaacttattgtggtttctatggacaagctgtttaattttgcggtactagtttctgtgcgtaaaaaaagatacgtagtataaaaagtaattcgtgaataatttcatgcatgtgcaaagatataatggaaggactataataatattgtgatggtataaaaattattaggatcatcattaatatattagtacacagtcacagtatagtaggtgtacttaatggtactgtacacacataatatacagaatcttcaccttaagcatctttagatagtaatttatttatacctacggtcaaatatattagttttgcatgtaaaatgttaataaaaataatttatttactgttaattatttaatattttatatacctagttggacgtttaatatacagggtatgccacgttcaactgaacagagcctactgtgtcaatagctaaccttattaggatcaattcatataaaggtactataccttgtttttaatccaggaggagtaaactaaaaagacagatccacacccaataatttcactacaaaaattatcaaatacatcttctttttggttgatcatgtcggcattcgacggtaatcatatcgttatactaaatacgtcgctaaaaagttctaaaaacaactgttttttatataaaagcagacaaagaatctaaaaattacataaaaatttcataacactggagtaaacttgtctgcggttggatcaattacaaacaagcattacctcgcggtgaatttgaattactccttctggtttaaagacagagcatagctagagccaattcaggcgcttatgcactgggttgcatgagcccaaaattcagaagatgttatgaaataatcagataccgtatgcgagaataatttacgccattgtaatacagtaaaacctgtgttgccggccacctgccaaaatctgccacctgtacttacgacttacggtttcaaaattccccaaaccaattattatgtatattcccttatttatgacctggtatttacgaccacctttataacacaaacgcagccaaataatcacatatttttaaagcccattttatagaaattgaatgtgaatgtcggccgaaataattttgttaaaatcattttgtctatttgttgatcgaaattcccagtactatttattaggacctattgtatctacctaaacaggagattaaataacctgcatcgggtcggtggtcacaaggttcttaaaatcctataataaaatgtcgtaaaagcgttgtaaaagagaaacgtttgtcactatataaatatgatttaaattcacaaaaagttggccgaaaaatatggtgtaaaaactcaaattatcaaaggatataaaaaataaaagggaattgaaaaattctttaaaaaagcttaacatcaatctgttttttccgtagtatacagtatatacctacctagatttgttttatattatgatattaaagtagctttagtagtttccgtttatgtatagaattatatttgcttttattaacaaaataaacaaagttccaattatcttttatgtatttgtggactacaaaaactggaaataccggccacctttctatatcggccaatagttccttcatttttagtggccgttactgacaggttttactgtatttattgcagttatatttacaaaaatataattgctcatactgaatgaaagtctacatacagctccacctttataacttttatattatgtaaagtttgtgcaattaattttaataacacatagcgcacatttcttaatacaatccattaataaccaattgatataacaaaaagaattttttagtggtttaatttatttaaatttggatttatatattcaacctcaaccttaaaattcaagtttattttgacagtaaactgtgtacagcgttatgaaaggagcgcatcctgaatattttaaattttcaattaagttcattgtaggtactaaaatctactaaaaaattctagctggtgctgaataccgtatttctatcaaatttgtcatttattttccctgtataactgtagactttataccagcatttcccaaccggtggatcgcgacccactagtgttccttatgctatcatcatggatgagggatgggtcgcgaacatcagaaagtggcttggaaccactgctttatactattggcataccttgtgtatatttatctctttctattatataccattaatatactagaatcacccaatatattagatgtatttagttttatcatagggct

SEQ ID NO: 1598 - DNA, 3639 bp, Diabrotica virgifera
gatatgtaatatcattaatatgtaatgtcaatgaaataattaggacatggatattagcggtggacatattttataaagttataatgtacatttatatttaactgtggtataatatatttaacataatataactttataaaataatatataatagtctcccgttttataccgctcacgtggttttgggagtatagcagggtagtctgctatatctagggtctacggtatacaaggaaggtaacagggccagtgctacgcttcaaccgcctataattacccctggttttacccaaggtactcattttattcaggttgagtcgacctggggcctataaacattttaaaaatgtagttgttcttgccggcggtagcatttgaactccggaagcacactgccgcttagctactccccaggcaaccaaataacgtttacaaaacgttgaaaaaacgtcataattatcaccaaatgacgtcagtttatcacgttttttcaacgtcgaaaatcacgtgaatatgtcccaccataattcacgtcatttttatcacgttttaaatacatatgaaaaacgtagtttttacgtcgatttgtcccaccataattcacgtaatttttatcacgttttaaatacgtgatatgaaaaacgtagttttcttagaagcaatcttagaaggctaaaaattaatttaattaaactcaatatcatttgtatcattgttatataagaataacttatgacgtagatatattaatattatgtgacacatgactgaagctcgaaacaaatgactgtgaatgaaaagccctataacagacgccctatggtttgtgtcaaacatgttatgttttttccatactagaggtccagtcattggactgacctaaagtcaattttttacttcgagccccaaagttgcttattgttagaatgtttataagtaatatattgctaaataaaagtttcaaaaaaaattactcatactttaaacgatacaaatacataggcatatttttgttattggtatacgttgatagtaattaacacaataaatacacacttaaaagactaatagataaatactcatgatgaagaagtacattataattaaaaatgaatatccattttcatatcgccccaacacgaagccaaagccgtcttatatttcagtttgtttagagagcgcaacaagcactctgaccgaacagtttcaaaactcattagtttttcatcagagaatgcatatgttgctatctccaaaccatgtacatagctgtaacgtctgtacatgcattgggttcttcttctctcttgctgtggacacactcagctgcacgccggccctaactttataaaataaactcagtataagttgtaaattccaataaacacaacaaatgcgctaatgtcactgtaactaaaaattataaacgtcaaaatttatagtaaacaaggtatcaaagacgtattgtttatccttgtttaacttattgtggtttctatggacaagctgtttaattttgcggtactagtttctgtgcgtaaaaaaagatacgtagtataaaaagtaattcgtgaataatttcatgcatgtgcaaagatataatggaaggactataataatattgtgatggtataaaaattattaggatcatcattaatatattagtacacagtcacagtatagtaggtgtacttaatggtactgtacacacataatatacagaatcttcaccttaagcatctttagatagtaatttatttatacctacggtcaaatatattagttttgcatgtaaaatgttaataaaaataatttatttactgttaattatttaatattttatatacctagttggacgtttaatatacagggtatgccacgttcaactgaacagagcctactgtgtcaatagctaaccttattaggatcaattcatataaaggtactataccttgtttttaatccaggaggagtaaactaaaaagacagatccacacccaataatttcactacaaaaattatcaaatacatcttctttttggttgatcatgtcggcattcgacggtaatcatatcgttatactaaatacgtcgctaaaaagttctaaaaacaactgttttttatataaaagcagacaaagaatctaaaaattacataaaaatttcataacactggagtaaacttgtctgcggttggatcaattacaaacaagcattacctcgcggtgaatttgaattactccttctggtttaaagacagagcatagctagagccaattcaggcgcttatgcactgggttgcatgagcccaaaattcagaagatgttatgaaataatcagataccgtatgcgagaataatttacgccattgtaatacagtaaaacctgtgttgccggccacctgccaaaatctgccacctgtacttacgacttacggtttcaaaattccccaaaccaattattatgtatattcccttatttatgacctggtatttacgaccacctttataacacaaacgcagccaaataatcacatatttttaaagcccattttatagaaattgaatgtgaatgtcggccgaaataattttgttaaaatcattttgtctatttgttgatcgaaattcccagtactatttattaggacctattgtatctacctaaacaggagattaaataacctgcatcgggtcggtggtcacaaggttcttaaaatcctataataaaatgtcgtaaaagcgttgtaaaagagaaacgtttgtcactatataaatatgatttaaattcacaaaaagttggccgaaaaatatggtgtaaaaactcaaattatcaaaggatataaaaaataaaagtgagtaaaacataaatcggttttttccatagtatagtatgtacctacctagttttgttttatattaggatattaagtagttttagtagtttccgtttatgtatagaattatatttgcttttattaacaaaataaacaaagttccaattatcttttatgtatttgtggactacaaaaactggaaataccggccacctttctatatcggcccatagttccttcatttttagtggccgttactgacaggttttactgtattaatcaatgatcaatttttaaaattcttatttttttatttaagttggaattgtacgttattttatgttttcatgactcataaataaatatgtttagagaggcagagataattattaccttcttaccttcttttcgggttctatattcaaatgtactcgaaataagtacccgagaaattcgggtaattgtactttgagtattgtactctgagtactttttttgagcaatgtactcggtactctgtactcgttcctcaaatatgaaaagtacccggtactctgtacccgagtacagtttatcagtacccggcccagctctgatgccaagtagtgccaaggtgtatttaatgctgctggaagaaaactcagattattaaacacatttgttgttagatttttgttttacgttgacttacaaaaaaatttcattaaattagtgcagttcttaacttttatttgattatttcatcatagcgaaatcatattacactgaaagtaagatgaattcattgttgactaatcaggtattata

SEQ ID NO: 1599 - DNA, 2957 bp, Diabrotica virgifera
  SmartBlast Evalue=4E-11; Info=Endonuclease-reverse transcriptase n=1 Tax=Bombyx mori RepID=D7F170_BOMMO
cttttctatgttaatgagaaattttctataatctataactccaaaataaaattattattatacactaatggggtactattttttctacctacctgtttatcttcgagccgacctgggctgttttttaaatgtaggtacctgaggtatcataaaggactaaagaattacagtgagccgagatggtaataccccacagtcccattcaagacattggaaaaatttcactgttttcattctgattttagtaaatacattatgtgttttggtttgagtgtatctaaatgaaataaattgtagaaacataaataagacccttgactttaaagatcacgtaatcataaaatcttgctttcttccatatatttcggtctaaaagtgtccaccgaaatacaaagatgagaatctataaaaccaatattcgtccaacagctacagcagtgaagcctgggtcctgaaagaaacatccaaaaacaaactcgacacattcgaaaggaaagtactgaggagaatactaggacctgtgagggaaaacggaatcttcagaagtcgatacaacaacgaacttgatcaactttataaggaagcaaccctgtcagacttcattagaatacaaagattgcaataggccggataagaatgggagaggataggctaccagaaagagcactgaatgctagaatgcagggaaagagaccggttggaaagacaagaaagcgctgagaaaacacagtaagcagcgacgcacaagcccttttaggagtccgtgtatagagaaaagcagccacagacaaacaagggtggaggcaaaaaatgaaggaggtcaaagctcaatttgggccgtagaagaaaaagaagaatcataaaaccttaatttatatgcaaattgcgcaagatacatacatattggtggtacgtttggccgaacttacagaaatgacatattataaccataaccttttcctctacatttattatttttctgtatattgaaacattctgtagctatacagtgatgagccagagctgggttaatactcgggtacaagtacccgaattttgtattctaagtacattttgggtactcagtacccagtaccggagtacattttcaattaagtactcggtactcgtacctgtagcgtatgggtaaaatacccggtatccgcgtttattgtacgagtactttttgcaagtcaacttgtcgctgcatgtagaacagcaaattaatagcaacacgcaaaacgccgttttcagtatcagtccatttgcaaaatcaagcaaacgcccattttcttatgccataatagttattaggcctcgaagttattaagcccttaaaattagttatcttaaaagccaataaaattaatcagtgagtgtgagtggtgttatactgattacagtaaaacctgcgttaccggccacctgtacttacggctcgtttcaaaattccccaaaccaattattatgtatattcccttatttatgacctggtatttacgaccacctttataacacaaacgcagccaaataatcacatatttttaaagcccattttatagaaattgaatgtgaatgtcggccgaaataattttgttaaaatcattttgtctatttgttgatcgaaattcccagtactatttattaggacctattgtatctacctaaacaggagattaaataacctgcatcgggtcggtggtcacaaggttcttaaaatcctataataaaatgtcgtaaaagcgttgtaaaagagaaacgtttgtcactatataaatatgatttaaattcacaaaaagttggccgaaaaatatggtgtaaaaactcaaattatcaaaggatataaaaaataaaagtgagtaaaacataaatcggttttttccatagtatagtatgtacctacctagttttgttttatattaggatattaagtagttttagtagtttccgtttatgtatagaattatatttgcttttattaacaaaataaacaaagttccaattatcttttatgtatttgtggactacaaaaactggaaataccggccacctttctatatcggcccatagttccttcatttttagtggccgttactgacaggttttactgtattaatcaatgatcaatttttaaaattcttatttttttatttaagttggaattgtacgttattttatgttttcatgactcataaataaatatgtttagagaggcagagataattattaccttcttaccttcttttcgggttctatattcaaatgtactcgaaataagtacccgagaaattcgggtaattgtactttgagtactttttttgagcaatatactcggtactctatactcgtttctcaaatatgaaaagtacccagtactctgtacccaagtacaatttatcagtaaccggtctagctctggtaccacgcttattcgattctagttattacacgatattttatggattttggattccaaaccacggatggattattataaaatatcatgtaataacttttttctagatgcaactctgcatgtactgaattattaccctgataactattctactgtacatacgtgtaagttttctgggtgtaaacaaacctcttcttacgtgacgcataattagagataaccatttactcatctaggatagcatatgtctacttaaaatcatggctttggtcttgataccaataaactgaagtactttcccagtttttattctctgaagtactttcctagtttttattcccttaagtactactgtatccgctgtgagctcgtacgtagaggggatatttacaaattctcgagcgccagtagtggcaagtctgtaaacgtttaccggaaatttgacataaatgtcaaagtgattaatgtaaaattaaaattaaaaactttaattataaaaaatattagttggtcaaagctgtggtatatatttttaccttaa

SEQ ID NO: 1600 - DNA, 2724 bp, Diabrotica virgifera
  SmartBlast Evalue=6E-24; Info=Endonuclease-reverse transcriptase n=1 Tax=Bombyx mori RepID=D7F170_BOMMO
attgaaacggttggaaagtttacatacttgggatttaaaaaatatatgccgacggatcagaagacggagaaatacggaagagaataacgcaggcaaacagagcttattttgccctctcccatatatttcggtctaaaagtgtccaccgaaatacaaagatgagaatctataaaactttaattcgaccaataacatgctatggcagtgaagcctgggtcctgaaagaaacatccaaaaacaaactcgacacattcgaaaggaaagtactgaggagaatactaggacctgtgagggaaaacggaatcttcagaagtcgatacaacaacgaacttgatcaactttataaggaagcaaccctgtcagacttcattagaatacaaagattgcaataggccggataagaatgggagaggataggctaccagaaagagcactgaatgctagaatgcagggaaagagaccggttggaaagacaagaaagcgctgagaaaacacagtaagcagcgacgcacaagcccttttaggagtccgtgtatagagaaaagcagccacagacaaacaagggtggaggcaaaaaatgaaggaggtcaaagctcaatttgggccgtagaagaaaaagaagaatcataaaaccttaatttatatgcaaattgcgcaagatacatacatattggtggtacgtttggccgaacttacagaaatgacatattataaccataaccttttcctctacatttattatttttctgtatattgaaacattctgtagctatacagtgatgagccagagctgggttaatactcgggtacaagtacccgaattttgtattctaagtacattttgggtactcagtacccagtaccggagtacattttcaattaagtactcggtactcgtacctgtagcgtatgggtaaaatacccggtatccgcgtttattgtacgagtactttttgcaagtcaacttgtcgctgcatgtagaacagcaaattaatagcaacacgcaaaacgccgttttcagtatcagtccatttgcaaaatcaagcaaacgcccattttcttatgccataatagttattaggcctcgaagttattaagcccttaaaattagttatcttaaaagccaataaaattaatcagtgagtgtgagtggtgttatactgattacagtaaaacctgcgttaccggccacctgtacttacggctcgtttcaaaattccccaaaccaattattatgtatattcccttatttatgacctggtatttacgaccacctttataacacaaacgcagccaaataatcacatatttttaaagcccattttatagaaattgaatgtgaatgtcggccgaaataattttgttaaaatcattttgtctatttgttgatcgaaattcccagtactatttattaggacctattgtatctacctaaacaggagattaaataacctgcatcgggtcggtggtcacaaggttcttaaaatcctataataaaatgtcgtaaaagcgttgtaaaagagaaacgtttgtcactatataaatatgatttaaattcacaaaaagttggccgaaaaatatggtgtaaaaactcaaattatcaaaggatataaaaaataaaagtgagtaaaacataaatcggttttttccatagtatagtatgtacctacctagttttgttttatattaggatattaagtagttttagtagtttccgtttatgtatagaattatatttgcttttattaacaaaataaacaaagttccaattatcttttatgtatttgtggactacaaaaactggaaataccggccacctttctatatcggcccatagttccttcatttttagtggccgttactgacaggttttactgtattaatcaatgatcaatttttaaaattcttatttttttatttaagttggaattgtacgttattttatgttttcatgactcataaataaatatgtttagagaggcagagataattattaccttcttaccttcttttcgggttctatattcaaatgtactcgaaataagtacccgagaaattcgggtaattgtactttgagtactttttttgagcaatatactcggtactctatactcgtttctcaaatatgaaaagtacccagtactctgtacccaagtacaatttatcagtaaccggtctagctctggtaccacgcttattcgattctagttattacacgatattttatggattttggattccaaaccacggatggattattataaaatatcatgtaataacttttttctagatgcaactctgcatgtactgaattattaccctgataactattctactgtacatacgtgtaagttttctgggtgtaaacaaacctcttcttacgtgacgcataattagagataaccatttactcatctaggatagcatatgtctacttaaaatcatggctttggtcttgataccaataaactgaagtactttcccagtttttattctctgaagtactttcctagtttttattcccttaagtactactgtatccgctgtgagctcgtacgtagaggggatatttacaaattctcgagcgccagtagtggcaagtctgtaaacgtttaccggaaatttgacataaatgtcaaagtgattaatgtaaaattaaaattaaaaactttaattataaaaaatattagttggtcaaagctgtggtatatatttttaccttaa

SEQ ID NO: 1601 - DNA, 2765 bp, Diabrotica virgifera
  SmartBlast Evalue=3E-11; Info=Endonuclease-reverse transcriptase n=1 Tax=Bombyx mori RepID=D7F170_BOMMO
cttttctatgttaatgagaaattttctataatctataactccaaaataaaattattattatacactaatggggtactattttttctacctacctgtttatcttcgagccgacctgggctgttttttaaatgtaggtacctgaggtatcataaaggactaaagaattacagtgagccgagatggtaataccccacagtcccattcaagacattggaaaaatttcactgttttcattctgattttagtaaatacattatgtgttttggtttgagtgtatctaaatgaaataaattgtagaaacataaataagacccttgactttaaagatcacgtaatcataaaatcttgctttcttccatatatttcggtctaaaagtgtccaccgaaatacaaagatgagaatctataaaaccaatattcgtccaacagctacagcagtgaagcctgggtcctgaaagaaacatccaaaaacaaactcgacacattcgaaaggaaagtactgaggagaatactaggacctgtgagggaaaacggaatcttcagaagtcgatacaacaacgaacttgatcaactttataaggaagcaaccctgtcagacttcattagaatacaaagattgcaataggccggataagaatgggagaggataggctaccagaaagagcactgaatgctagaatgcagggaaagagaccggttggaaagacaagaaagcgctgagaaaacacagtaagcagcgacgcacaagcccttttaggagtccgtgtatagagaaaagcagccacagacaaacaagggtggaggcaaaaaatgaaggaggtcaaagctcaatttgggccgtagaagaaaaagaagaatcataaaaccttaatttatatgcaaattgcgcaagatacatacatattggtggtacgtttggccgaacttacagaaatgacatattataaccataaccttttcctctacatttattatttttctgtatattgaaacattctgtagctatacagtgatgagccagagctgggttaatactcgggtacaagtacccgaattttgtattctaagtacattttgggtactcagtacccagtaccggagtacattttcaattaagtactcggtactcgtacctgtagcgtatgggtaaaatacccggtatccgcgtttattgtacgagtactttttgcaagtcaacttgtcgctgcatgtagaacagcaaattaatagcaacacgcaaaacgccgttttcagtatcagtccatttgcaaaatcaagcaaacgcccattttcttatgccataatagttattaggcctcgaagttattaagcccttaaaattagttatcttaaaagccaataaaattaatcagtgagtgtgagtggtgttatactgattacagtaaaacctgcgttaccggccacctgtacttacggctcgtttcaaaattccccaaaccaattattatgtatattcccttatttatgacctggtatttacgaccacctttataacacaaacgcagccaaataatcacatatttttaaagcccattttatagaaattgaatgtgaatgtcggccgaaataattttgttaaaatcattttgtctatttgttgatcgaaattcccagtactatttattaggacctattgtatctacctaaacaggagattaaataacctgcatcgggtcggtggtcacaaggttcttaaaatcctataataaaatgtcgtaaaagcgttgtaaaagagaaacgtttgtcactatataaatatgatttaaattcacaaaaagttggccgaaaaatatggtgtaaaaactcaaattatcaaaggatataaaaaataaaagggaattgaaaaattctttaaaaaagcttaacatcaatctgttttttccgtagtatacagtatatacctacctagatttgttttatattatgatattaaagtagctttagtagtttccgtttatgtatagaattatatttgcttttattaacaaaataaacaaagttccaattatcttttatgtatttgtggactacaaaaactggaaataccggccacctttctatatcggccaatagttccttcatttttagtggccgttactgacaggttttactgtatttattgcagttatatttacaaaaatataattgctcatactgaatgaaagtctacatacagctccacctttataacttttatattatgtaaagtttgtgcaattaattttaataacacatagcgcacatttcttaatacaatccattaataaccaattgatataacaaaaagaattttttagtggtttaatttatttaaatttggatttatatattcaacctcaaccttaaaattcaagtttattttgacagtaaactgtgtacagcgttatgaaaggagcgcatcctgaatattttaaattttcaattaagttcattgtaggtactaaaatctactaaaaaattctagctggtgctgaataccgtatttctatcaaatttgtcatttattttccctgtataactgtagactttataccagcatttcccaaccggtggatcgcgacccactagtgttccttatgctatcatcatggatgagggatgggtcgcgaacatcagaaagtggcttggaaccactgctttatactattggcataccttgtgtatatttatctctttctattatataccattaatatactagaatcacccaatatattagatgtatttagttttatcatagggct

SEQ ID NO: 1602 - DNA, 402 bp, Diabrotica virgifera
aaaatttgtgctctacaaaatagcgtaggtattaagtttatgtacgaaaattatttaaaaaatatttttgtagttgtgacacaatacagataacacaccaaaaaatttacaaaatatttattaaaagtgattttagcagtacagaatatacagggtgtcccgaaaagattggtcacaaattacaccacacattctggggtcaaaaatagttcgattgaacctaacttaccttagtacaaatgtgctcataaaaaaagttacagccctttgaagttacaaaatgaaaatcgatttcctttttcaatatatcgaaaactattaaagacattttattgaaaatgaacatgtatcattcctatggcaggaaaatcttaaaacaaaattacagtgaaatttgtccac

SEQ ID NO: 1603 - DNA, 348 bp, Diabrotica virgifera
cccccaaacgtttgtgtgcgttccaattggaccattattgtggtaccattggttgagcacagtgtttttagggcttttttgcctcttggtctttttttgacaagtcacctcttatcgagatgtggcttctttttcaaaatatatctaaaaatgcaaattataaataaattttcagattattaacaggtctctataatcgtacttaaccatatacaaatatgtggtggattcgacaaatattcaaaatatctcgataaacactggcttatcgaaaaagctctgagaggcaaaatgtttcaaaaacagtgtgttcaaccaatggcgccacaccaataattaaattggaac

SEQ ID NO: 1604 - DNA, 270 bp, Diabrotica virgifera
cccccaaacgtttgtgtgcgttccaattggaccattattgtggtaccattggttgagcacagtgtttttagggcttttttgcctcttggtctttttttgacaagtcacctcttatcgagatgtggcttctttttcaaaatatatctaaaaatgcaaattataaataaattttcagattattaacaggtctctataatcgtacttaaccatatacaaatatgtggtggattcgacaaatattcaaaatatctcgataaacactggcttatc

SEQ ID NO: 1605 - DNA, 140 bp, Diabrotica virgifera
gttccaatttaattattggtgtggcgccattggttgaacacactgtttttgaaacattttgcctctcagagctttttcgataagccagtgtttatcgagatattttgaatatttgtcgaatccaccacatatttgtatat

SEQ ID NO: 1606 - DNA, 2339 bp, Diabrotica virgifera
gcgggctaatttatttcgatgcatgaacttgcaaatgaaccaatcataaataaagtgtttctacctcaaaaatattaacaatgccattttgaagttatacttccaaatttgtaacacattttgttttgggtatattggggcatttaagatgaaattatgataggatgcacttgctgtgtttgtttcaaaagcaaccaaaagaaagaaaatgtattaggatgacaaggccatcaatgagtttgttgaatacagtagtcaaataaaagaaacacaaaatatctacaccccatacaaactccccaaaaacgactacaagccattataaaactctgtaaaagtggaaaaatagttccatatatttttattaaggcagtttaaaattaaatccatatcaatgtttaacacaatatagatctaaacgtaaatgtatgtgtaacctagagttaagtactaagtttaatactaaaatactatgaatgtcctacaacctatcagtaatataaaaataattgttttatgtagtatacatcacttaaaattttcataaaaataacctctaccaaatcgtagcaccactggagtggttttctggaacttaatcgttcaatttaattattacgtttaaaaaggttcagtaaatgctttaaaattttcgttgtaagcttagctctctcctatgcccccctcagccgcctccaagtaccagttatccaccctcttagttaaatacatttatttcaaaaaaaaaaatatgttattatatttagcccggtcaaagaacaatctgacccctaaaaaaaataaaggaaggataaaaatttgggaatatgtagttgaaattgtctattaattatacagggtgtcccgaaaagattggtcacaaattacaccacacattctggggtcaaaaatagttcgattgaacctaacttaccttagtacaaatgtgctcataaaaaaagttacagccctttgaagttacaaaatgaaaatcgattttttcaatatatcgaaaactattagagatcttattgaaaatggacatgtatcattcttatggcaggaacatcttaaaacaaaattatagtgaaatttgtccaccccataaaaattttatgggggttttgttcccttaaaccaccccaaacttttttgtacgttccaattaattcattattgtggtaccattagttaaacacaacgttttaaactttttttgccccttagtattttttcggtaagccagtttttatcgagatgtggcttcttttttttaatatatttacataaatatttaatggggattttttgttcctttaaacctccaaatgtttgtgtacgttccaattaaactattattgtggtaccattagttaaacacagtgttttaaaacttttttgtctcgtagtctttttttgataagtcaccttttatcgagatgcggcttctttttcaaaatatacctaaaaatgtaaattataaataaattttcagattattaacaggtctatttaatcgtacttagtacttaacaatataaaaatatgtggtggattcgaaaaatattcaaaatatctcgataaaaactggcttatcgaaaaagtactaagagacaaaaaagttttagaaaccttttgtttaactaatggtgtcacaatattaatttaattggaacgtacacagaagtttggggggttgaagagaacaaaacacccaaaaaatttttatggggtgcacaaatttcacttatttttttaagatgttgctgcgataagaatgccaatgtccattttcaataaaaaatctctaagagttttcgatatattaaaaaaatcgattttcattttgtaacttgaaagggctgtaactttttttgtgtgcactattgtatataggtaagtgaggttcaatcaatctattttgaccacagaatatgtggtataactatgatcaatcttttcgggacaccctgtatatacaagaaaaaaaattaatgtactttcagtatattcttcatactttagtcgacttttcggcacacgttgctgcaacattttaaaccatttgcacacactgcgtatatgggatcacctccacatggttcgccttcagaaactacgtcaaggcatacagtattcggacagcatatacattgttcaggccattttatctgaacttgtgtatcattgcagagtttcattataagaatacagatgttcttatcgtcacaataatccggcccgcacccttttttgttttcattacagtaggcgacacgatccagcaaatataaccggtaatactaaataaaataccgttgtcaacaatactataagac

SEQ ID NO: 1607 - DNA, 1634 bp, Diabrotica virgifera
aaaatttgtgctctacaaaatagcgtaggtattaagtttatgtacgaaaattatttaaaaaatatttttgtagttgtgacacaatacagataacacaccaaaaaatttacaaaatatttattaaaagtgattttagcagtacagaatatacagggtgtcccgaaaagattggtcacaaattacaccacacattctggggtcaaaaatagttcgattgaacctaacttaccttagtacaaatgtgctcataaaaaaagttacagccctttgaagttacaaaatgaaaatcgattttttcaatatatcgaaaactattagagatcttattgaaaatggacatgtatcattcttatggcaggaacatcttaaaacaaaattatagtgaaatttgtccaccccataaaaattttatgggggttttgttcccttaaaccaccccaaacttttttgtacgttccaattaattcattattgtggtaccattagttaaacacaacgttttaaactttttttgccccttagtattttttcggtaagccagtttttatcgagatgtggcttcttttttttaatatatttacataaatatttaatggggattttttgttcctttaaacctccaaatgtttgtgtacgttccaattaaactattattgtggtaccattagttaaacacagtgttttaaaacttttttgtctcgtagtctttttttgataagtcaccttttatcgagatgcggcttctttttcaaaatatacctaaaaatgtaaattataaataaattttcagattattaacaggtctatttaatcgtacttagtacttaacaatataaaaatatgtggtggattcgaaaaatattcaaaatatctcgataaaaactggcttatcgaaaaagtactaagagacaaaaaagttttagaaaccttttgtttaactaatggtgtcacaatattaatttaattggaacgtacacagaagtttggggggttgaagagaacaaaacacccaaaaaatttttatggggtgcacaaatttcacttatttttttaagatgttgctgcgataagaatgccaatgtccattttcaataaaaaatctctaagagttttcgatatattaaaaaaatcgattttcattttgtaacttgaaagggctgtaactttttttgtgtgcactattgtatataggtaagtgaggttcaatcaatctattttgaccacagaatatgtggtataactatgatcaatcttttcgggacaccctgtatatacaagaaaaaaaattaatgtactttcagtatattcttcatactttagtcgacttttcggcacacgttgctgcaacattttaaaccatttgcacacactgcgtatatgggatcacctccacatggttcgccttcagaaactacgtcaaggcatacagtattcggacagcatatacattgttcaggccattttatctgaacttgtgtatcattgcagagtttcattataagaatacagatgttcttatcgtcacaataatccggcccgcacccttttttgttttcattacagtaggcgacacgatccagcaaatataaccggtaatactaaataaaataccgttgtcaacaatactataagac

SEQ ID NO: 1608 - DNA, 1665 bp, Diabrotica virgifera
gcgggctaatttatttcgatgcatgaacttgcaaatgaaccaatcataaataaagtgtttctacctcaaaaatattaacaatgccattttgaagttatacttccaaatttgtaacacattttgttttgggtatattggggcatttaagatgaaattatgataggatgcacttgctgtgtttgtttcaaaagcaaccaaaagaaagaaaatgtattaggatgacaaggccatcaatgagtttgttgaatacagtagtcaaataaaagaaacacaaaatatctacaccccatacaaactccccaaaaacgactacaagccattataaaactctgtaaaagtggaaaaatagttccatatatttttattaaggcagtttaaaattaaatccatatcaatgtttaacacaatatagatctaaacgtaaatgtatgtgtaacctagagttaagtactaagtttaatactaaaatactatgaatgtcctacaacctatcagtaatataaaaataattgttttatgtagtatacatcacttaaaattttcataaaaataacctctaccaaatcgtagcaccactggagtggttttctggaacttaatcgttcaatttaattattacgtttaaaaaggttcagtaaatgctttaaaattttcgttgtaagcttagctctctcctatgcccccctcagccgcctccaagtaccagttatccaccctcttagttaaatacatttatttcaaaaaaaaaaatatgttattatatttagcccggtcaaagaacaatctgacccctaaaaaaaataaaggaaggataaaaatttgggaatatgtagttgaaattgtctattaattatacagggtgtcccgaaaagattggtcacaaattacaccacacattctggggtcaaaaatagttcgattgaacctaacttaccttagtacaaatgtgctcataaaaaaagttacagccctttgaagttacaaaatgaaaatcgattttttcaatatatcgaaaactattagagatcttattgaaaatggacatgtatcattcttatggcaggaacatcttaaaacaaaattatagtgaaatttgtccaccccataaaaattttatgggggttttgttcccttaaaccaccccaaacttttttgtacgttccaattaattcattattgtggtaccattagttaaacacaacgtttttaaaacttttttgcctcttagtattttttcgataagccagtttttatcgagatgcggcttcttttttaatatgtttacataaaaattttatggggtttttgctcccttaaaccccccagatgtttgtgtacgctccaaccaaaccaccattgcggcaccatcagttaaacacagtgttttaaaacttttgcctcttagtccttattttgataagtcaccttttatcgagatgtggcttctttttcaaaatatacctaataatgtaaattataaataaattttcagattattaacaggtctctataatcgtacgtaaccatatacaaatatgtggtggattcgacaaatattcaaaatatctcgataaacactggcttatcgaaaaagctctgagaggcaaaatgtttcaaaaacagtgtgttcaaccaatggcgccacaccaataattaaattggaac

SEQ ID NO: 1609 - DNA, 1638 bp, Diabrotica virgifera
gcgggctaatttatttcgatgcatgaacttgcaaatgaaccaatcataaataaagtgtttctacctcaaaaatattaacaatgccattttgaagttatacttccaaatttgtaacacattttgttttgggtatattggggcatttaagatgaaattatgataggatgcacttgctgtgtttgtttcaaaagcaaccaaaagaaagaaaatgtattaggatgacaaggccatcaatgagtttgttgaatacagtagtcaaataaaagaaacacaaaatatctacaccccatacaaactccccaaaaacgactacaagccattataaaactctgtaaaagtggaaaaatagttccatatatttttattaaggcagtttaaaattaaatccatatcaatgtttaacacaatatagatctaaacgtaaatgtatgtgtaacctagagttaagtactaagtttaatactaaaatactatgaatgtcctacaacctatcagtaatataaaaataattgttttatgtagtatacatcacttaaaattttcataaaaataacctctaccaaatcgtagcaccactggagtggttttctggaacttaatcgttcaatttaattattacgtttaaaaaggttcagtaaatgctttaaaattttcgttgtaagcttagctctctcctatgcccccctcagccgcctccaagtaccagttatccaccctcttagttaaatacatttatttcaaaaaaaaaaatatgttattatatttagcccggtcaaagaacaatctgacccctaaaaaaaataaaggaaggataaaaatttgggaatatgtagttgaaattgtctattaattatacagggtgtcccgaaaagattggtcacaaattacaccacacattctggggtcaaaaatagttcgattgaacctaacttaccttagtacaaatgtgctcataaaaaaagttacagccctttgaagttacaaaatgaaaatcgattttttcaatatatcgaaaactattagagatcttattgaaaatggacatgtatcattcttatggcaggaacatcttaaaacaaaattatagtgaaatttgtccaccccataaaaattttatgggggttttgttcccttaaaccaccccaaacttttttgtacgttccaattaattcattattgtggtaccattagttaaacacaacgtttttaaaacttttttgcctcttagtattttttcgataagccagtttttatcgagatgcggcttctttttcaatatatttacgtaaaaattttatgggggttttgttcctttaaaccccccctaatgtttgtgtacgctccaatcaaaccatcattgtggcaccattagttaaacacagtgtttaaaacttttgtctcttagtcttttgttcataagtcaccttttatcgagatgtagcttctttttcaaaatatacctaaaaatgtaaattataaataaattttcagattattaacaggtctctataaccgtacttaaccatatacaaatatgtggtggattcgacaaatattcaaaatatctcgataaacactggcctatccaaaaagtaccaagaggcaaaaaagctccaaaaataatgtgttcaactaata

SEQ ID NO: 1610 - DNA, 1587 bp, Diabrotica virgifera
gcgggctaatttatttcgatgcatgaacttgcaaatgaaccaatcataaataaagtgtttctacctcaaaaatattaacaatgccattttgaagttatacttccaaatttgtaacacattttgttttgggtatattggggcatttaagatgaaattatgataggatgcacttgctgtgtttgtttcaaaagcaaccaaaagaaagaaaatgtattaggatgacaaggccatcaatgagtttgttgaatacagtagtcaaataaaagaaacacaaaatatctacaccccatacaaactccccaaaaacgactacaagccattataaaactctgtaaaagtggaaaaatagttccatatatttttattaaggcagtttaaaattaaatccatatcaatgtttaacacaatatagatctaaacgtaaatgtatgtgtaacctagagttaagtactaagtttaatactaaaatactatgaatgtcctacaacctatcagtaatataaaaataattgttttatgtagtatacatcacttaaaattttcataaaaataacctctaccaaatcgtagcaccactggagtggttttctggaacttaatcgttcaatttaattattacgtttaaaaaggttcagtaaatgctttaaaattttcgttgtaagcttagctctctcctatgcccccctcagccgcctccaagtaccagttatccaccctcttagttaaatacatttatttcaaaaaaaaaaatatgttattatatttagcccggtcaaagaacaatctgacccctaaaaaaaataaaggaaggataaaaatttgggaatatgtagttgaaattgtctattaattatacagggtgtcccgaaaagattggtcacaaattacaccacacattctggggtcaaaaatagttcgattgaacctaacttaccttagtacaaatgtgctcataaaaaaagttacagccctttgaagttacaaaatgaaaatcgattttttcaatatatcgaaaactattagagatcttattgaaaatggacatgtatcattcttatggcaggaacatcttaaaacaaaattatagtgaaatttgtccaccccataaaaattttatgggggttttgttcccttaaaccaccccaaacttttttgtacgttccaattaattcattattgtggtaccattagttaaacacaacgtttttaaaacttttttgcctcttagtattttttcgataagccagtttttatcgagatgcggcttcttttttaatatgtttacataaaaattttatggggtttttgctcccttaaaccccccagatgtttgtgtacgctccaaccaaaccaccattgcggcaccatcagttaaacacagtgttttaaaacttttgcctcttagtccttattttgataagtcaccttttatcgagatgtggcttctttttcaaaatatacctaataatgtaaattataaataaattttcagattattaacaggtctctataatcgtacgtaaccatatacaaatatgtggtggattcgacaaatattcaaaatatctcgataaacactggcttatc

SEQ ID NO: 1611 - DNA, 1105 bp, Diabrotica virgifera
gcgggctaatttatttcgatgcatgaacttgcaaatgaaccaatcataaataaagtgtttctacctcaaaaatattaacaatgccattttgaagttatacttccaaatttgtaacacattttgttttgggtatattggggcatttaagatgaaattatgataggatgcacttgctgtgtttgtttcaaaagcaaccaaaagaaagaaaatgtattaggatgacaaggccatcaatgagtttgttgaatacagtagtcaaataaaagaaacacaaaatatctacaccccatacaaactccccaaaaacgactacaagccattataaaactctgtaaaagtggaaaaatagttccatatatttttattaaggcagtttaaaattaaatccatatcaatgtttaacacaatatagatctaaacgtaaatgtatgtgtaacctagagttaagtactaagtttaatactaaaatactatgaatgtcctacaacctatcagtaatataaaaataattgttttatgtagtatacatcacttaaaattttcataaaaataacctctaccaaatcgtagcaccactggagtggttttctggaacttaatcgttcaatttaattattacgtttaaaaaggttcagtaaatgctttaaaattttcgttgtaagcttagctctctcctatgcccccctcagccgcctccaagtaccagttatccaccctcttagttaaatacatttatttcaaaaaaaaaaatatgttattatatttagcccggtcaaagaacaatctgacccctaaaaaaaataaaggaaggataaaaatttgggaatatgtagttgaaattgtctattaattatacagggtgtcccgaaaagattggtcacaaattacaccacacattctggggtcaaaaatagttcgattgaacctaacttaccttagtacaaatgtgctcataaaaaaagttacagccctttgaagttacaaaatgaaaatcgatttcttttcaatatatcgaaaactattaaagacattttattgaaaatgaacatgtatcattcctatggcaggaaaatcttaaaacaaaattacagtgaaatttgtccac

SEQ ID NO: 1612 - DNA, 960 bp, Diabrotica virgifera
aaaatttgtgctctacaaaatagcgtaggtattaagtttatgtacgaaaattatttaaaaaatatttttgtagttgtgacacaatacagataacacaccaaaaaatttacaaaatatttattaaaagtgattttagcagtacagaatatacagggtgtcccgaaaagattggtcacaaattacaccacacattctggggtcaaaaatagttcgattgaacctaacttaccttagtacaaatgtgctcataaaaaaagttacagccctttgaagttacaaaatgaaaatcgattttttcaatatatcgaaaactattagagatcttattgaaaatggacatgtatcattcttatggcaggaacatcttaaaacaaaattatagtgaaatttgtccaccccataaaaattttatgggggttttgttcccttaaaccaccccaaacttttttgtacgttccaattaattcattattgtggtaccattagttaaacacaacgtttttaaaacttttttgcctcttagtattttttcgataagccagtttttatcgagatgcggcttcttttttaatatgtttacataaaaattttatggggtttttgctcccttaaaccccccagatgtttgtgtacgctccaaccaaaccaccattgcggcaccatcagttaaacacagtgttttaaaacttttgcctcttagtccttattttgataagtcaccttttatcgagatgtggcttctttttcaaaatatacctaataatgtaaattataaataaattttcagattattaacaggtctctataatcgtacgtaaccatatacaaatatgtggtggattcgacaaatattcaaaatatctcgataaacactggcttatcgaaaaagctctgagaggcaaaatgtttcaaaaacagtgtgttcaaccaatggcgccacaccaataattaaattggaac

SEQ ID NO: 1613 - DNA, 933 bp, Diabrotica virgifera
aaaatttgtgctctacaaaatagcgtaggtattaagtttatgtacgaaaattatttaaaaaatatttttgtagttgtgacacaatacagataacacaccaaaaaatttacaaaatatttattaaaagtgattttagcagtacagaatatacagggtgtcccgaaaagattggtcacaaattacaccacacattctggggtcaaaaatagttcgattgaacctaacttaccttagtacaaatgtgctcataaaaaaagttacagccctttgaagttacaaaatgaaaatcgattttttcaatatatcgaaaactattagagatcttattgaaaatggacatgtatcattcttatggcaggaacatcttaaaacaaaattatagtgaaatttgtccaccccataaaaattttatgggggttttgttcccttaaaccaccccaaacttttttgtacgttccaattaattcattattgtggtaccattagttaaacacaacgtttttaaaacttttttgcctcttagtattttttcgataagccagtttttatcgagatgcggcttctttttcaatatatttacgtaaaaattttatgggggttttgttcctttaaaccccccctaatgtttgtgtacgctccaatcaaaccatcattgtggcaccattagttaaacacagtgtttaaaacttttgtctcttagtcttttgttcataagtcaccttttatcgagatgtagcttctttttcaaaatatacctaaaaatgtaaattataaataaattttcagattattaacaggtctctataaccgtacttaaccatatacaaatatgtggtggattcgacaaatattcaaaatatctcgataaacactggcctatccaaaaagtaccaagaggcaaaaaagctccaaaaataatgtgttcaactaata

SEQ ID NO: 1614 - DNA, 882 bp, Diabrotica virgifera
aaaatttgtgctctacaaaatagcgtaggtattaagtttatgtacgaaaattatttaaaaaatatttttgtagttgtgacacaatacagataacacaccaaaaaatttacaaaatatttattaaaagtgattttagcagtacagaatatacagggtgtcccgaaaagattggtcacaaattacaccacacattctggggtcaaaaatagttcgattgaacctaacttaccttagtacaaatgtgctcataaaaaaagttacagccctttgaagttacaaaatgaaaatcgattttttcaatatatcgaaaactattagagatcttattgaaaatggacatgtatcattcttatggcaggaacatcttaaaacaaaattatagtgaaatttgtccaccccataaaaattttatgggggttttgttcccttaaaccaccccaaacttttttgtacgttccaattaattcattattgtggtaccattagttaaacacaacgtttttaaaacttttttgcctcttagtattttttcgataagccagtttttatcgagatgcggcttcttttttaatatgtttacataaaaattttatggggtttttgctcccttaaaccccccagatgtttgtgtacgctccaaccaaaccaccattgcggcaccatcagttaaacacagtgttttaaaacttttgcctcttagtccttattttgataagtcaccttttatcgagatgtggcttctttttcaaaatatacctaataatgtaaattataaataaattttcagattattaacaggtctctataatcgtacgtaaccatatacaaatatgtggtggattcgacaaatattcaaaatatctcgataaacactggcttatc

SEQ ID NO: 1615 - DNA, 1864 bp, Diabrotica virgifera
  SmartBlast Evalue=6E-54; Info=Glutathione S-transferase 5 n=1 Tax=Choristoneura fumiferana RepID=C6ZJZ9_CHOFU
aacacccaacacaaacacagccacacccgtcgcccgtcgcccgttacccgtccggtcaagtcaagtcaaaagctcaaaagctgtgcgtgcgctcaactcctgggttgaaaaatttgaaaaccagaaaacatttgaccagatttgacagacacagaccatatacttaatttagaacaatacaaattagtgtaaagcaaaatgaagcccatcttgtaccacttacctcccagtggaaattccagaggagcattattagcagccaaagtagcaggtgttgatgtagatatacagattgtagatataatgaaaagggaacaattcacagaggcctttttaaagattaatcctcaacatactttacctactttggttgatggagatttaactctctgtgacagtcatgctattgcaggatatctggcaacacaatactcaaaggatgataatttatatcccaaagatccaaaaaagagagctcttgtggatcagagattatactttgactgtggaactttatatccaagactccgagctatatgttttccaattatacataaaggtgaaaccaaaatttatgatgaacatagagcatctttagaagaagctttaggatttttggatgggtttctcgaaggcaatgattttgtaacaggaaaacatctaacaattgctgattgttctttagtaggttcagtatccagtatagtggctataggatgggacgttagtgctcactctaacattgccaattggataacaagatgtgccttggcaattccagattatgaagaagcaaatcaaaagggcgcagatgcatttggccaattagtaggaagtaaattggcccccggacaactgtaaacattgcggtattctgtacttttagataatcctttaaaaaaaaaatttaaaaacaaaaatcaaaaatagatatatatatatgtgtgtatatatatgttgtatatatattatgttatatatatatatatattttataatacttgaatatactgaatgctatcaacagtcccggactggcagactgacccatgggacagtgcgccttttgcatttaccctataaaaaatttaacgctgaaaaaaatgttcatacggaaccttttcagattcaagacttttaatattagtcctgtcgccatggggggtgcaacggcctccttattcggatggacttacccaagtttttgaagatattctttttaggcgcgattcgattgagggtaaaattgtacataaatctgcgcgcctgcgcacacagacagtatgtagttccttgctaatctttcaagataggtgtttatgtatctgtatccgtgcaaataagtcattaaaagaatatattagtgtttttagtaaatgtattatttattataattcttgtgtttttggatttgtgtttctctgtagtaaaataatgaaatatttacactatttgtcgccgtgttgtgtatttatatccgaaacttacatgtcaattagaaggacctcgctggtgtagttgctagggcgttagctccgagattggaatgacgcgggttcgaatcctgggcgattcatatattttttttatttttggttgttttaataaaatttttttgaaagtggtagataagaaagttagtttaatttttaaataaaatacaaataacctgttaagtatatttacttcgttgaaattacctatataatagaagaatatcttcttacgtgcgtacaaagtacacacacattcttttttttatgtggatccgcctttaagccatcaaattaaataaaaaaacattcgctatctttgtcatacaacgcactgagtcgaatagaatatgatgacaagacagtgacaa

SEQ ID NO: 1616 - DNA, 1873 bp, Diabrotica virgifera
  SmartBlast Evalue=4E-12; Info=Probable RNA-directed DNA polymerase from transposon X-element n=1 Tax=Drosophila melanogaster RepID=RTXE_DROME
gctattcattctacgaagaaaacttgtaaaaggaattttttgcttagaatgacccaaattatacaaaaaaatgttttgttttgcgaaaaatcgtttttatgtgatacctcgtacgtatggcatccaaatctggggaactgccagtgaaacaaatttactcaagatacagcgctttcaatcaaaagttctaaggcaactgtgccaagctccttggtacatttccaacgataatatacatagggatctccaagtccaaaccgtcaaagaagaaattgtttctctgtgctccaagtaccacaatagactacaggttcacccaaacatattggtcaccaatctcctgacacccctacagaacagaagactaaaaagaacagacactcttgacctcaacactaactaatcatacccacttttatcactactattgtattactattcagattaattcaattaatttattaatttttaattattaacaatctttattgtactcttttaggtattcaccactgggtgaatactgactgtgtcatactcttaatactcatatgtattgtttattatttttttataaaatagattgcaataaaatggatgccaaaaaaaaatgtgatacctcaagttctttgtttgtaacaatcttatagacatccggatcggctgttgcccgaaggattcgtgttctacgggtcaaaatacataaaaaaacttggataactccatctgaattggggaggccgttgtgcccccactggcgacaggactatatcatcattgatcgtataaatagtagcatgacaaggttttccgaccaaaagcgacttaatcaagatctgtcatgtttggtccaaaaaggtttcccaaattgaaaaaaaaaggtataccaaagggtgtcttataaaaaatatgcaatttagttccattattttatcaagaaatatttgcagaggaacctcaataatttgattgtgtatgtttcttcatcattgaataaatgttatatgaatgaagtttcagatcaattagatcaacaaaatctcgaaaaagaaatagtcatgtaaatcatttatcgatataatattttgtatatacagagcttatcaaagtttataaagtccttttaataattcctctcactcaagtaagttgtatagcaggtttttcgaaaaattattagaaaccaggcttcgatctttgagatggaaaatgaaaatctagaaagtcttcttatgatgcaattaaaaagaaaagtaattgcaagaattgataatattataaataaactatgtaattgactctattattataaatgaactctgtaattattataaactactgaaatctgtcgcctgtctataatgtaaatcgtcaaatttagtcatttaacagatatttggatataacagatatttgaacagttggataaagatactttattttattgttacagagtaataataatattattaatcaacgtggaaatcgaaacgtcaaaataaacttatgtcaaaggaaaactgtggcgtattcttcataaaacaagtaaaaattcttgttatttatttaaattaaaattaaacgtataaaagaaataatattgatttcctctacattcaatagaatttcaagaaacttagcttaggagggggtattttgcctttgtttgcagtttaggttggagcctttttatgagccagtccggccttggttgtaatagtttacaattttttgtgtatatttaaaattttattattaatagtataaacccacattatctggtattaagggcatcaatatttaatgtaatagtgtaagatttggatatcgatggttgtatttgatattttacatgtaatcttaaataaaaacc

SEQ ID NO: 1617 - DNA, 802 bp, Diabrotica virgifera
cctatataatagaagaatatcttcttacgtgcgtacaaagtacacacacacattcttttttatgtgttttgacccgtggaacgcgagttttttgggtgacggttgatccggatgtcgatagattgttgtaaacaaagaacttgaggaattacataacagcgatttttcgcaaaacaaaacatttttttttgggtcattctatcaaaaggattttacaggttttgtcgtagaatgcatagttttcgacataaacgcggttgaacttaaaaaaaatgaaaaattgcaatttttgagcccgaatggcttttgattgaagggtaaaatagcaattctgcttaccgcatttaaaagttcaagtcgaattttatcggttttgattattttcattgctaaaaattaatttttttattgttaaacaaagctataaacacatagtgtttcccgtgcccaatgcatgcgttttaatgtacttaatctacgtagaaattgtctgttgctatttatagctttgtttaacaataaaaaattaatttttggcaatgaaaataatcaaaatactaaaaatgcggtaaacagaattactattttgtttttcggtcaaaagttgttcgggttcaaaaattgcaatttttcgatttttttaaagttcaacctttatgtcgagggctattcattctgcggggaaacttgtaaaattttttgcttagaatgacccaaattatacaaaaaaatgttttgttttgcgaaaaatcgtttttatgtgatacctcgtacgtatggcatccaaatctggggaactgcc

SEQ ID NO: 1618 - DNA, 4322 bp, Diabrotica virgifera
  SmartBlast Evalue=2E-53; Info=Glutathione S-transferase 5 n=1 Tax=Choristoneura fumiferana RepID=C6ZJZ9_CHOFU
aacacccaacacaaacacagccacacccgtcgcccgtcgcccgttacccgtccggtcaagtcaagtcaaaagctcaaaagctgtgcgtgcgctcaactcctgggttgaaaaatttgaaaaccagaaaacatttgaccagatttgacagacacagaccatatacttaatttagaacaatacaaattaggtaaaataagctaattccttctagtattttaactgtttaacttttttaacttgttactttaaaataattgatttaataaaatttgatcagtgtaaagcaaaatgaagcccatcttgtaccacttacctcccagtggaaattccagaggagcattattagcagccaaagtagcaggtgttgatgtagatatacagattgtagatataatgaaaagggaacaattcacagaggcctttttaaagattaatcctcaacatactttacctactttggttgatggagatttaactctctgtgacagtcatgctattgcaggatatctggcaacacaatactcaaaggatgataatttatatcccaaagatccaaaaaagagagctcttgtggatcagagattatactttgactgtggaactttatatccaagactccgagctatatgttttccaattatacataaaggtgaaaccaaaatttatgatgaacatagagcatctttagaagaagctttaggatttttggatgggtttctcgaaggcaatgattttgtaacaggaaaacatctaacaattgctgattgttctttagtaggttcagtatccagtatagtggctataggatgggacgttagtgctcactctaacattgccaattggataacaagatgtgccttggcaattccagattatgaagaagcaaatcaaaagggcgcagatgcatttggccaattagtaggaagtaaattggcccccggacaactgtaaacattgcggtattctgtacttttagataatcctttaaaaaaaaaatttaaaaacaaaaatcaaaaatagatatatatatatgtgtgtatatatatgttgtatatatattatgttatatatatatatatattttataatacttgaatatactgaatgctatcaacagtcccggactggcagactgacccatgggacagtgcgccttttgcatttaccctataaaaaatttaacgctgaaaaaaatgttcatacggaaccttttcagattcaagacttttaatattagtcctgtcgccatggggggtgcaacggcctccttattcggatggacttacccaagtttttgaagatattctttttaggcgcgattcgattgagggtaaaattgtacataaatctgcgcgcctgcgcacacagacagtatgtagttccttgctaatctttcaagataggtgtttatgtatctgtatccgtgcaaataagtcattaaaagaatatattagtgtttttagtaaatgtattatttattataattcttgtgtttttggatttgtgtttctctgtagtaaaataatgaaatatttacactatttgtcgccgtgttgtgtatttatatccgaaacttacatgtcaattagaaggacctcgctggtgtagttgctagggcgttagctccgagattggaatgacgcgggttcgaatcctgggcgattcatatattttttttatttttggttgttttaataaaatttttttgaaagtggtagataagaaagttagtttaatttttaaataaaatacaaataacctgttaagtatatttacttcgttgaaattacctatataatagaagaatatcttcttacgtgcgtacaaagtacacacacattcttttttttatgtattttgacccgtagaacacgaattttttgggtagcagttggtccggatgtcgatagattgttgtaaacaaagaacttgaggaattacataacagcgatttttcgcaaaacaaaacatttttttttgggtcattctatcaaaaggattttacaggttttgtcgtagaatgcatagttttcgacataaacgcggttgaacttaaaaaaaatgaaaaattgcaatttttgagcccgaatggcttttgattgaagggtaaaatagcaattctgcttaccgcatttaaaagttcaagtcgaattttatcggttttgattattttcattgctaaaaattaatttttttattgttaaacaaagctataaacacatagtgtttcccgtgcccaatgcatgcgttttaatgtacttaatctacgtagaaattgtctgttgctatttatagctttgtttaacaataaaaaattaatttttggcaatgaaaataatcaaaatactaaaaatgcggtaaacagaattactattttgtttttcggtcaaaagttgttcgggttcaaaaattgcaatttttcgatttttttaaatcaacctttatgtcgaaaactattcattctacgaaaaaacttgtaaaaaattttttgcttagaatgacccaaattatacaaaaaaatgttttgttttgcgaaaaatcgtttttatgtgatacctcgtacgtatggcatccaaatctggggaactgccagtgaaacaaatttactcaagatacagcgctttcaatcaaaagttctaaggcaactgtgccaagctccttggtacatttccaacgataatatacatagggatctccaagtccaaaccgtcaaagaagaaattgtttctctgtgctccaagtaccacaatagactacaggttcacccaaacatattggtcaccaatctcctgacacccctacagaacagaagactaaaaagaacagacactcttgacctcaacactaactaatcatacccacttttatcactactattgtattactattcagattaattcaattaatttattaatttttaattattaacaatctttattgtactcttttaggtattcaccactgggtgaatactgactgtgtcatactcttaatactcatatgtattgtttattatttttttataaaatagattgcaataaaatggatgccaaaaaaaaatgtgatacctcaagttctttgtttgtaacaatcttatagacatccggatcggctgttgcccgaaggattcgtgttctacgggtcaaaatacataaaaaaacttggataactccatctgaattggggaggccgttgtgcccccactggcgacaggactatatcatcattgatcgtataaatagtagcatgacaaggttttccgaccaaaagcgacttaatcaagatctgtcatgtttggtccaaaaaggtttcccaaattgaaaaaaaaaggtataccaaagggtgtcttataaaaaatatgcaatttagttccattattttatcaagaaatatttgcagaggaacctcaataatttgattgtgtatgtttcttcatcattgaataaatgttatatgaatgaagtttcagatcaattagatcaacaaaatctcgaaaaagaaatagtcatgtaaatcatttatcgatataatattttgtatatacagagcttatcaaagtttataaagtccttttaataattcctctcactcaagtaagttgtatagcaggtttttcgaaaaattattagaaaccaggcttcgatctttgagatggaaaatgaaaatctagaaagtcttcttatgatgcaattaaaaagaaaagtaattgcaagaattgataatattataaataaactatgtaattgactctattattataaatgaactctgtaattattataaactactgaaatctgtcgcctgtctataatgtaaatcgtcaaatttagtcatttaacagatatttggatataacagatatttgaacagttggataaagatactttattttattgttacagagtaataataatattattaatcaacgtggaaatcgaaacgtcaaaataaacttatgtcaaaggaaaactgtggcgtattcttcataaaacaagtaaaaattcttgttatttatttaaattaaaattaaacgtataaaagaaataatattgatttcctctacattcaatagaatttcaagaaacttagcttaggagggggtattttgcctttgtttgcagtttaggttggagcctttttatgagccagtccggccttggttgtaatagtttacaattttttgtgtatatttaaaattttattattaatagtataaacccacattatctggtattaagggcatcaatatttaatgtaatagtgtaagatttggatatcgatggttgtatttgatattttacatgtaatcttaaataaaaacc

SEQ ID NO: 1619 - DNA, 4320 bp, Diabrotica virgifera
  SmartBlast Evalue=2E-53; Info=Glutathione S-transferase 5 n=1 Tax=Choristoneura fumiferana RepID=C6ZJZ9_CHOFU
aacacccaacacaaacacagccacacccgtcgcccgtcgcccgttacccgtccggtcaagtcaagtcaaaagctcaaaagctgtgcgtgcgctcaactcctgggttgaaaaatttgaaaaccagaaaacatttgaccagatttgacagacacagaccatatacttaatttagaacaatacaaattaggtaaaataagctaattccttctagtattttaactgtttaacttttttaacttgttactttaaaataattgatttaataaaatttgatcagtgtaaagcaaaatgaagcccatcttgtaccacttacctcccagtggaaattccagaggagcattattagcagccaaagtagcaggtgttgatgtagatatacagattgtagatataatgaaaagggaacaattcacagaggcctttttaaagattaatcctcaacatactttacctactttggttgatggagatttaactctctgtgacagtcatgctattgcaggatatctggcaacacaatactcaaaggatgataatttatatcccaaagatccaaaaaagagagctcttgtggatcagagattatactttgactgtggaactttatatccaagactccgagctatatgttttccaattatacataaaggtgaaaccaaaatttatgatgaacatagagcatctttagaagaagctttaggatttttggatgggtttctcgaaggcaatgattttgtaacaggaaaacatctaacaattgctgattgttctttagtaggttcagtatccagtatagtggctataggatgggacgttagtgctcactctaacattgccaattggataacaagatgtgccttggcaattccagattatgaagaagcaaatcaaaagggcgcagatgcatttggccaattagtaggaagtaaattggcccccggacaactgtaaacattgcggtattctgtacttttagataatcctttaaaaaaaaaatttaaaaacaaaaatcaaaaatagatatatatatatgtgtgtatatatatgttgtatatatattatgttatatatatatatatattttataatacttgaatatactgaatgctatcaacagtcccggactggcagactgacccatgggacagtgcgccttttgcatttaccctataaaaaatttaacgctgaaaaaaatgttcatacggaaccttttcagattcaagacttttaatattagtcctgtcgccatggggggtgcaacggcctccttattcggatggacttacccaagtttttgaagatattctttttaggcgcgattcgattgagggtaaaattgtacataaatctgcgcgcctgcgcacacagacagtatgtagttccttgctaatctttcaagataggtgtttatgtatctgtatccgtgcaaataagtcattaaaagaatatattagtgtttttagtaaatgtattatttattataattcttgtgtttttggatttgtgtttctctgtagtaaaataatgaaatatttacactatttgtcgccgtgttgtgtatttatatccgaaacttacatgtcaattagaaggacctcgctggtgtagttgctagggcgttagctccgagattggaatgacgcgggttcgaatcctgggcgattcatatattttttttatttttggttgttttaataaaatttttttgaaagtggtagataagaaagttagtttaatttttaaataaaatacaaataacctgttaagtatatttacttcgttgaaattacctatataatagaagaatatcttcttacgtgcgtacaaagtacacacacattcttttttttatgtattttgacccgtagaacacgaattttttgggtagcagttggtccggatgtcgatagattgttgtaaacaaagaacttgaggaattacataacagcgatttttcgcaaaacaaaacatttttttttgggtcattctatcaaaaggattttacaggttttgtcgtagaatgcatagttttcgacataaacgcggttgaacttaaaaaaaatgaaaaattgcaatttttgagcccgaatggcttttgattgaagggtaaaatagcaattctgcttaccgcatttaaaagttcaagtcgaattttatcggttttgattattttcattgctaaaaattaatttttttattgttaaacaaagctataaacacatagtgtttcccgtgcccaatgcatgcgttttaatgtacttaatctacgtagaaattgtctgttgctatttatagctttgtttaacaataaaaaattaatttttggcaatgaaaataatcaaaatactaaaaatgcggtaaacagaattgctattttgttttcggtcaaaagttgttcgggttcagaagttgcaatttttcgattttttaaatcaacctttatgtcgaaaactattcattctacgaaaaaacttgtaaaaaattttttgcttagaatgacccaaattatacaaaaaaatgttttgttttgcgaaaaatcgtttttatgtgatacctcgtacgtatggcatccaaatctggggaactgccagtgaaacaaatttactcaagatacagcgctttcaatcaaaagttctaaggcaactgtgccaagctccttggtacatttccaacgataatatacatagggatctccaagtccaaaccgtcaaagaagaaattgtttctctgtgctccaagtaccacaatagactacaggttcacccaaacatattggtcaccaatctcctgacacccctacagaacagaagactaaaaagaacagacactcttgacctcaacactaactaatcatacccacttttatcactactattgtattactattcagattaattcaattaatttattaatttttaattattaacaatctttattgtactcttttaggtattcaccactgggtgaatactgactgtgtcatactcttaatactcatatgtattgtttattatttttttataaaatagattgcaataaaatggatgccaaaaaaaaatgtgatacctcaagttctttgtttgtaacaatcttatagacatccggatcggctgttgcccgaaggattcgtgttctacgggtcaaaatacataaaaaaacttggataactccatctgaattggggaggccgttgtgcccccactggcgacaggactatatcatcattgatcgtataaatagtagcatgacaaggttttccgaccaaaagcgacttaatcaagatctgtcatgtttggtccaaaaaggtttcccaaattgaaaaaaaaaggtataccaaagggtgtcttataaaaaatatgcaatttagttccattattttatcaagaaatatttgcagaggaacctcaataatttgattgtgtatgtttcttcatcattgaataaatgttatatgaatgaagtttcagatcaattagatcaacaaaatctcgaaaaagaaatagtcatgtaaatcatttatcgatataatattttgtatatacagagcttatcaaagtttataaagtccttttaataattcctctcactcaagtaagttgtatagcaggtttttcgaaaaattattagaaaccaggcttcgatctttgagatggaaaatgaaaatctagaaagtcttcttatgatgcaattaaaaagaaaagtaattgcaagaattgataatattataaataaactatgtaattgactctattattataaatgaactctgtaattattataaactactgaaatctgtcgcctgtctataatgtaaatcgtcaaatttagtcatttaacagatatttggatataacagatatttgaacagttggataaagatactttattttattgttacagagtaataataatattattaatcaacgtggaaatcgaaacgtcaaaataaacttatgtcaaaggaaaactgtggcgtattcttcataaaacaagtaaaaattcttgttatttatttaaattaaaattaaacgtataaaagaaataatattgatttcctctacattcaatagaatttcaagaaacttagcttaggagggggtattttgcctttgtttgcagtttaggttggagcctttttatgagccagtccggccttggttgtaatagtttacaattttttgtgtatatttaaaattttattattaatagtataaacccacattatctggtattaagggcatcaatatttaatgtaatagtgtaagatttggatatcgatggttgtatttgatattttacatgtaatcttaaataaaaacc

SEQ ID NO: 1620 - DNA, 4232 bp, Diabrotica virgifera
  SmartBlast Evalue=1E-53; Info=Glutathione S-transferase 5 n=1 Tax=Choristoneura fumiferana RepID=C6ZJZ9_CHOFU
aacacccaacacaaacacagccacacccgtcgcccgtcgcccgttacccgtccggtcaagtcaagtcaaaagctcaaaagctgtgcgtgcgctcaactcctgggttgaaaaatttgaaaaccagaaaacatttgaccagatttgacagacacagaccatatacttaatttagaacaatacaaattagtgtaaagcaaaatgaagcccatcttgtaccacttacctcccagtggaaattccagaggagcattattagcagccaaagtagcaggtgttgatgtagatatacagattgtagatataatgaaaagggaacaattcacagaggcctttttaaagattaatcctcaacatactttacctactttggttgatggagatttaactctctgtgacagtcatgctattgcaggatatctggcaacacaatactcaaaggatgataatttatatcccaaagatccaaaaaagagagctcttgtggatcagagattatactttgactgtggaactttatatccaagactccgagctatatgttttccaattatacataaaggtgaaaccaaaatttatgatgaacatagagcatctttagaagaagctttaggatttttggatgggtttctcgaaggcaatgattttgtaacaggaaaacatctaacaattgctgattgttctttagtaggttcagtatccagtatagtggctataggatgggacgttagtgctcactctaacattgccaattggataacaagatgtgccttggcaattccagattatgaagaagcaaatcaaaagggcgcagatgcatttggccaattagtaggaagtaaattggcccccggacaactgtaaacattgcggtattctgtacttttagataatcctttaaaaaaaaaatttaaaaacaaaaatcaaaaatagatatatatatatgtgtgtatatatatgttgtatatatattatgttatatatatatatatattttataatacttgaatatactgaatgctatcaacagtcccggactggcagactgacccatgggacagtgcgccttttgcatttaccctataaaaaatttaacgctgaaaaaaatgttcatacggaaccttttcagattcaagacttttaatattagtcctgtcgccatggggggtgcaacggcctccttattcggatggacttacccaagtttttgaagatattctttttaggcgcgattcgattgagggtaaaattgtacataaatctgcgcgcctgcgcacacagacagtatgtagttccttgctaatctttcaagataggtgtttatgtatctgtatccgtgcaaataagtcattaaaagaatatattagtgtttttagtaaatgtattatttattataattcttgtgtttttggatttgtgtttctctgtagtaaaataatgaaatatttacactatttgtcgccgtgttgtgtatttatatccgaaacttacatgtcaattagaaggacctcgctggtgtagttgctagggcgttagctccgagattggaatgacgcgggttcgaatcctgggcgattcatatattttttttatttttggttgttttaataaaatttttttgaaagtggtagataagaaagttagtttaatttttaaataaaatacaaataacctgttaagtatatttacttcgttgaaattacctatataatagaagaatatcttcttacgtgcgtacaaagtacacacacattcttttttttatgtattttgacccgtagaacacgaattttttgggtagcagttggtccggatgtcgatagattgttgtaaacaaagaacttgaggaattacataacagcgatttttcgcaaaacaaaacatttttttttgggtcattctatcaaaaggattttacaggttttgtcgtagaatgcatagttttcgacataaacgcggttgaacttaaaaaaaatgaaaaattgcaatttttgagcccgaatggcttttgattgaagggtaaaatagcaattctgcttaccgcatttaaaagttcaagtcgaattttatcggttttgattattttcattgctaaaaattaatttttttattgttaaacaaagctataaacacatagtgtttcccgtgcccaatgcatgcgttttaatgtacttaatctacgtagaaattgtctgttgctatttatagctttgtttaacaataaaaaattaatttttggcaatgaaaataatcaaaatactaaaaatgcggtaaacagaattactattttgtttttcggtcaaaagttgttcgggttcaaaaattgcaatttttcgatttttttaaatcaacctttatgtcgaaaactattcattctacgaaaaaacttgtaaaaaattttttgcttagaatgacccaaattatacaaaaaaatgttttgttttgcgaaaaatcgtttttatgtgatacctcgtacgtatggcatccaaatctggggaactgccagtgaaacaaatttactcaagatacagcgctttcaatcaaaagttctaaggcaactgtgccaagctccttggtacatttccaacgataatatacatagggatctccaagtccaaaccgtcaaagaagaaattgtttctctgtgctccaagtaccacaatagactacaggttcacccaaacatattggtcaccaatctcctgacacccctacagaacagaagactaaaaagaacagacactcttgacctcaacactaactaatcatacccacttttatcactactattgtattactattcagattaattcaattaatttattaatttttaattattaacaatctttattgtactcttttaggtattcaccactgggtgaatactgactgtgtcatactcttaatactcatatgtattgtttattatttttttataaaatagattgcaataaaatggatgccaaaaaaaaatgtgatacctcaagttctttgtttgtaacaatcttatagacatccggatcggctgttgcccgaaggattcgtgttctacgggtcaaaatacataaaaaaacttggataactccatctgaattggggaggccgttgtgcccccactggcgacaggactatatcatcattgatcgtataaatagtagcatgacaaggttttccgaccaaaagcgacttaatcaagatctgtcatgtttggtccaaaaaggtttcccaaattgaaaaaaaaaggtataccaaagggtgtcttataaaaaatatgcaatttagttccattattttatcaagaaatatttgcagaggaacctcaataatttgattgtgtatgtttcttcatcattgaataaatgttatatgaatgaagtttcagatcaattagatcaacaaaatctcgaaaaagaaatagtcatgtaaatcatttatcgatataatattttgtatatacagagcttatcaaagtttataaagtccttttaataattcctctcactcaagtaagttgtatagcaggtttttcgaaaaattattagaaaccaggcttcgatctttgagatggaaaatgaaaatctagaaagtcttcttatgatgcaattaaaaagaaaagtaattgcaagaattgataatattataaataaactatgtaattgactctattattataaatgaactctgtaattattataaactactgaaatctgtcgcctgtctataatgtaaatcgtcaaatttagtcatttaacagatatttggatataacagatatttgaacagttggataaagatactttattttattgttacagagtaataataatattattaatcaacgtggaaatcgaaacgtcaaaataaacttatgtcaaaggaaaactgtggcgtattcttcataaaacaagtaaaaattcttgttatttatttaaattaaaattaaacgtataaaagaaataatattgatttcctctacattcaatagaatttcaagaaacttagcttaggagggggtattttgcctttgtttgcagtttaggttggagcctttttatgagccagtccggccttggttgtaatagtttacaattttttgtgtatatttaaaattttattattaatagtataaacccacattatctggtattaagggcatcaatatttaatgtaatagtgtaagatttggatatcgatggttgtatttgatattttacatgtaatcttaaataaaaacc

SEQ ID NO: 1621 - DNA, 4230 bp, Diabrotica virgifera
  SmartBlast Evalue=1E-53; Info=Glutathione S-transferase 5 n=1 Tax=Choristoneura fumiferana RepID=C6ZJZ9_CHOFU
aacacccaacacaaacacagccacacccgtcgcccgtcgcccgttacccgtccggtcaagtcaagtcaaaagctcaaaagctgtgcgtgcgctcaactcctgggttgaaaaatttgaaaaccagaaaacatttgaccagatttgacagacacagaccatatacttaatttagaacaatacaaattagtgtaaagcaaaatgaagcccatcttgtaccacttacctcccagtggaaattccagaggagcattattagcagccaaagtagcaggtgttgatgtagatatacagattgtagatataatgaaaagggaacaattcacagaggcctttttaaagattaatcctcaacatactttacctactttggttgatggagatttaactctctgtgacagtcatgctattgcaggatatctggcaacacaatactcaaaggatgataatttatatcccaaagatccaaaaaagagagctcttgtggatcagagattatactttgactgtggaactttatatccaagactccgagctatatgttttccaattatacataaaggtgaaaccaaaatttatgatgaacatagagcatctttagaagaagctttaggatttttggatgggtttctcgaaggcaatgattttgtaacaggaaaacatctaacaattgctgattgttctttagtaggttcagtatccagtatagtggctataggatgggacgttagtgctcactctaacattgccaattggataacaagatgtgccttggcaattccagattatgaagaagcaaatcaaaagggcgcagatgcatttggccaattagtaggaagtaaattggcccccggacaactgtaaacattgcggtattctgtacttttagataatcctttaaaaaaaaaatttaaaaacaaaaatcaaaaatagatatatatatatgtgtgtatatatatgttgtatatatattatgttatatatatatatatattttataatacttgaatatactgaatgctatcaacagtcccggactggcagactgacccatgggacagtgcgccttttgcatttaccctataaaaaatttaacgctgaaaaaaatgttcatacggaaccttttcagattcaagacttttaatattagtcctgtcgccatggggggtgcaacggcctccttattcggatggacttacccaagtttttgaagatattctttttaggcgcgattcgattgagggtaaaattgtacataaatctgcgcgcctgcgcacacagacagtatgtagttccttgctaatctttcaagataggtgtttatgtatctgtatccgtgcaaataagtcattaaaagaatatattagtgtttttagtaaatgtattatttattataattcttgtgtttttggatttgtgtttctctgtagtaaaataatgaaatatttacactatttgtcgccgtgttgtgtatttatatccgaaacttacatgtcaattagaaggacctcgctggtgtagttgctagggcgttagctccgagattggaatgacgcgggttcgaatcctgggcgattcatatattttttttatttttggttgttttaataaaatttttttgaaagtggtagataagaaagttagtttaatttttaaataaaatacaaataacctgttaagtatatttacttcgttgaaattacctatataatagaagaatatcttcttacgtgcgtacaaagtacacacacattcttttttttatgtattttgacccgtagaacacgaattttttgggtagcagttggtccggatgtcgatagattgttgtaaacaaagaacttgaggaattacataacagcgatttttcgcaaaacaaaacatttttttttgggtcattctatcaaaaggattttacaggttttgtcgtagaatgcatagttttcgacataaacgcggttgaacttaaaaaaaatgaaaaattgcaatttttgagcccgaatggcttttgattgaagggtaaaatagcaattctgcttaccgcatttaaaagttcaagtcgaattttatcggttttgattattttcattgctaaaaattaatttttttattgttaaacaaagctataaacacatagtgtttcccgtgcccaatgcatgcgttttaatgtacttaatctacgtagaaattgtctgttgctatttatagctttgtttaacaataaaaaattaatttttggcaatgaaaataatcaaaatactaaaaatgcggtaaacagaattgctattttgttttcggtcaaaagttgttcgggttcagaagttgcaatttttcgattttttaaatcaacctttatgtcgaaaactattcattctacgaaaaaacttgtaaaaaattttttgcttagaatgacccaaattatacaaaaaaatgttttgttttgcgaaaaatcgtttttatgtgatacctcgtacgtatggcatccaaatctggggaactgccagtgaaacaaatttactcaagatacagcgctttcaatcaaaagttctaaggcaactgtgccaagctccttggtacatttccaacgataatatacatagggatctccaagtccaaaccgtcaaagaagaaattgtttctctgtgctccaagtaccacaatagactacaggttcacccaaacatattggtcaccaatctcctgacacccctacagaacagaagactaaaaagaacagacactcttgacctcaacactaactaatcatacccacttttatcactactattgtattactattcagattaattcaattaatttattaatttttaattattaacaatctttattgtactcttttaggtattcaccactgggtgaatactgactgtgtcatactcttaatactcatatgtattgtttattatttttttataaaatagattgcaataaaatggatgccaaaaaaaaatgtgatacctcaagttctttgtttgtaacaatcttatagacatccggatcggctgttgcccgaaggattcgtgttctacgggtcaaaatacataaaaaaacttggataactccatctgaattggggaggccgttgtgcccccactggcgacaggactatatcatcattgatcgtataaatagtagcatgacaaggttttccgaccaaaagcgacttaatcaagatctgtcatgtttggtccaaaaaggtttcccaaattgaaaaaaaaaggtataccaaagggtgtcttataaaaaatatgcaatttagttccattattttatcaagaaatatttgcagaggaacctcaataatttgattgtgtatgtttcttcatcattgaataaatgttatatgaatgaagtttcagatcaattagatcaacaaaatctcgaaaaagaaatagtcatgtaaatcatttatcgatataatattttgtatatacagagcttatcaaagtttataaagtccttttaataattcctctcactcaagtaagttgtatagcaggtttttcgaaaaattattagaaaccaggcttcgatctttgagatggaaaatgaaaatctagaaagtcttcttatgatgcaattaaaaagaaaagtaattgcaagaattgataatattataaataaactatgtaattgactctattattataaatgaactctgtaattattataaactactgaaatctgtcgcctgtctataatgtaaatcgtcaaatttagtcatttaacagatatttggatataacagatatttgaacagttggataaagatactttattttattgttacagagtaataataatattattaatcaacgtggaaatcgaaacgtcaaaataaacttatgtcaaaggaaaactgtggcgtattcttcataaaacaagtaaaaattcttgttatttatttaaattaaaattaaacgtataaaagaaataatattgatttcctctacattcaatagaatttcaagaaacttagcttaggagggggtattttgcctttgtttgcagtttaggttggagcctttttatgagccagtccggccttggttgtaatagtttacaattttttgtgtatatttaaaattttattattaatagtataaacccacattatctggtattaagggcatcaatatttaatgtaatagtgtaagatttggatatcgatggttgtatttgatattttacatgtaatcttaaataaaaacc

SEQ ID NO: 1622 - DNA, 2591 bp, Diabrotica virgifera
  SmartBlast Evalue=9E-54; Info=Glutathione S-transferase 5 n=1 Tax=Choristoneura fumiferana RepID=C6ZJZ9_CHOFU
aacacccaacacaaacacagccacacccgtcgcccgtcgcccgttacccgtccggtcaagtcaagtcaaaagctcaaaagctgtgcgtgcgctcaactcctgggttgaaaaatttgaaaaccagaaaacatttgaccagatttgacagacacagaccatatacttaatttagaacaatacaaattaggtaaaataagctaattccttctagtattttaactgtttaacttttttaacttgttactttaaaataattgatttaataaaatttgatcagtgtaaagcaaaatgaagcccatcttgtaccacttacctcccagtggaaattccagaggagcattattagcagccaaagtagcaggtgttgatgtagatatacagattgtagatataatgaaaagggaacaattcacagaggcctttttaaagattaatcctcaacatactttacctactttggttgatggagatttaactctctgtgacagtcatgctattgcaggatatctggcaacacaatactcaaaggatgataatttatatcccaaagatccaaaaaagagagctcttgtggatcagagattatactttgactgtggaactttatatccaagactccgagctatatgttttccaattatacataaaggtgaaaccaaaatttatgatgaacatagagcatctttagaagaagctttaggatttttggatgggtttctcgaaggcaatgattttgtaacaggaaaacatctaacaattgctgattgttctttagtaggttcagtatccagtatagtggctataggatgggacgttagtgctcactctaacattgccaattggataacaagatgtgccttggcaattccagattatgaagaagcaaatcaaaagggcgcagatgcatttggccaattagtaggaagtaaattggcccccggacaactgtaaacattgcggtattctgtacttttagataatcctttaaaaaaaaaatttaaaaacaaaaatcaaaaatagatatatatatatgtgtgtatatatatgttgtatatatattatgttatatatatatatatattttataatacttgaatatactgaatgctatcaacagtcccggactggcagactgacccatgggacagtgcgccttttgcatttaccctataaaaaatttaacgctgaaaaaaatgttcatacggaaccttttcagattcaagacttttaatattagtcctgtcgccatggggggtgcaacggcctccttattcggatggacttacccaagtttttgaagatattctttttaggcgcgattcgattgagggtaaaattgtacataaatctgcgcgcctgcgcacacagacagtatgtagttccttgctaatctttcaagataggtgtttatgtatctgtatccgtgcaaataagtcattaaaagaatatattagtgtttttagtaaatgtattatttattataattcttgtgtttttggatttgtgtttctctgtagtaaaataatgaaatatttacactatttgtcgccgtgttgtgtatttatatccgaaacttacatgtcaattagaaggacctcgctggtgtagttgctagggcgttagctccgagattggaatgacgcgggttcgaatcctgggcgattcatatattttttttatttttggttgttttaataaaatttttttgaaagtggtagataagaaagttagtttaatttttaaataaaatacaaataacctgttaagtatatttacttcgttgaaattacctatataatagaagaatatcttcttacgtgcgtacaaagtacacacacattcttttttttatgtattttgacccgtagaacacgaattttttgggtagcagttggtccggatgtcgatagattgttgtaaacaaagaacttgaggaattacataacagcgatttttcgcaaaacaaaacatttttttttgggtcattctatcaaaaggattttacaggttttgtcgtagaatgcatagttttcgacataaacgcggttgaacttaaaaaaaatgaaaaattgcaatttttgagcccgaatggcttttgattgaagggtaaaatagcaattctgcttaccgcatttaaaagttcaagtcgaattttatcggttttgattattttcattgctaaaaattaatttttttattgttaaacaaagctataaacacatagtgtttcccgtgcccaatgcatgcgttttaatgtacttaatctacgtagaaattgtctgttgctatttatagctttgtttaacaataaaaaattaatttttggcaatgaaaataatcaaaatactaaaaatgcggtaaacagaattactattttgtttttcggtcaaaagttgttcgggttcaaaaattgcaatttttcgatttttttaaagttcaacctttatgtcgagggctattcattctgcggggaaacttgtaaaattttttgcttagaatgacccaaattatacaaaaaaatgttttgttttgcgaaaaatcgtttttatgtgatacctcgtacgtatggcatccaaatctggggaactgcc

SEQ ID NO: 1623 - DNA, 2501 bp, Diabrotica virgifera
  SmartBlast Evalue=8E-54; Info=Glutathione S-transferase 5 n=1 Tax=Choristoneura fumiferana RepID=C6ZJZ9_CHOFU
aacacccaacacaaacacagccacacccgtcgcccgtcgcccgttacccgtccggtcaagtcaagtcaaaagctcaaaagctgtgcgtgcgctcaactcctgggttgaaaaatttgaaaaccagaaaacatttgaccagatttgacagacacagaccatatacttaatttagaacaatacaaattagtgtaaagcaaaatgaagcccatcttgtaccacttacctcccagtggaaattccagaggagcattattagcagccaaagtagcaggtgttgatgtagatatacagattgtagatataatgaaaagggaacaattcacagaggcctttttaaagattaatcctcaacatactttacctactttggttgatggagatttaactctctgtgacagtcatgctattgcaggatatctggcaacacaatactcaaaggatgataatttatatcccaaagatccaaaaaagagagctcttgtggatcagagattatactttgactgtggaactttatatccaagactccgagctatatgttttccaattatacataaaggtgaaaccaaaatttatgatgaacatagagcatctttagaagaagctttaggatttttggatgggtttctcgaaggcaatgattttgtaacaggaaaacatctaacaattgctgattgttctttagtaggttcagtatccagtatagtggctataggatgggacgttagtgctcactctaacattgccaattggataacaagatgtgccttggcaattccagattatgaagaagcaaatcaaaagggcgcagatgcatttggccaattagtaggaagtaaattggcccccggacaactgtaaacattgcggtattctgtacttttagataatcctttaaaaaaaaaatttaaaaacaaaaatcaaaaatagatatatatatatgtgtgtatatatatgttgtatatatattatgttatatatatatatatattttataatacttgaatatactgaatgctatcaacagtcccggactggcagactgacccatgggacagtgcgccttttgcatttaccctataaaaaatttaacgctgaaaaaaatgttcatacggaaccttttcagattcaagacttttaatattagtcctgtcgccatggggggtgcaacggcctccttattcggatggacttacccaagtttttgaagatattctttttaggcgcgattcgattgagggtaaaattgtacataaatctgcgcgcctgcgcacacagacagtatgtagttccttgctaatctttcaagataggtgtttatgtatctgtatccgtgcaaataagtcattaaaagaatatattagtgtttttagtaaatgtattatttattataattcttgtgtttttggatttgtgtttctctgtagtaaaataatgaaatatttacactatttgtcgccgtgttgtgtatttatatccgaaacttacatgtcaattagaaggacctcgctggtgtagttgctagggcgttagctccgagattggaatgacgcgggttcgaatcctgggcgattcatatattttttttatttttggttgttttaataaaatttttttgaaagtggtagataagaaagttagtttaatttttaaataaaatacaaataacctgttaagtatatttacttcgttgaaattacctatataatagaagaatatcttcttacgtgcgtacaaagtacacacacattcttttttttatgtattttgacccgtagaacacgaattttttgggtagcagttggtccggatgtcgatagattgttgtaaacaaagaacttgaggaattacataacagcgatttttcgcaaaacaaaacatttttttttgggtcattctatcaaaaggattttacaggttttgtcgtagaatgcatagttttcgacataaacgcggttgaacttaaaaaaaatgaaaaattgcaatttttgagcccgaatggcttttgattgaagggtaaaatagcaattctgcttaccgcatttaaaagttcaagtcgaattttatcggttttgattattttcattgctaaaaattaatttttttattgttaaacaaagctataaacacatagtgtttcccgtgcccaatgcatgcgttttaatgtacttaatctacgtagaaattgtctgttgctatttatagctttgtttaacaataaaaaattaatttttggcaatgaaaataatcaaaatactaaaaatgcggtaaacagaattactattttgtttttcggtcaaaagttgttcgggttcaaaaattgcaatttttcgatttttttaaagttcaacctttatgtcgagggctattcattctgcggggaaacttgtaaaattttttgcttagaatgacccaaattatacaaaaaaatgttttgttttgcgaaaaatcgtttttatgtgatacctcgtacgtatggcatccaaatctggggaactgcc

SEQ ID NO: 1624 - DNA, 2533 bp, Diabrotica virgifera
  SmartBlast Evalue=6E-12; Info=Probable RNA-directed DNA polymerase from transposon X-element n=1 Tax=Drosophila melanogaster RepID=RTXE_DROME
cctatataatagaagaatatcttcttacgtgcgtacaaagtacacacacacattcttttttatgtgttttgacccgtggaacgcgagttttttgggtgacggttgatccggatgtcgatagattgttgtaaacaaagaacttgaggaattacataacagcgatttttcgcaaaacaaaacatttttttttgggtcattctatcaaaaggattttacaggttttgtcgtagaatgcatagttttcgacataaacgcggttgaacttaaaaaaaatgaaaaattgcaatttttgagcccgaatggcttttgattgaagggtaaaatagcaattctgcttaccgcatttaaaagttcaagtcgaattttatcggttttgattattttcattgctaaaaattaatttttttattgttaaacaaagctataaacacatagtgtttcccgtgcccaatgcatgcgttttaatgtacttaatctacgtagaaattgtctgttgctatttatagctttgtttaacaataaaaaattaatttttggcaatgaaaataatcaaaatactaaaaatgcggtaaacagaattactattttgtttttcggtcaaaagttgttcgggttcaaaaattgcaatttttcgatttttttaaatcaacctttatgtcgaaaactattcattctacgaaaaaacttgtaaaaaattttttgcttagaatgacccaaattatacaaaaaaatgttttgttttgcgaaaaatcgtttttatgtgatacctcgtacgtatggcatccaaatctggggaactgccagtgaaacaaatttactcaagatacagcgctttcaatcaaaagttctaaggcaactgtgccaagctccttggtacatttccaacgataatatacatagggatctccaagtccaaaccgtcaaagaagaaattgtttctctgtgctccaagtaccacaatagactacaggttcacccaaacatattggtcaccaatctcctgacacccctacagaacagaagactaaaaagaacagacactcttgacctcaacactaactaatcatacccacttttatcactactattgtattactattcagattaattcaattaatttattaatttttaattattaacaatctttattgtactcttttaggtattcaccactgggtgaatactgactgtgtcatactcttaatactcatatgtattgtttattatttttttataaaatagattgcaataaaatggatgccaaaaaaaaatgtgatacctcaagttctttgtttgtaacaatcttatagacatccggatcggctgttgcccgaaggattcgtgttctacgggtcaaaatacataaaaaaacttggataactccatctgaattggggaggccgttgtgcccccactggcgacaggactatatcatcattgatcgtataaatagtagcatgacaaggttttccgaccaaaagcgacttaatcaagatctgtcatgtttggtccaaaaaggtttcccaaattgaaaaaaaaaggtataccaaagggtgtcttataaaaaatatgcaatttagttccattattttatcaagaaatatttgcagaggaacctcaataatttgattgtgtatgtttcttcatcattgaataaatgttatatgaatgaagtttcagatcaattagatcaacaaaatctcgaaaaagaaatagtcatgtaaatcatttatcgatataatattttgtatatacagagcttatcaaagtttataaagtccttttaataattcctctcactcaagtaagttgtatagcaggtttttcgaaaaattattagaaaccaggcttcgatctttgagatggaaaatgaaaatctagaaagtcttcttatgatgcaattaaaaagaaaagtaattgcaagaattgataatattataaataaactatgtaattgactctattattataaatgaactctgtaattattataaactactgaaatctgtcgcctgtctataatgtaaatcgtcaaatttagtcatttaacagatatttggatataacagatatttgaacagttggataaagatactttattttattgttacagagtaataataatattattaatcaacgtggaaatcgaaacgtcaaaataaacttatgtcaaaggaaaactgtggcgtattcttcataaaacaagtaaaaattcttgttatttatttaaattaaaattaaacgtataaaagaaataatattgatttcctctacattcaatagaatttcaagaaacttagcttaggagggggtattttgcctttgtttgcagtttaggttggagcctttttatgagccagtccggccttggttgtaatagtttacaattttttgtgtatatttaaaattttattattaatagtataaacccacattatctggtattaagggcatcaatatttaatgtaatagtgtaagatttggatatcgatggttgtatttgatattttacatgtaatcttaaataaaaacc

SEQ ID NO: 1625 - DNA, 2531 bp, Diabrotica virgifera
  SmartBlast Evalue=6E-12; Info=Probable RNA-directed DNA polymerase from transposon X-element n=1 Tax=Drosophila melanogaster RepID=RTXE_DROME
cctatataatagaagaatatcttcttacgtgcgtacaaagtacacacacacattcttttttatgtgttttgacccgtggaacgcgagttttttgggtgacggttgatccggatgtcgatagattgttgtaaacaaagaacttgaggaattacataacagcgatttttcgcaaaacaaaacatttttttttgggtcattctatcaaaaggattttacaggttttgtcgtagaatgcatagttttcgacataaacgcggttgaacttaaaaaaaatgaaaaattgcaatttttgagcccgaatggcttttgattgaagggtaaaatagcaattctgcttaccgcatttaaaagttcaagtcgaattttatcggttttgattattttcattgctaaaaattaatttttttattgttaaacaaagctataaacacatagtgtttcccgtgcccaatgcatgcgttttaatgtacttaatctacgtagaaattgtctgttgctatttatagctttgtttaacaataaaaaattaatttttggcaatgaaaataatcaaaatactaaaaatgcggtaaacagaattgctattttgttttcggtcaaaagttgttcgggttcagaagttgcaatttttcgattttttaaatcaacctttatgtcgaaaactattcattctacgaaaaaacttgtaaaaaattttttgcttagaatgacccaaattatacaaaaaaatgttttgttttgcgaaaaatcgtttttatgtgatacctcgtacgtatggcatccaaatctggggaactgccagtgaaacaaatttactcaagatacagcgctttcaatcaaaagttctaaggcaactgtgccaagctccttggtacatttccaacgataatatacatagggatctccaagtccaaaccgtcaaagaagaaattgtttctctgtgctccaagtaccacaatagactacaggttcacccaaacatattggtcaccaatctcctgacacccctacagaacagaagactaaaaagaacagacactcttgacctcaacactaactaatcatacccacttttatcactactattgtattactattcagattaattcaattaatttattaatttttaattattaacaatctttattgtactcttttaggtattcaccactgggtgaatactgactgtgtcatactcttaatactcatatgtattgtttattatttttttataaaatagattgcaataaaatggatgccaaaaaaaaatgtgatacctcaagttctttgtttgtaacaatcttatagacatccggatcggctgttgcccgaaggattcgtgttctacgggtcaaaatacataaaaaaacttggataactccatctgaattggggaggccgttgtgcccccactggcgacaggactatatcatcattgatcgtataaatagtagcatgacaaggttttccgaccaaaagcgacttaatcaagatctgtcatgtttggtccaaaaaggtttcccaaattgaaaaaaaaaggtataccaaagggtgtcttataaaaaatatgcaatttagttccattattttatcaagaaatatttgcagaggaacctcaataatttgattgtgtatgtttcttcatcattgaataaatgttatatgaatgaagtttcagatcaattagatcaacaaaatctcgaaaaagaaatagtcatgtaaatcatttatcgatataatattttgtatatacagagcttatcaaagtttataaagtccttttaataattcctctcactcaagtaagttgtatagcaggtttttcgaaaaattattagaaaccaggcttcgatctttgagatggaaaatgaaaatctagaaagtcttcttatgatgcaattaaaaagaaaagtaattgcaagaattgataatattataaataaactatgtaattgactctattattataaatgaactctgtaattattataaactactgaaatctgtcgcctgtctataatgtaaatcgtcaaatttagtcatttaacagatatttggatataacagatatttgaacagttggataaagatactttattttattgttacagagtaataataatattattaatcaacgtggaaatcgaaacgtcaaaataaacttatgtcaaaggaaaactgtggcgtattcttcataaaacaagtaaaaattcttgttatttatttaaattaaaattaaacgtataaaagaaataatattgatttcctctacattcaatagaatttcaagaaacttagcttaggagggggtattttgcctttgtttgcagtttaggttggagcctttttatgagccagtccggccttggttgtaatagtttacaattttttgtgtatatttaaaattttattattaatagtataaacccacattatctggtattaagggcatcaatatttaatgtaatagtgtaagatttggatatcgatggttgtatttgatattttacatgtaatcttaaataaaaacc

SEQ ID NO: 1626 - DNA, 1954 bp, Diabrotica virgifera
  SmartBlast Evalue=6E-54; Info=Glutathione S-transferase 5 n=1 Tax=Choristoneura fumiferana RepID=C6ZJZ9_CHOFU
aacacccaacacaaacacagccacacccgtcgcccgtcgcccgttacccgtccggtcaagtcaagtcaaaagctcaaaagctgtgcgtgcgctcaactcctgggttgaaaaatttgaaaaccagaaaacatttgaccagatttgacagacacagaccatatacttaatttagaacaatacaaattaggtaaaataagctaattccttctagtattttaactgtttaacttttttaacttgttactttaaaataattgatttaataaaatttgatcagtgtaaagcaaaatgaagcccatcttgtaccacttacctcccagtggaaattccagaggagcattattagcagccaaagtagcaggtgttgatgtagatatacagattgtagatataatgaaaagggaacaattcacagaggcctttttaaagattaatcctcaacatactttacctactttggttgatggagatttaactctctgtgacagtcatgctattgcaggatatctggcaacacaatactcaaaggatgataatttatatcccaaagatccaaaaaagagagctcttgtggatcagagattatactttgactgtggaactttatatccaagactccgagctatatgttttccaattatacataaaggtgaaaccaaaatttatgatgaacatagagcatctttagaagaagctttaggatttttggatgggtttctcgaaggcaatgattttgtaacaggaaaacatctaacaattgctgattgttctttagtaggttcagtatccagtatagtggctataggatgggacgttagtgctcactctaacattgccaattggataacaagatgtgccttggcaattccagattatgaagaagcaaatcaaaagggcgcagatgcatttggccaattagtaggaagtaaattggcccccggacaactgtaaacattgcggtattctgtacttttagataatcctttaaaaaaaaaatttaaaaacaaaaatcaaaaatagatatatatatatgtgtgtatatatatgttgtatatatattatgttatatatatatatatattttataatacttgaatatactgaatgctatcaacagtcccggactggcagactgacccatgggacagtgcgccttttgcatttaccctataaaaaatttaacgctgaaaaaaatgttcatacggaaccttttcagattcaagacttttaatattagtcctgtcgccatggggggtgcaacggcctccttattcggatggacttacccaagtttttgaagatattctttttaggcgcgattcgattgagggtaaaattgtacataaatctgcgcgcctgcgcacacagacagtatgtagttccttgctaatctttcaagataggtgtttatgtatctgtatccgtgcaaataagtcattaaaagaatatattagtgtttttagtaaatgtattatttattataattcttgtgtttttggatttgtgtttctctgtagtaaaataatgaaatatttacactatttgtcgccgtgttgtgtatttatatccgaaacttacatgtcaattagaaggacctcgctggtgtagttgctagggcgttagctccgagattggaatgacgcgggttcgaatcctgggcgattcatatattttttttatttttggttgttttaataaaatttttttgaaagtggtagataagaaagttagtttaatttttaaataaaatacaaataacctgttaagtatatttacttcgttgaaattacctatataatagaagaatatcttcttacgtgcgtacaaagtacacacacattcttttttttatgtggatccgcctttaagccatcaaattaaataaaaaaacattcgctatctttgtcatacaacgcactgagtcgaatagaatatgatgacaagacagtgacaa

SEQ ID NO: 1627 - DNA, 1320 bp, Diabrotica virgifera
agtcaatgaccattttcccgcataattttctgagcctgcaccgatttactttttgagtaattcgcaaaaacccctttgaaaatgtttttttttaataaaaaatttaccttttcgcaatgacaaaagttgcttaaaattagttaatatgcatattcattcccggtattattttaataaaaaaattggacatcttggatattagtgcaccctatgtacagcacagctgaatcttatgtttgtgcgtcacagtgttgccatgccatttctttcataatttcaatcaatgttaaatgtcactacaagaataatagaataagaacgtttacttctccgtcattatactaggtagaatgacaaataggtgtcaaatgaaagcttatattccaaggatagtactaaaggtgagaaattagacctagattgtctgtccctcaaaaaataagtgttatattggggatttctaatgtcgacattaaaagttgcactattttttttctataaaacattttgatctaaaacttaccagaaaacttctttgtactcattactttcaaataaacgtgattaagaagctaaattttaaacttcgtcgcacaacttttgcgattaaactttgcaagcacaaatccgcacctttttctttgaaaaattcataacctttatcatgataagaataaaaacttgaagcaggtacctttgtcttcagaaatgttagagctatatactgtaaaaatttcagaaaaaaatattaaaatggaacagagttgtagcgaggtaaacgcaaaaaacgtgatttcatttttttttatttttaggttaaaattgcgattttgacaatgttcccccacataaaattcaaaataaacctcattttcgttttcagcaccctcgaaaatataaagtatgaataaaattagccattcacccctccgtggtcagtatctcgaaaactaagtgcttttttgagggtgtcccgctcgtgtataatatcacaaaaaattgtaacgtgatagtatgaaaaaatagaggatacggcaagatacggcaacggtgttacaagtgatgggtcggattcaatgccaaaatctacacagacatatgagggtgcactaatagccaagatgtccgaaattttaccaaataatattacgaaattaaagtaaacaattcctttaaatttcctattatttttgcaacaaattttcgttatttttgtattatttatcccgacaaatgctaacacagtataataccgatgtataaagtcattgaatatttagttttgtaaaaagtgtaaatttttcatgaggatactttacc

SEQ ID NO: 1628 - DNA, 3847 bp, Diabrotica virgifera
  SmartBlast Evalue=5E-45; Info=TPPP family protein CG4893 n=1 Tax=Harpegnathos saltator RepID=E2BTF0_9HYME
aggatacgcgatcgtgcggatgcaagtcagtgttccacacattttcggcctctaaatattcgcttcgcgcgctgctaaatattaccgaatcgataattttaaaataccctgtgactggaatataaaaattataccgtcatcatgactgacaaagatctacagaaaccaactacggacctaaacgcattaaaaattgacgaatcaccggccgcttcccctacaccgggaagcaattcatccctactcacattcgaaacaaacttcaagaacttcgcgaagttcggagacccaaaatcggacggcaaacagataactctatcgaacagcgacaaatggatgaagcaagcgaagatcatcgatggaaagaagattacgacaacggataccggtattcattttaaaaagcttaaatcgctaaaagtgggaattgtacagtataaacaattccttgaagatttggctaaagctaaaggtatgggggtggatgaaattaaagacaagttggtcagttgtggaccaccagcaactcctggtggttcatctacaactgccaaagcagcagcggcagtcgatcgactaacagacacgtcaaaatacaccggcacacataaacaaagattcgatgacacgggcaaaggcaagggcatttccggaaggaaagacatggttgattcatctggatatgtgactggttttcaacataaataaaatataaaatatcacttgtctttctaatcactaaaatttttcgaattgtattcgggaaaaaaattatgatggtggagagtgtttaagctgatttttaagggatgataattattatttttgtagtcacatggaaatatttcgataaaagtttgcagtatttcaaaccttgccatgttcttaacgtaattatataagaagatagctatgcgttttcttagaattttattttaacataacaaaaagcctgttctataacaaacagtagccttaagctactttcatacgtaattctgagcgacattaaaggcacatcacatgatacagcagttctcaatcttattttgatagaaatgtaacagactcgttttggcacggacatacacgaagacatcaacatcattcaacctaaaatacaaactgtttcttacagtgttaactccagtttgtcatgactcttttaatgtcatcggttctaagtattagaggtctactcttatgtccacattcagaagatttagaacgccaatcaactaagaaattagcccatatatcgaggtgcaccatctactgctttgtgcacatactacgacctcgacctctatataacatatggggacatcaaaaatagagtcttgatatataggtatagtatttttactacaaaggcgatattacgtaggtcaaaatttttgacgtaagagaactgtcaaaacattagaccattaaacaaaattttgacctgcgtaatatcgcttttgtagtaaaaatactatacgttcagtctagaacacgatagttactccgttagttactagataaaggaaataagcaagtaggttattggaaaatctatttacggcaattgaaataaaaacagaaagtatcacatatacatttaattataaatcattaagatgtacaaaattaaattatgcgacgtgactaaagatacaaaacagttatctaaggctgagaatacatacacaaacatgattacacaaagagaaataatggaataacggtatattttaagatcaatacgatttaaatgtgaataaattaaccatcaggtaaacaataacaatacaaatcaagctatgtacctacctgtgatgtaaggtgttcaccaacaagttgcgacaatgaaatttaagaaatacgtacctaatcgctttcacagttgattgtataaaaaatgtgagcattatcgtatgtttcaatcgtatggatttttttttgtattgtaattcacattagtgagtcagccagttataagtagatggattattagtccctatcttaaatagtcctaactataaataactaccctaacgaatatccaaaaagaaaaagtatggattattactgacagatatacttactttaagaacaggccacatattattgtccctcacactcttaattgaagatgcttaaacactttaaagttatgtgcatttatttttgtaaaatatattataaaaaataacaattatataaaaaaactacagtggtgttatttatctcaactgtcttaattgaattatattatgaaaaagttaggctctttttagctgcgaatgctcctacttaatttttataaaagacgaataaggatagtatattttattcacaatggatttacactttattcacaatggatcaaagatgttcatgtggtttacatacagatttttgagacaatacccaagtttcacctacatagctcactatcgtagttcattgcaaagtatgccgtacctacatattgggtctattgaagaaaaagggaagtgtttgcttttgcttcctcgtatttaagtatatacttaatagttgttgaataaaccattaaagaaatgaccttattcaattactattaagtggatacttaaatgcgaggaagtggaagcggatacttctttttattcaatagacccatcgtctctgtttcgactaacttaaaactagcaaaattcgctttataaaaaacaagaaattttggacatcttggatattagtgcaccctatgtacagcacagctgaatcttatgtttgtgcgtcacagtgttgccatgccatttctttcataatttcaatcaatgttaaatgtcactacaagaataatagaataagaacgtttacttctccgtcattatactaggtagaatgacaaataggtgtcaaatgaaagcttatattccaaggatagtactaaaggtgagaaattagacctagattgtctgtccctcaaaaaataagtgttatattggggatttctaatgtcgacattaaaagttgcactattttttttctataaaacattttgatctaaaacttaccagaaaacttctttgtactcattactttcaaataaacgtgattaagaagctaaattttaaacttcgtcgcacaacttttgcgattaaactttgcaagcacaaatccgcacctttttctttgaaaaattcataacctttatcatgataagaataaaaacttgaagcaggtacctttgtcttcagaaatgttagagctatatactgtaaaaatttcagaaaaaaatattaaaatggaacagagttgtagcgaggtaaacgcaaaaaacgtgatttcatttttttttatttttaggttaaaattgcgattttgacaatgttcccccacataaaattcaaaataaacctcattttcgttttcagcaccctcgaaaatataaagtatgaataaaattagccattcacccctccgtggtcagtatctcgaaaactaagtgcttttttgagggtgtcccgctcgtgtataatatcacaaaaaattgtaacgtgatagtatgaaaaaatagaggatacggcaagatacggcaacggtgttacaagtgatgggtcggattcaatgccaaaatctacacagacatatgagggtgcactaatagccaagatgtccgaaattttaccaaataatattacgaaattaaagtaaacaattcctttaaatttcctattatttttgcaacaaattttcgttatttttgtattatttatcccgacaaatgctaacacagtataataccgatgtataaagtcattgaatatttagttttgtaaaaagtgtaaatttttcatgaggatactttacc

SEQ ID NO: 1629 - DNA, 3845 bp, Diabrotica virgifera
  SmartBlast Evalue=5E-45; Info=TPPP family protein CG4893 n=1 Tax=Harpegnathos saltator RepID=E2BTF0_9HYME
aggatacgcgatcgtgcggatgcaagtcagtgttccacacattttcggcctctaaatattcgcttcgcgcgctgctaaatattaccgaatcgataattttaaaataccctgtgactggaatataaaaattataccgtcatcatgactgacaaagatctacagaaaccaactacggacctaaacgcattaaaaattgacgaatcaccggccgcttcccctacaccgggaagcaattcatccctactcacattcgaaacaaacttcaagaacttcgcgaagttcggagacccaaaatcggacggcaaacagataactctatcgaacagcgacaaatggatgaagcaagcgaagatcatcgatggaaagaagattacgacaacggataccggtattcattttaaaaagcttaaatcgctaaaagtgggaattgtacagtataaacaattccttgaagatttggctaaagctaaaggtatgggggtggatgaaattaaagacaagttggtcagttgtggaccaccagcaactcctggtggttcatctacaactgccaaagcagcagcggcagtcgatcgactaacagacacgtcaaaatacaccggcacacataaacaaagattcgatgacacgggcaaaggcaagggcatttccggaaggaaagacatggttgattcatctggatatgtgactggttttcaacataaataaaatataaaatatcacttgtctttctaatcactaaaatttttcgaattgtattcgggaaaaaaattatgatggtggagagtgtttaagctgatttttaagggatgataattattatttttgtagtcacatggaaatatttcgataaaagtttgcagtatttcaaaccttgccatgttcttaacgtaattatataagaagatagctatgcgttttcttagaattttattttaacataacaaaaagcctgttctataacaaacagtagccttaagctactttcatacgtaattctgagcgacattaaaggcacatcacatgatacagcagttctcaatcttattttgatagaaatgtaacagactcgttttggcacggacatacacgaagacatcaacatcattcaacctaaaatacaaactgtttcttacagtgttaactccagtttgtcatgactcttttaatgtcatcggttctaagtattagaggtctactcttatgtccacattcagaagatttagaacgccaatcaactaagaaattagcccatatatcgaggtgcaccatctactgctttgtgcacatactacgacctcgacctctatataacatatggggacatcaaaaatagagtcttgatatataggtatagtatttttactacaaaggcgatattacgtaggtcaaaatttttgacgtaagagaactgtcaaaacattagaccattaaacaaaattttgacctgcgtaatatcgcttttgtagtaaaaatactatacgttcagtctagaacacgatagttactccgttagttactagataaaggaaataagcaagtaggttattggaaaatctatttacggcaattgaaataaaaacagaaagtatcacatatacatttaattataaatcattaagatgtacaaaattaaattatgcgacgtgactaaagatacaaaacagttatctaaggctgagaatacatacacaaacatgattacacaaagagaaataatagaataacggtatacctattttatgatcaatacgatttaaatgtgaataaattaaccatcaggtaaacaataacaatatacaaatcaagctatgtacctgcctgtgatataaggtcttcaccaacaagtggcgacaatgaaatttaagaaatacgtacctaatcgctttcacagttgattgtataaaaaatgtgagcatttgagcattatggtatggattttttgtattgtcattcacattagtgagtcagccagttataagtagatggattattagtccctatcttaaatagtcctaactataaataactaccctaacgaatatccaaaaagaaaaagtatggattattactgacagatatacttactttaagaacaggccacatattattgtccctcacactcttaattgaagatgcttaaacactttaaagttatgtgcatttatttttgtaaaatatattataaaaaataacaattatataaaaaaactacagtggtgttatttatctcaactgtcttaattgaattatattatgaaaaagttaggctctttttagctgcgaatgctcctacttaatttttataaaagacgaataaggatagtatattttattcacaatggatttacactttattcacaatggatcaaagatgttcatgtggtttacatacagatttttgagacaatacccaagtttcacctacatagctcactatcgtagttcattgcaaagtatgccgtacctacatattgggtctattgaagaaaaagggaagtgtttgcttttgcttcctcgtatttaagtatatacttaatagttgttgaataaaccattaaagaaatgaccttattcaattactattaagtggatacttaaatgcgaggaagtggaagcggatacttctttttattcaatagacccatcgtctctgtttcgactaacttaaaactagcaaaattcgctttataaaaaacaagaaattttggacatcttggatattagtgcaccctatgtacagcacagctgaatcttatgtttgtgcgtcacagtgttgccatgccatttctttcataatttcaatcaatgttaaatgtcactacaagaataatagaataagaacgtttacttctccgtcattatactaggtagaatgacaaataggtgtcaaatgaaagcttatattccaaggatagtactaaaggtgagaaattagacctagattgtctgtccctcaaaaaataagtgttatattggggatttctaatgtcgacattaaaagttgcactattttttttctataaaacattttgatctaaaacttaccagaaaacttctttgtactcattactttcaaataaacgtgattaagaagctaaattttaaacttcgtcgcacaacttttgcgattaaactttgcaagcacaaatccgcacctttttctttgaaaaattcataacctttatcatgataagaataaaaacttgaagcaggtacctttgtcttcagaaatgttagagctatatactgtaaaaatttcagaaaaaaatattaaaatggaacagagttgtagcgaggtaaacgcaaaaaacgtgatttcatttttttttatttttaggttaaaattgcgattttgacaatgttcccccacataaaattcaaaataaacctcattttcgttttcagcaccctcgaaaatataaagtatgaataaaattagccattcacccctccgtggtcagtatctcgaaaactaagtgcttttttgagggtgtcccgctcgtgtataatatcacaaaaaattgtaacgtgatagtatgaaaaaatagaggatacggcaagatacggcaacggtgttacaagtgatgggtcggattcaatgccaaaatctacacagacatatgagggtgcactaatagccaagatgtccgaaattttaccaaataatattacgaaattaaagtaaacaattcctttaaatttcctattatttttgcaacaaattttcgttatttttgtattatttatcccgacaaatgctaacacagtataataccgatgtataaagtcattgaatatttagttttgtaaaaagtgtaaatttttcatgaggatactttacc

SEQ ID NO: 1630 - DNA, 3846 bp, Diabrotica virgifera
  SmartBlast Evalue=5E-45; Info=TPPP family protein CG4893 n=1 Tax=Harpegnathos saltator RepID=E2BTF0_9HYME
aggatacgcgatcgtgcggatgcaagtcagtgttccacacattttcggcctctaaatattcgcttcgcgcgctgctaaatattaccgaatcgataattttaaaataccctgtgactggaatataaaaattataccgtcatcatgactgacaaagatctacagaaaccaactacggacctaaacgcattaaaaattgacgaatcaccggccgcttcccctacaccgggaagcaattcatccctactcacattcgaaacaaacttcaagaacttcgcgaagttcggagacccaaaatcggacggcaaacagataactctatcgaacagcgacaaatggatgaagcaagcgaagatcatcgatggaaagaagattacgacaacggataccggtattcattttaaaaagcttaaatcgctaaaagtgggaattgtacagtataaacaattccttgaagatttggctaaagctaaaggtatgggggtggatgaaattaaagacaagttggtcagttgtggaccaccagcaactcctggtggttcatctacaactgccaaagcagcagcggcagtcgatcgactaacagacacgtcaaaatacaccggcacacataaacaaagattcgacgacactggcaaaggcaagggcatttccggaaggaaagacatggttgattcatctggatatgttaccggttttcaacataaataaaatataaaatatcactgtctttctaatcactaaaatttttcgaattgtattcgggaaaaaaattatgatggtagagagtgtttaagctgatttttaagggatgataattattatttttgtagtcacatggaaatatttcgataaaagtttgcagtatttcaaaccttgccatgttcttaacgtaattatataagaagatagctatgcgttttcttagaattttattttaacataacaaaaagcctgttctataacaaacagtagccttaagctactttcatacgtaattctgagcgacattaaaggcacatcacatgatacagcagttctcaatcttattttgatagaaatgtaacagactcgttttggcacggacatacacgaagacatcaacatcattcaacctaaaatacaaactgtttcttacagtgttaactccagtttgtcatgactcttttaatgtcatcggttctaagtattagaggtctactcttatgtccacattcagaagatttagaacgccaatcaactaagaaattagcccatatatcgaggtgcaccatctactgctttgtgcacatactacgacctcgacctctatataacatatggggacatcaaaaatagagtcttgatatataggtatagtatttttactacaaaggcgatattacgtaggtcaaaatttttgacgtaagagaactgtcaaaacattagaccattaaacaaaattttgacctgcgtaatatcgcttttgtagtaaaaatactatacgttcagtctagaacacgatagttactccgttagttactagataaaggaaataagcaagtaggttattggaaaatctatttacggcaattgaaataaaaacagaaagtatcacatatacatttaattataaatcattaagatgtacaaaattaaattatgcgacgtgactaaagatacaaaacagttatctaaggctgagaatacatacacaaacatgattacacaaagagaaataatggaataacggtatattttaagatcaatacgatttaaatgtgaataaattaaccatcaggtaaacaataacaatacaaatcaagctatgtacctacctgtgatgtaaggtgttcaccaacaagttgcgacaatgaaatttaagaaatacgtacctaatcgctttcacagttgattgtataaaaaatgtgagcattatcgtatgtttcaatcgtatggatttttttttgtattgtaattcacattagtgagtcagccagttataagtagatggattattagtccctatcttaaatagtcctaactataaataactaccctaacgaatatccaaaaagaaaaagtatggattattactgacagatatacttactttaagaacaggccacatattattgtccctcacactcttaattgaagatgcttaaacactttaaagttatgtgcatttatttttgtaaaatatattataaaaaataacaattatataaaaaaactacagtggtgttatttatctcaactgtcttaattgaattatattatgaaaaagttaggctctttttagctgcgaatgctcctacttaatttttataaaagacgaataaggatagtatattttattcacaatggatttacactttattcacaatggatcaaagatgttcatgtggtttacatacagatttttgagacaatacccaagtttcacctacatagctcactatcgtagttcattgcaaagtatgccgtacctacatattgggtctattgaagaaaaagggaagtgtttgcttttgcttcctcgtatttaagtatatacttaatagttgttgaataaaccattaaagaaatgaccttattcaattactattaagtggatacttaaatgcgaggaagtggaagcggatacttctttttattcaatagacccatcgtctctgtttcgactaacttaaaactagcaaaattcgctttataaaaaacaagaaattttggacatcttggatattagtgcaccctatgtacagcacagctgaatcttatgtttgtgcgtcacagtgttgccatgccatttctttcataatttcaatcaatgttaaatgtcactacaagaataatagaataagaacgtttacttctccgtcattatactaggtagaatgacaaataggtgtcaaatgaaagcttatattccaaggatagtactaaaggtgagaaattagacctagattgtctgtccctcaaaaaataagtgttatattggggatttctaatgtcgacattaaaagttgcactattttttttctataaaacattttgatctaaaacttaccagaaaacttctttgtactcattactttcaaataaacgtgattaagaagctaaattttaaacttcgtcgcacaacttttgcgattaaactttgcaagcacaaatccgcacctttttctttgaaaaattcataacctttatcatgataagaataaaaacttgaagcaggtacctttgtcttcagaaatgttagagctatatactgtaaaaatttcagaaaaaaatattaaaatggaacagagttgtagcgaggtaaacgcaaaaaacgtgatttcatttttttttatttttaggttaaaattgcgattttgacaatgttcccccacataaaattcaaaataaacctcattttcgttttcagcaccctcgaaaatataaagtatgaataaaattagccattcacccctccgtggtcagtatctcgaaaactaagtgcttttttgagggtgtcccgctcgtgtataatatcacaaaaaattgtaacgtgatagtatgaaaaaatagaggatacggcaagatacggcaacggtgttacaagtgatgggtcggattcaatgccaaaatctacacagacatatgagggtgcactaatagccaagatgtccgaaattttaccaaataatattacgaaattaaagtaaacaattcctttaaatttcctattatttttgcaacaaattttcgttatttttgtattatttatcccgacaaatgctaacacagtataataccgatgtataaagtcattgaatatttagttttgtaaaaagtgtaaatttttcatgaggatactttacc

SEQ ID NO: 1631 - DNA, 3844 bp, Diabrotica virgifera
  SmartBlast Evalue=5E-45; Info=TPPP family protein CG4893 n=1 Tax=Harpegnathos saltator RepID=E2BTF0_9HYME
aggatacgcgatcgtgcggatgcaagtcagtgttccacacattttcggcctctaaatattcgcttcgcgcgctgctaaatattaccgaatcgataattttaaaataccctgtgactggaatataaaaattataccgtcatcatgactgacaaagatctacagaaaccaactacggacctaaacgcattaaaaattgacgaatcaccggccgcttcccctacaccgggaagcaattcatccctactcacattcgaaacaaacttcaagaacttcgcgaagttcggagacccaaaatcggacggcaaacagataactctatcgaacagcgacaaatggatgaagcaagcgaagatcatcgatggaaagaagattacgacaacggataccggtattcattttaaaaagcttaaatcgctaaaagtgggaattgtacagtataaacaattccttgaagatttggctaaagctaaaggtatgggggtggatgaaattaaagacaagttggtcagttgtggaccaccagcaactcctggtggttcatctacaactgccaaagcagcagcggcagtcgatcgactaacagacacgtcaaaatacaccggcacacataaacaaagattcgacgacactggcaaaggcaagggcatttccggaaggaaagacatggttgattcatctggatatgttaccggttttcaacataaataaaatataaaatatcactgtctttctaatcactaaaatttttcgaattgtattcgggaaaaaaattatgatggtagagagtgtttaagctgatttttaagggatgataattattatttttgtagtcacatggaaatatttcgataaaagtttgcagtatttcaaaccttgccatgttcttaacgtaattatataagaagatagctatgcgttttcttagaattttattttaacataacaaaaagcctgttctataacaaacagtagccttaagctactttcatacgtaattctgagcgacattaaaggcacatcacatgatacagcagttctcaatcttattttgatagaaatgtaacagactcgttttggcacggacatacacgaagacatcaacatcattcaacctaaaatacaaactgtttcttacagtgttaactccagtttgtcatgactcttttaatgtcatcggttctaagtattagaggtctactcttatgtccacattcagaagatttagaacgccaatcaactaagaaattagcccatatatcgaggtgcaccatctactgctttgtgcacatactacgacctcgacctctatataacatatggggacatcaaaaatagagtcttgatatataggtatagtatttttactacaaaggcgatattacgtaggtcaaaatttttgacgtaagagaactgtcaaaacattagaccattaaacaaaattttgacctgcgtaatatcgcttttgtagtaaaaatactatacgttcagtctagaacacgatagttactccgttagttactagataaaggaaataagcaagtaggttattggaaaatctatttacggcaattgaaataaaaacagaaagtatcacatatacatttaattataaatcattaagatgtacaaaattaaattatgcgacgtgactaaagatacaaaacagttatctaaggctgagaatacatacacaaacatgattacacaaagagaaataatagaataacggtatacctattttatgatcaatacgatttaaatgtgaataaattaaccatcaggtaaacaataacaatatacaaatcaagctatgtacctgcctgtgatataaggtcttcaccaacaagtggcgacaatgaaatttaagaaatacgtacctaatcgctttcacagttgattgtataaaaaatgtgagcatttgagcattatggtatggattttttgtattgtcattcacattagtgagtcagccagttataagtagatggattattagtccctatcttaaatagtcctaactataaataactaccctaacgaatatccaaaaagaaaaagtatggattattactgacagatatacttactttaagaacaggccacatattattgtccctcacactcttaattgaagatgcttaaacactttaaagttatgtgcatttatttttgtaaaatatattataaaaaataacaattatataaaaaaactacagtggtgttatttatctcaactgtcttaattgaattatattatgaaaaagttaggctctttttagctgcgaatgctcctacttaatttttataaaagacgaataaggatagtatattttattcacaatggatttacactttattcacaatggatcaaagatgttcatgtggtttacatacagatttttgagacaatacccaagtttcacctacatagctcactatcgtagttcattgcaaagtatgccgtacctacatattgggtctattgaagaaaaagggaagtgtttgcttttgcttcctcgtatttaagtatatacttaatagttgttgaataaaccattaaagaaatgaccttattcaattactattaagtggatacttaaatgcgaggaagtggaagcggatacttctttttattcaatagacccatcgtctctgtttcgactaacttaaaactagcaaaattcgctttataaaaaacaagaaattttggacatcttggatattagtgcaccctatgtacagcacagctgaatcttatgtttgtgcgtcacagtgttgccatgccatttctttcataatttcaatcaatgttaaatgtcactacaagaataatagaataagaacgtttacttctccgtcattatactaggtagaatgacaaataggtgtcaaatgaaagcttatattccaaggatagtactaaaggtgagaaattagacctagattgtctgtccctcaaaaaataagtgttatattggggatttctaatgtcgacattaaaagttgcactattttttttctataaaacattttgatctaaaacttaccagaaaacttctttgtactcattactttcaaataaacgtgattaagaagctaaattttaaacttcgtcgcacaacttttgcgattaaactttgcaagcacaaatccgcacctttttctttgaaaaattcataacctttatcatgataagaataaaaacttgaagcaggtacctttgtcttcagaaatgttagagctatatactgtaaaaatttcagaaaaaaatattaaaatggaacagagttgtagcgaggtaaacgcaaaaaacgtgatttcatttttttttatttttaggttaaaattgcgattttgacaatgttcccccacataaaattcaaaataaacctcattttcgttttcagcaccctcgaaaatataaagtatgaataaaattagccattcacccctccgtggtcagtatctcgaaaactaagtgcttttttgagggtgtcccgctcgtgtataatatcacaaaaaattgtaacgtgatagtatgaaaaaatagaggatacggcaagatacggcaacggtgttacaagtgatgggtcggattcaatgccaaaatctacacagacatatgagggtgcactaatagccaagatgtccgaaattttaccaaataatattacgaaattaaagtaaacaattcctttaaatttcctattatttttgcaacaaattttcgttatttttgtattatttatcccgacaaatgctaacacagtataataccgatgtataaagtcattgaatatttagttttgtaaaaagtgtaaatttttcatgaggatactttacc

SEQ ID NO: 1632 - DNA, 2448 bp, Diabrotica virgifera
  SmartBlast Evalue=3E-45; Info=TPPP family protein CG4893 n=1 Tax=Harpegnathos saltator RepID=E2BTF0_9HYME
aggatacgcgatcgtgcggatgcaagtcagtgttccacacattttcggcctctaaatattcgcttcgcgcgctgctaaatattaccgaatcgataattttaaaataccctgtgactggaatataaaaattataccgtcatcatgactgacaaagatctacagaaaccaactacggacctaaacgcattaaaaattgacgaatcaccggccgcttcccctacaccgggaagcaattcatccctactcacattcgaaacaaacttcaagaacttcgcgaagttcggagacccaaaatcggacggcaaacagataactctatcgaacagcgacaaatggatgaagcaagcgaagatcatcgatggaaagaagattacgacaacggataccggtattcattttaaaaagcttaaatcgctaaaagtgggaattgtacagtataaacaattccttgaagatttggctaaagctaaaggtatgggggtggatgaaattaaagacaagttggtcagttgtggaccaccagcaactcctggtggttcatctacaactgccaaagcagcagcggcagtcgatcgactaacagacacgtcaaaatacaccggcacacataaacaaagattcgatgacacgggcaaaggcaagggcatttccggaaggaaagacatggttgattcatctggatatgtgactggttttcaacataaataaaatataaaatatcacttgtctttctaatcactaaaatttttcgaattgtattcgggaaaaaaattatgatggtggagagtgtttaagctgatttttaagggatgataattattatttttgtagtcacatggaaatatttcgataaaagtttgcagtatttcaaaccttgccatgttcttaacgtaattatataagaagatagctatgcgttttcttagaattttattttaacataacaaaaagcctgttctataacaaacagtagccttaagctactttcatacgtaattctgagcgacattaaaggcacatcacatgatacagcagttctcaatcttattttgatagaaatgtaacagactcgttttggcacggacatacacgaagacatcaacatcattcaacctaaaatacaaactgtttcttacagtgttaactccagtttgtcatgactcttttaatgtcatcggttctaagtattagaggtctactcttatgtccacattcagaagatttagaacgccaatcaactaagaaattagcccatatatcgaggtgcaccatctactgctttgtgcacatactacgacctcgacctctatataacatatggggacatcaaaaatagagtcttgatatataggtatagtatttttactacaaaggcgatattacgtaggtcaaaatttttgacgtaagagaactgtcaaaacattagaccattaaacaaaattttgacctgcgtaatatcgcttttgtagtaaaaatactatacgttcagtctagaacacgatagttactccgttagttactagataaaggaaataagcaagtaggttattggaaaatctatttacggcaattgaaataaaaacagaaagtatcacatatacatttaattataaatcattaagatgtacaaaattaaattatgcgacgtgactaaagatacaaaacagttatctaaggctgagaatacatacacaaacatgattacacaaagagaaataatggaataacggtatattttaagatcaatacgatttaaatgtgaataaattaaccatcaggtaaacaataacaatacaaatcaagctatgtacctacctgtgatgtaaggtgttcaccaacaagttgcgacaatgaaatttaagaaatacgtacctaatcgctttcacagttgattgtataaaaaatgtgagcattatcgtatgtttcaatcgtatggatttttttttgtattgtaattcacattagtgagtcagccagttataagtagatggattattagtccctatcttaaatagtcctaactataaataactaccctaacgaatatccaaaaagaaaaagtatggattattactgacagatatacttactttaagaacaggccacatattattgtccctcacactcttaattgaagatgcttaaacactttaaagttatgtgcatttatttttgtaaaatatattataaaaaataacaattatataaaaaaactacagtggtgttatttatctcaactgtcttaattgaattatattatgaaaaagttaggctctttttagctgcgaatgctcctacttaatttttataaaagacgaataaggatagtatattttattcacaatggatcaaagatgttcatgtggtttacatacagattttttgagacaataccccaagtttcacctacatagctcactatcgtagttcattgcaaagtatgccgta

SEQ ID NO: 1633 - DNA, 2446 bp, Diabrotica virgifera
  SmartBlast Evalue=3E-45; Info=TPPP family protein CG4893 n=1 Tax=Harpegnathos saltator RepID=E2BTF0_9HYME
aggatacgcgatcgtgcggatgcaagtcagtgttccacacattttcggcctctaaatattcgcttcgcgcgctgctaaatattaccgaatcgataattttaaaataccctgtgactggaatataaaaattataccgtcatcatgactgacaaagatctacagaaaccaactacggacctaaacgcattaaaaattgacgaatcaccggccgcttcccctacaccgggaagcaattcatccctactcacattcgaaacaaacttcaagaacttcgcgaagttcggagacccaaaatcggacggcaaacagataactctatcgaacagcgacaaatggatgaagcaagcgaagatcatcgatggaaagaagattacgacaacggataccggtattcattttaaaaagcttaaatcgctaaaagtgggaattgtacagtataaacaattccttgaagatttggctaaagctaaaggtatgggggtggatgaaattaaagacaagttggtcagttgtggaccaccagcaactcctggtggttcatctacaactgccaaagcagcagcggcagtcgatcgactaacagacacgtcaaaatacaccggcacacataaacaaagattcgatgacacgggcaaaggcaagggcatttccggaaggaaagacatggttgattcatctggatatgtgactggttttcaacataaataaaatataaaatatcacttgtctttctaatcactaaaatttttcgaattgtattcgggaaaaaaattatgatggtggagagtgtttaagctgatttttaagggatgataattattatttttgtagtcacatggaaatatttcgataaaagtttgcagtatttcaaaccttgccatgttcttaacgtaattatataagaagatagctatgcgttttcttagaattttattttaacataacaaaaagcctgttctataacaaacagtagccttaagctactttcatacgtaattctgagcgacattaaaggcacatcacatgatacagcagttctcaatcttattttgatagaaatgtaacagactcgttttggcacggacatacacgaagacatcaacatcattcaacctaaaatacaaactgtttcttacagtgttaactccagtttgtcatgactcttttaatgtcatcggttctaagtattagaggtctactcttatgtccacattcagaagatttagaacgccaatcaactaagaaattagcccatatatcgaggtgcaccatctactgctttgtgcacatactacgacctcgacctctatataacatatggggacatcaaaaatagagtcttgatatataggtatagtatttttactacaaaggcgatattacgtaggtcaaaatttttgacgtaagagaactgtcaaaacattagaccattaaacaaaattttgacctgcgtaatatcgcttttgtagtaaaaatactatacgttcagtctagaacacgatagttactccgttagttactagataaaggaaataagcaagtaggttattggaaaatctatttacggcaattgaaataaaaacagaaagtatcacatatacatttaattataaatcattaagatgtacaaaattaaattatgcgacgtgactaaagatacaaaacagttatctaaggctgagaatacatacacaaacatgattacacaaagagaaataatagaataacggtatacctattttatgatcaatacgatttaaatgtgaataaattaaccatcaggtaaacaataacaatatacaaatcaagctatgtacctgcctgtgatataaggtcttcaccaacaagtggcgacaatgaaatttaagaaatacgtacctaatcgctttcacagttgattgtataaaaaatgtgagcatttgagcattatggtatggattttttgtattgtcattcacattagtgagtcagccagttataagtagatggattattagtccctatcttaaatagtcctaactataaataactaccctaacgaatatccaaaaagaaaaagtatggattattactgacagatatacttactttaagaacaggccacatattattgtccctcacactcttaattgaagatgcttaaacactttaaagttatgtgcatttatttttgtaaaatatattataaaaaataacaattatataaaaaaactacagtggtgttatttatctcaactgtcttaattgaattatattatgaaaaagttaggctctttttagctgcgaatgctcctacttaatttttataaaagacgaataaggatagtatattttattcacaatggatcaaagatgttcatgtggtttacatacagattttttgagacaataccccaagtttcacctacatagctcactatcgtagttcattgcaaagtatgccgta

SEQ ID NO: 1634 - DNA, 2447 bp, Diabrotica virgifera
  SmartBlast Evalue=3E-45; Info=TPPP family protein CG4893 n=1 Tax=Harpegnathos saltator RepID=E2BTF0_9HYME
aggatacgcgatcgtgcggatgcaagtcagtgttccacacattttcggcctctaaatattcgcttcgcgcgctgctaaatattaccgaatcgataattttaaaataccctgtgactggaatataaaaattataccgtcatcatgactgacaaagatctacagaaaccaactacggacctaaacgcattaaaaattgacgaatcaccggccgcttcccctacaccgggaagcaattcatccctactcacattcgaaacaaacttcaagaacttcgcgaagttcggagacccaaaatcggacggcaaacagataactctatcgaacagcgacaaatggatgaagcaagcgaagatcatcgatggaaagaagattacgacaacggataccggtattcattttaaaaagcttaaatcgctaaaagtgggaattgtacagtataaacaattccttgaagatttggctaaagctaaaggtatgggggtggatgaaattaaagacaagttggtcagttgtggaccaccagcaactcctggtggttcatctacaactgccaaagcagcagcggcagtcgatcgactaacagacacgtcaaaatacaccggcacacataaacaaagattcgacgacactggcaaaggcaagggcatttccggaaggaaagacatggttgattcatctggatatgttaccggttttcaacataaataaaatataaaatatcactgtctttctaatcactaaaatttttcgaattgtattcgggaaaaaaattatgatggtagagagtgtttaagctgatttttaagggatgataattattatttttgtagtcacatggaaatatttcgataaaagtttgcagtatttcaaaccttgccatgttcttaacgtaattatataagaagatagctatgcgttttcttagaattttattttaacataacaaaaagcctgttctataacaaacagtagccttaagctactttcatacgtaattctgagcgacattaaaggcacatcacatgatacagcagttctcaatcttattttgatagaaatgtaacagactcgttttggcacggacatacacgaagacatcaacatcattcaacctaaaatacaaactgtttcttacagtgttaactccagtttgtcatgactcttttaatgtcatcggttctaagtattagaggtctactcttatgtccacattcagaagatttagaacgccaatcaactaagaaattagcccatatatcgaggtgcaccatctactgctttgtgcacatactacgacctcgacctctatataacatatggggacatcaaaaatagagtcttgatatataggtatagtatttttactacaaaggcgatattacgtaggtcaaaatttttgacgtaagagaactgtcaaaacattagaccattaaacaaaattttgacctgcgtaatatcgcttttgtagtaaaaatactatacgttcagtctagaacacgatagttactccgttagttactagataaaggaaataagcaagtaggttattggaaaatctatttacggcaattgaaataaaaacagaaagtatcacatatacatttaattataaatcattaagatgtacaaaattaaattatgcgacgtgactaaagatacaaaacagttatctaaggctgagaatacatacacaaacatgattacacaaagagaaataatggaataacggtatattttaagatcaatacgatttaaatgtgaataaattaaccatcaggtaaacaataacaatacaaatcaagctatgtacctacctgtgatgtaaggtgttcaccaacaagttgcgacaatgaaatttaagaaatacgtacctaatcgctttcacagttgattgtataaaaaatgtgagcattatcgtatgtttcaatcgtatggatttttttttgtattgtaattcacattagtgagtcagccagttataagtagatggattattagtccctatcttaaatagtcctaactataaataactaccctaacgaatatccaaaaagaaaaagtatggattattactgacagatatacttactttaagaacaggccacatattattgtccctcacactcttaattgaagatgcttaaacactttaaagttatgtgcatttatttttgtaaaatatattataaaaaataacaattatataaaaaaactacagtggtgttatttatctcaactgtcttaattgaattatattatgaaaaagttaggctctttttagctgcgaatgctcctacttaatttttataaaagacgaataaggatagtatattttattcacaatggatcaaagatgttcatgtggtttacatacagattttttgagacaataccccaagtttcacctacatagctcactatcgtagttcattgcaaagtatgccgta

SEQ ID NO: 1635 - DNA, 2445 bp, Diabrotica virgifera
  SmartBlast Evalue=3E-45; Info=TPPP family protein CG4893 n=1 Tax=Harpegnathos saltator RepID=E2BTF0_9HYME
aggatacgcgatcgtgcggatgcaagtcagtgttccacacattttcggcctctaaatattcgcttcgcgcgctgctaaatattaccgaatcgataattttaaaataccctgtgactggaatataaaaattataccgtcatcatgactgacaaagatctacagaaaccaactacggacctaaacgcattaaaaattgacgaatcaccggccgcttcccctacaccgggaagcaattcatccctactcacattcgaaacaaacttcaagaacttcgcgaagttcggagacccaaaatcggacggcaaacagataactctatcgaacagcgacaaatggatgaagcaagcgaagatcatcgatggaaagaagattacgacaacggataccggtattcattttaaaaagcttaaatcgctaaaagtgggaattgtacagtataaacaattccttgaagatttggctaaagctaaaggtatgggggtggatgaaattaaagacaagttggtcagttgtggaccaccagcaactcctggtggttcatctacaactgccaaagcagcagcggcagtcgatcgactaacagacacgtcaaaatacaccggcacacataaacaaagattcgacgacactggcaaaggcaagggcatttccggaaggaaagacatggttgattcatctggatatgttaccggttttcaacataaataaaatataaaatatcactgtctttctaatcactaaaatttttcgaattgtattcgggaaaaaaattatgatggtagagagtgtttaagctgatttttaagggatgataattattatttttgtagtcacatggaaatatttcgataaaagtttgcagtatttcaaaccttgccatgttcttaacgtaattatataagaagatagctatgcgttttcttagaattttattttaacataacaaaaagcctgttctataacaaacagtagccttaagctactttcatacgtaattctgagcgacattaaaggcacatcacatgatacagcagttctcaatcttattttgatagaaatgtaacagactcgttttggcacggacatacacgaagacatcaacatcattcaacctaaaatacaaactgtttcttacagtgttaactccagtttgtcatgactcttttaatgtcatcggttctaagtattagaggtctactcttatgtccacattcagaagatttagaacgccaatcaactaagaaattagcccatatatcgaggtgcaccatctactgctttgtgcacatactacgacctcgacctctatataacatatggggacatcaaaaatagagtcttgatatataggtatagtatttttactacaaaggcgatattacgtaggtcaaaatttttgacgtaagagaactgtcaaaacattagaccattaaacaaaattttgacctgcgtaatatcgcttttgtagtaaaaatactatacgttcagtctagaacacgatagttactccgttagttactagataaaggaaataagcaagtaggttattggaaaatctatttacggcaattgaaataaaaacagaaagtatcacatatacatttaattataaatcattaagatgtacaaaattaaattatgcgacgtgactaaagatacaaaacagttatctaaggctgagaatacatacacaaacatgattacacaaagagaaataatagaataacggtatacctattttatgatcaatacgatttaaatgtgaataaattaaccatcaggtaaacaataacaatatacaaatcaagctatgtacctgcctgtgatataaggtcttcaccaacaagtggcgacaatgaaatttaagaaatacgtacctaatcgctttcacagttgattgtataaaaaatgtgagcatttgagcattatggtatggattttttgtattgtcattcacattagtgagtcagccagttataagtagatggattattagtccctatcttaaatagtcctaactataaataactaccctaacgaatatccaaaaagaaaaagtatggattattactgacagatatacttactttaagaacaggccacatattattgtccctcacactcttaattgaagatgcttaaacactttaaagttatgtgcatttatttttgtaaaatatattataaaaaataacaattatataaaaaaactacagtggtgttatttatctcaactgtcttaattgaattatattatgaaaaagttaggctctttttagctgcgaatgctcctacttaatttttataaaagacgaataaggatagtatattttattcacaatggatcaaagatgttcatgtggtttacatacagattttttgagacaataccccaagtttcacctacatagctcactatcgtagttcattgcaaagtatgccgta

SEQ ID NO: 1636 - DNA, 1646 bp, Diabrotica virgifera
aatcaaagttccaccaccatctataacttccaaagtcattcgacagacttacaaaatatcggttctagttttggaggttatcttatatacaagtatgttccagtaccgaaatttttaaaagagaatgctcacgttttttgctcaaaaagttttaactagtataagggctgaaaatacatttaggttaagtataaactgaggttgttgtagttttatattttgagaaattattagatcgtcatttcggttgttttggctatgtatatttttgaatattgggtctattgaagaaaaagggaagtgtttgcttttgcttcctcgtatttaagtatatacttaatagttgttgaataaaccattaaagaaatgaccttattcaattactattaagtggatacttaaatgcgaggaagtggaagcggatacttctttttattcaatagacccatcgtctctgtttcgactaacttaaaactagcaaaattcgctttataaaaaacaagaaattttggacatcttggatattagtgcaccctatgtacagcacagctgaatcttatgtttgtgcgtcacagtgttgccatgccatttctttcataatttcaatcaatgttaaatgtcactacaagaataatagaataagaacgtttacttctccgtcattatactaggtagaatgacaaataggtgtcaaatgaaagcttatattccaaggatagtactaaaggtgagaaattagacctagattgtctgtccctcaaaaaataagtgttatattggggatttctaatgtcgacattaaaagttgcactattttttttctataaaacattttgatctaaaacttaccagaaaacttctttgtactcattactttcaaataaacgtgattaagaagctaaattttaaacttcgtcgcacaacttttgcgattaaactttgcaagcacaaatccgcacctttttctttgaaaaattcataacctttatcatgataagaataaaaacttgaagcaggtacctttgtcttcagaaatgttagagctatatactgtaaaaatttcagaaaaaaatattaaaatggaacagagttgtagcgaggtaaacgcaaaaaacgtgatttcatttttttttatttttaggttaaaattgcgattttgacaatgttcccccacataaaattcaaaataaacctcattttcgttttcagcaccctcgaaaatataaagtatgaataaaattagccattcacccctccgtggtcagtatctcgaaaactaagtgcttttttgagggtgtcccgctcgtgtataatatcacaaaaaattgtaacgtgatagtatgaaaaaatagaggatacggcaagatacggcaacggtgttacaagtgatgggtcggattcaatgccaaaatctacacagacatatgagggtgcactaatagccaagatgtccgaaattttaccaaataatattacgaaattaaagtaaacaattcctttaaatttcctattatttttgcaacaaattttcgttatttttgtattatttatcccgacaaatgctaacacagtataataccgatgtataaagtcattgaatatttagttttgtaaaaagtgtaaatttttcatgaggatactttacc

SEQ ID NO: 1637 - DNA, 3764 bp, Diabrotica virgifera
aaaatttggaccacttttcgcgtgggcgacttcttgaaccttattctggggtgtctcacgaatgtgattgtgcaagggagtctcatgggaatattttttccaacgaacccgccgttttcgcttgtctaaaatgatattttacgaaaataaataaatgaccttcaaaaatttaaaacaaaatttgcttgctagcttggttattgactgcgttcaccagatgcaaacacgttcacaaatgtttgcgctttgattctaaacttgttgacagcgagttgaacggttggttgtttaggttaaaatttgacattttgcttgcttggtttgaacgtaacctaaaataaattttctcaataaatacgtttttgaatttatttttttttttattaaaggaaaaaagaaaatttatttaatagataataacatagcagaatgtcttcagtagcctttattttatatataaaacccttatcaatatattctacaatatatacaatttaaattcccgccatattttttcaatattcaacacgtttgcaaagttcaacttaaatattttatgtttgcaaaaatggcgaccgctttccaaacatgtttgacgttagcatgtcgttcagaagcataaagcgcaaactgattgccaacgtttgcatctggtgaacgcgcccattggccttgctttatgcaatttggccagctcgatcaggttggcggtcaccacgttgactggctcatgaccatgtcgggcccgccgaatatgtctacttcttgattttttgaagtaaattggctatggtgataactttgactaaatatttactttttgtacaaggttagtaagcgaacatatgggtgttatgcaataattagtaataagcatgaattagaaatgaggtgtagctaatagttgagcattataattttattctgtttatgctaagaaacttcataattgctttgattgattcttcatctacgttatgtaaaattgaatatattgttatcggggttggaagtcctttattggcggaaaattgtgtaggtataataatatgtcccttattggacgttggaaaaaaattgtagatatccccgtttggaatggagttaatagggcattcaaaaaatatgtgattaagattttttatggacccaccacaaaccatacatactcatagacgtttcacgtaaattgtcaaggtcaagacagcaaattagttaccattccaatccagagatgtcgctgtcagtcaattctcttgtcatatttaacaactgacagttgacaattaaattaatttgttatttactttttattttacagtttgtggcttaattattttattatagtggtgttacgtttttaattagatttaatcacaattttaatcaattgtattaacctcctctccgtttttgtgagtagaatttttaatttacattgatcatcccgtgttgtgtttctccacatttaaaaaacaatataatagatcctgaaacagtttattccaatagacaagtgtgtcatcaacatttcggacctatatatttttggaagtttgtaaaagattataaggtaatatttatctaaacaatcatcctacaagattctttcaaaaattttcattcaactcgatacacatcagtgctttcacgtgacacatagcagtagtgtttagcattttgaaaacaaattggaatatttgaaagttttcagtaaaatatggaataaaacattgaattgtctttctgttgttttaatttcctgcgaaatttcatcaaaaatcccgcaaaatttataatttgaaattctcacgtaactaaaatttgtcaatttagttcccattccaatcaagagatggcgttaattcgatccgaaagattaacatggtcgtgaaacgtctatgagtatgtatggtttgtgggacccacattcgcaatagggattgtctgtcaggttcattctaaatataggcaagttttctttgttagacagtgccctgtacgtaacctaaaaataaaaatttgcttttcacattaacaaacaaacaaacaaaatgatatttgacaccaatgacgtatggtcttttgattacatctgtcaacttcgtaaaaaatctttaacgtttcgtgggttttatacaacttcgtatcaaaaccataaaaaacaacaaagggagtaatgtttatgacatagaggtatatattgacatagagggagcctaccttccgcgcttcctgacgacaagatctcatggactggtttgctgcatctctttctaacacattgtatcgaaaatctatgatgacattcagtgtgaatataggcacggaagaggaggacaactgtagcagctttaccatgcgtaagagtgaaacagcactaatccaaataaaaaagatggtgtcgtcacttcgctctgaatgacactctatctatgctaatatataactctatggtttatgacacttttaatggttatgagcattggctgtgtctatatattatacgtcattggtaagtacatactttttaaaagagggcttattattattattctgcagtattagttttttcctacattttttttagctagctttagatgctaatccagcaaacagacgtattttttacgtggactttttggtgaaagtgattcattttgatggcattttcgttaaccttaataaatttatctaatgtacttaaaataacaataaatacacaattttgcgtaaagtttactttaaaaatatattgtacatttatgtataagtcaaaaatccacgcaatttttacataatattcatttaactggtctcagtctgtttgctagaaataaatcagttttttgtactattaatttttactgttttttttttataaaatagacaatggtttttgactgagttattctacatatcgcacctccgctcaaagagtgtcataactcaaaaaatttaaaatcggttttattgcaccaacagtttaataaaactataaactcatatctcacaaagtgtcacgtttatgagtaaagtatttatcgttagatgacactagtgtcattatacgattatccaaaatcaacgactgaacacaaacagtgtcacatatcgacttgtgcaaagcatttgtccatctaagatgtgtataaagcgtcgtttgtcgagttaagacaaggacaagagaaaaaatctgcgtatgtgttcaagaaaagtgacacatttattacttatttatctttctttttgcagtattttgtgtttaatgctgttacttgtatttaaagttacatcattaaaaagtacaagtctgttaaccagataataatattatattctgtactgcaagtgccacttttaataaataatacttcgtaaatttttcgttattttatctgtctagtgtcacaactaaaaaaaatatttttaatatatttaatacgatattttatagagcttcaaagaccactgtagctgactaaaatagttattctaattttaatagtttttgagttaaacccgaaaatgttgtaggacaaactttaaacgtcgttttctcgaaactttgcttttttgacttatgacactctgagcggaggtgcgatatttattttattgttccctccaagtgccaactttttatcttacaggttatagttacaggctctttttaaaccattggaaaaaatatactttattagacttttatatttaagaaaaatgttgttttttaaacaaataaactattttggcgaaaaaaa

SEQ ID NO: 1638 - DNA, 3711 bp, Diabrotica virgifera
aaaatttggaccacttttcgcgtgggcgacttcttgaaccttattctggggtgtctcacgaatgtgattgtgcaagggagtctcatgggaatattttttccaacgaacccgccgttttcgcttgtctaaaatgatattttacgaaaataaataaatgaccttcaaaaatttaaaacaaaatttgcttgctagcttggttattgactgcgttcaccagatgcaaacacgttcacaaatgtttgcgctttgattctaaacttgttgacagcgagttgaacggttggttgtttaggttaaaatttgacattttgcttgcttggtttgaacgtaacctaaaataaattttctcaataaatacgtttttgaatttatttttttttttattaaaggaaaaaagaaaatttatttaatagataataacatagcagaatgtcttcagtagcctttattttatatataaaacccttatcaatatattctacaatatatacaatttaaattcccgccatattttttcaatattcaacacgtttgcaaagttcaacttaaatattttatgtttgcaaaaatggcgaccgctttccaaacatgtttgacgttagcatgtcgttcagaagcataaagcgcaaactgattgccaacgtttgcatctggtgaacgcgcccattggccttgctttatgcaatttggccagctcgatcaggttggcggtcaccacgttgactggctcatgaccatgtcgggcccgccgaatatgtctacttcttgattttttgaagtaaattggctatggtgataactttgactaaatatttactttttgtacaaggttagtaagcgaacatatgggtgttatgcaataattagtaataagcatgaattagaaatgaggtgtagctaatagttgagcattataattttattctgtttatgctaagaaacttcataattgctttgattgattcttcatctacgttatgtaaaattgaatatattgttatcggggttggaagtcctttattggcggaaaattgtgtaggtataataatatgtcccttattggacgttggaaaaaaattgtagatatccccgtttggaatggagttaatagggcattcaaaaaatatgtgattaagattttttatggacccaccacaaaccatacatactcatagacgtttcacgtaaattgtcaaggtcaagacagcaaattagttaccattccaatccagagatgtcgctgtcagtcaattctcttgtcatatttaacaactgacagttgacaattaaattaatttgttatttactttttattttacagtttgtggcttaattattttattatagtggtgttacgtttttaattagatttaatcacaattttaatcaattgtattaacctcctctccgtttttgtgagtagaatttttaatttacattgatcatcccgtgttgtgtttctccacatttaaaaaacaatataatagatcctgaaacagtttattccaatagacaagtgtgtcatcaacatttcgggcctacatatttttggaagtttgtaaaagattataaggtatttatctaaacaatcatcctacaagacacatggcagtagtgtttatagcattttgaaaacaaattggaacatttgaagttttcagtaaaacattgaataaaacattgaattgtctttctgttgtttttatttcctgcgaaatttcttcaaaaatgccgcaaaatttataatttgaaattcctacgtaactaaaatttgtcaatttagttcccattccaatcaagagatggcgttaattcgatccgaaagattaacatggtcgtgaaacgtctatgagtatgtatggtttgtgggacccacattcgcaatagggattgtctgtcaggttcattctaaatataggcaagttttctttgttagacagtgccctgtacgtaacctaaaaataaaaatttgcttttcacattaacaaacaaacaaacaaaatgatatttgacaccaatgacgtatggtcttttgattacatctgtcaacttcgtaaaaaatctttaacgtttcgtgggttttatacaacttcgtatcaaaaccataaaaaacaacaaagggagtaatgtttatgacatagaggtatatattgacatagagggagcctaccttccgcgcttcctgacgacaagatctcatggactggtttgctgcatctctttctaacacattgtatcgaaaatctatgatgacattcagtgtgaatataggcacggaagaggaggacaactgtagcagctttaccatgcgtaagagtgaaacagcactaatccaaataaaaaagatggtgtcgtcacttcgctctgaatgacactctatctatgctaatatataactctatggtttatgacacttttaatggttatgagcattggctgtgtctatatattatacgtcattggtaagtacatactttttaaaagagggcttattattattattctgcagtattagttttttcctacattttttttagctagctttagatgctaatccagcaaacagacgtattttttacgtggactttttggtgaaagtgattcattttgatggcattttcgttaaccttaataaatttatctaatgtacttaaaataacaataaatacacaattttgcgtaaagtttactttaaaaatatattgtacatttatgtataagtcaaaaatccacgcaatttttacataatattcatttaactggtctcagtctgtttgctagaaataaatcagttttttgtactattaatttttactgttttttttttataaaatagacaatggtttttgactgagttattctacatatcgcacctccgctcaaagagtgtcataactcaaaaaatttaaaatcggttttattgcaccaacagtttaataaaactataaactcatatctcacaaagtgtcacgtttatgagtaaagtatttatcgttagatgacactagtgtcattatacgattatccaaaatcaacgactgaacacaaacagtgtcacatatcgacttgtgcaaagcatttgtccatctaagatgtgtataaagcgtcgtttgtcgagttaagacaaggacaagagaaaaaatctgcgtatgtgttcaagaaaagtgacacatttattacttatttatctttctttttgcagtattttgtgtttaatgctgttacttgtatttaaagttacatcattaaaaagtacaagtctgttaaccagataataatattatattctgtactgcaagtgccacttttaataaataatacttcgtaaatttttcgttattttatctgtctagtgtcacaactaaaaaaaatatttttaatatatttaatacgatattttatagagcttcaaagaccactgtagctgactaaaatagttattctaattttaatagtttttgagttaaacccgaaaatgttgtaggacaaactttaaacgtcgttttctcgaaactttgcttttttgacttatgacactctgagcggaggtgcgatatttattttattgttccctccaagtgccaactttttatcttacaggttatagttacaggctctttttaaaccattggaaaaaatatactttattagacttttatatttaagaaaaatgttgttttttaaacaaataaactattttggcgaaaaaaa

SEQ ID NO: 1639 - DNA, 3755 bp, Diabrotica virgifera
aaaatttggaccacttttcgcgtgggcgacttcttgaaccttattctggggtgtctcacgaatgtgattgtgcaagggagtctcatgggaatattttttccaacgaacccgccgttttcgcttgtctaaaatgatattttacgaaaataaataaatgaccttcaaaaatttaaaacaaaatttgcttgctagcttggttattgactgcgttcaccagatgcaaacacgttcacaaatgtttgcgctttgattctaaacttgttgacagcgagttgaacggttggttgtttaggttaaaatttgacattttgcttgcttggtttgaacgtaacctaaaataaattttctcaataaatacgtttttgaatttatttttttttttattaaaggaaaaaagaaaatttatttaatagataataacatagcagaatgtcttcagtagcctttattttatatataaaacccttatcaatatattctacaatatatacaatttaaattcccgccatattttttcaatattcaacacgtttgcaaagttcaacttaaatattttatgtttgcaaaaatggcgaccgctttccaaacatgtttgacgttagcatgtcgttcagaagcataaagcgcaaactgattgccaacgtttgcatctggtgaacgcgcccattggccttgctttatgcaatttggccagctcgatcaggttggcggtcaccacgttgactggctcatgaccatgtcgggcccgccgaatatgtctacttcttgattttttgaagtaaattggctatggtgataactttgactaaatatttactttttgtacaaggttagtaagcgaacatatgggtgttatgcaataattagtaataagcatgaattagaaatgaggtgtagctaatagttgagcattataattttattctgtttatgctaagaaacttcataattgctttgattgattcttcatctacgttatgtaaaattgaatatattgttatcggggttggaagtcctttattggcggaaaattgtgtaggtataataatatgtcccttattggacgttggaaaaaaattgtagatatccccgtttggaatggagttaatagggcattcaaaaaatatgtgattaagattttttatggacccaccacaaaccatacatactcatagacgtttcacgtaaattgtcaaggtcaagacagcaaattagttaccattccaatccagagatgtcgctgtcagtcaattctcttgtcatatttaacaactgacagttgacaattaaattaatttgttatttactttttattttacagtttgtggcttaattattttattatagtggtgttacgtttttaattagatttaatcacaattttaatcaattgtattaacctcctctccgtttttgtgagtagaatttttaatttacattgatcatcccgtgttgtgtttctccacatttaaaaaacaatataatagatcctgaaacagtttattccaatagacaagtgtgtcatcaacatttcggacctatatatttttggaagtttgtaaaagattataaggtaatatttatctaaacaatcatcctacaagattctttcaaaaattttcattcaactcgatacacatcagtgctttcacgtgacacatagcagtagtgtttagcattttgaaaacaaattggaatatttgaaagttttcagtaaaatatggaataaaacattgaattgtctttctgttgttttaatttcctgcgaaatttcatcaaaaatcccgcaaaatttataatttgaaattctcacgtaactaaaatttgtcaatttagttcccattccaatcaagagatggcgttaattcgatccgaaagattaacatggtcgtgaaacgtctatgagtatgtatggtttgtgggacccacattcgcaatagggattgtctgtcaggttcattctaaatataggcaagttttctttgttagacagtgccctgtacgtaacctaaaaataaaaatttgcttttcacattaacaaacaaacaaacaaaatgatatttgacaccaatgacgtatggtcttttgattacatctgtcaacttcgtaaaaaatctttaacgtttcgtgggttttatacaacttcgtatcaaaaccataaaaaacaacaaagggagtaatgtttatgacatagaggtatatattgacatagagggagcctaccttccgcgcttcctgacgacaagatctcatggactggtttgctgcatctctttctaacacattgtatcgaaaatctatgatgacattcagtgtgaatataggcacggaagaggaggacaactgtagcagctttaccatgcgtaagagtgaaacagcactaatccaaataaaaaagatggtgtcgtcacttcgctctgaatgacactctctctatgttaatatataactctatggtctaaagaagtataacttcaaaaaaattaatttttaggttgtgtacactagagatgttgaaaaagtatctattcgttacaaagtactcgttacttacgaatattgaaagtaacgattactatacagagaggcaaatcgctactttgattactgtgattacttcgttacttcataccaatcgtattagagcgagtaacgactattgtatctacttttgattactctgattacttcgttactttctaccaatcgtatcccagcgagtaacggacgggaccggtattttacgagtcttatcgaatatcgttatcgttatgaagcgttttaagggtgtgagggtgaggagaagatagaagatgaagcagagggaggtataatggtatacgtaaaatatgtaatgtatgtcattaacaaagatcgaatgcgagaaccctatatttttatctagatctacgcgatttgccgatgtagattagatagtagatattcacagaatgaaaataaaaataaaacctacctactgagaaatacgattctcgatatgattaccggtactcaaatacaaaagtaacaaaagtaatcatagtaatcaaagtaacaaatactgtaaatgattactttatacaaaagtaacgatttgtaacgattactcgaaagtaactataatcaacatcactagtgtacaatcaatctatgggtctataaaatagacaagttttataaaagcctcaactgagcgtgtgaattttttgaaattttaatattgattgcagcccatcggaaaaaataaaaacgaaaagttacgtttttggcggttaggaaagggggtcgctggctaaaaaaattacactgagtcttattttttattcacatagaacgtaaaaaaagtttaaaaattaaattctggccgtggggtcattttgcctaaattaaagggggcaccctttgttttttattgtttctgttattttttttttctttattgtagccgtttatatgcatttctatggttgtaaaactattcagtattaccacgacgaagacttgaatataactcacatatagtaaatatttcacaaacctcttagaatacttaaaacgcatatgactgtcaaaatgataaattcactgatacagataattctgaaagtggtcattagtgttcaaaggcttcttgtgagatgtttttattttatagctaagccataacatatgctatgtttacattcgtccaataatatttattttttgttacttgtttttaagttgattttttaacagatacaatctttctatta

SEQ ID NO: 1640 - DNA, 3702 bp, Diabrotica virgifera
aaaatttggaccacttttcgcgtgggcgacttcttgaaccttattctggggtgtctcacgaatgtgattgtgcaagggagtctcatgggaatattttttccaacgaacccgccgttttcgcttgtctaaaatgatattttacgaaaataaataaatgaccttcaaaaatttaaaacaaaatttgcttgctagcttggttattgactgcgttcaccagatgcaaacacgttcacaaatgtttgcgctttgattctaaacttgttgacagcgagttgaacggttggttgtttaggttaaaatttgacattttgcttgcttggtttgaacgtaacctaaaataaattttctcaataaatacgtttttgaatttatttttttttttattaaaggaaaaaagaaaatttatttaatagataataacatagcagaatgtcttcagtagcctttattttatatataaaacccttatcaatatattctacaatatatacaatttaaattcccgccatattttttcaatattcaacacgtttgcaaagttcaacttaaatattttatgtttgcaaaaatggcgaccgctttccaaacatgtttgacgttagcatgtcgttcagaagcataaagcgcaaactgattgccaacgtttgcatctggtgaacgcgcccattggccttgctttatgcaatttggccagctcgatcaggttggcggtcaccacgttgactggctcatgaccatgtcgggcccgccgaatatgtctacttcttgattttttgaagtaaattggctatggtgataactttgactaaatatttactttttgtacaaggttagtaagcgaacatatgggtgttatgcaataattagtaataagcatgaattagaaatgaggtgtagctaatagttgagcattataattttattctgtttatgctaagaaacttcataattgctttgattgattcttcatctacgttatgtaaaattgaatatattgttatcggggttggaagtcctttattggcggaaaattgtgtaggtataataatatgtcccttattggacgttggaaaaaaattgtagatatccccgtttggaatggagttaatagggcattcaaaaaatatgtgattaagattttttatggacccaccacaaaccatacatactcatagacgtttcacgtaaattgtcaaggtcaagacagcaaattagttaccattccaatccagagatgtcgctgtcagtcaattctcttgtcatatttaacaactgacagttgacaattaaattaatttgttatttactttttattttacagtttgtggcttaattattttattatagtggtgttacgtttttaattagatttaatcacaattttaatcaattgtattaacctcctctccgtttttgtgagtagaatttttaatttacattgatcatcccgtgttgtgtttctccacatttaaaaaacaatataatagatcctgaaacagtttattccaatagacaagtgtgtcatcaacatttcgggcctacatatttttggaagtttgtaaaagattataaggtatttatctaaacaatcatcctacaagacacatggcagtagtgtttatagcattttgaaaacaaattggaacatttgaagttttcagtaaaacattgaataaaacattgaattgtctttctgttgtttttatttcctgcgaaatttcttcaaaaatgccgcaaaatttataatttgaaattcctacgtaactaaaatttgtcaatttagttcccattccaatcaagagatggcgttaattcgatccgaaagattaacatggtcgtgaaacgtctatgagtatgtatggtttgtgggacccacattcgcaatagggattgtctgtcaggttcattctaaatataggcaagttttctttgttagacagtgccctgtacgtaacctaaaaataaaaatttgcttttcacattaacaaacaaacaaacaaaatgatatttgacaccaatgacgtatggtcttttgattacatctgtcaacttcgtaaaaaatctttaacgtttcgtgggttttatacaacttcgtatcaaaaccataaaaaacaacaaagggagtaatgtttatgacatagaggtatatattgacatagagggagcctaccttccgcgcttcctgacgacaagatctcatggactggtttgctgcatctctttctaacacattgtatcgaaaatctatgatgacattcagtgtgaatataggcacggaagaggaggacaactgtagcagctttaccatgcgtaagagtgaaacagcactaatccaaataaaaaagatggtgtcgtcacttcgctctgaatgacactctctctatgttaatatataactctatggtctaaagaagtataacttcaaaaaaattaatttttaggttgtgtacactagagatgttgaaaaagtatctattcgttacaaagtactcgttacttacgaatattgaaagtaacgattactatacagagaggcaaatcgctactttgattactgtgattacttcgttacttcataccaatcgtattagagcgagtaacgactattgtatctacttttgattactctgattacttcgttactttctaccaatcgtatcccagcgagtaacggacgggaccggtattttacgagtcttatcgaatatcgttatcgttatgaagcgttttaagggtgtgagggtgaggagaagatagaagatgaagcagagggaggtataatggtatacgtaaaatatgtaatgtatgtcattaacaaagatcgaatgcgagaaccctatatttttatctagatctacgcgatttgccgatgtagattagatagtagatattcacagaatgaaaataaaaataaaacctacctactgagaaatacgattctcgatatgattaccggtactcaaatacaaaagtaacaaaagtaatcatagtaatcaaagtaacaaatactgtaaatgattactttatacaaaagtaacgatttgtaacgattactcgaaagtaactataatcaacatcactagtgtacaatcaatctatgggtctataaaatagacaagttttataaaagcctcaactgagcgtgtgaattttttgaaattttaatattgattgcagcccatcggaaaaaataaaaacgaaaagttacgtttttggcggttaggaaagggggtcgctggctaaaaaaattacactgagtcttattttttattcacatagaacgtaaaaaaagtttaaaaattaaattctggccgtggggtcattttgcctaaattaaagggggcaccctttgttttttattgtttctgttattttttttttctttattgtagccgtttatatgcatttctatggttgtaaaactattcagtattaccacgacgaagacttgaatataactcacatatagtaaatatttcacaaacctcttagaatacttaaaacgcatatgactgtcaaaatgataaattcactgatacagataattctgaaagtggtcattagtgttcaaaggcttcttgtgagatgtttttattttatagctaagccataacatatgctatgtttacattcgtccaataatatttattttttgttacttgtttttaagttgattttttaacagatacaatctttctatta

SEQ ID NO: 1641 - DNA, 2713 bp, Diabrotica virgifera
aaaatttggaccacttttcgcgtgggcgacttcttgaaccttattctggggtgtctcacgaatgtgattgtgcaagggagtctcatgggaatattttttccaacgaacccgccgttttcgcttgtctaaaatgatattttacgaaaataaataaatgaccttcaaaaatttaaaacaaaatttgcttgctagcttggttattgactgcgttcaccagatgcaaacacgttcacaaatgtttgcgctttgattctaaacttgttgacagcgagttgaacggttggttgtttaggttaaaatttgacattttgcttgcttggtttgaacgtaacctaaaataaattttctcaataaatacgtttttgaatttatttttttttttattaaaggaaaaaagaaaatttatttaatagataataacatagcagaatgtcttcagtagcctttattttatatataaaacccttatcaatatattctacaatatatacaatttaaattcccgccatattttttcaatattcaacacgtttgcaaagttcaacttaaatattttatgtttgcaaaaatggcgaccgctttccaaacatgtttgacgttagcatgtcgttcagaagcataaagcgcaaactgattgccaacgtttgcatctggtgaacgcgcccattggccttgctttatgcaatttggccagctcgatcaggttggcggtcaccacgttgactggctcatgaccatgtcgggcccgccgaatatgtctacttcttgattttttgaagtaaattggctatggtgataactttgactaaatatttactttttgtacaaggttagtaagcgaacatatgggtgttatgcaataattagtaataagcatgaattagaaatgaggtgtagctaatagttgagcattataattttattctgtttatgctaagaaacttcataattgctttgattgattcttcatctacgttatgtaaaattgaatatattgttatcggggttggaagtcctttattggcggaaaattgtgtaggtataataatatgtcccttattggacgttggaaaaaaattgtagatatcccagtttggaatggagttaatagggcattcaaaaaatatgtgattaagattttttatggacccacattcgcaatagggattgtctgtcaagttcattctaaatataggcaagttttctttgttagacagtgccctgtacgtaacctaaaaataaaaatttgcttttcacattaacaaacaaacaaacaaaatgatatttgacaccaatgacgtatggtcttttgattacatctgtcaacttcgtaaaaaatctttaacgtttcgtgggttttatgcaacttcgtatcaaaaccataaaaaacaacaaagggagtaatgtttatgacacttttaatggttatgagcattggctgtgtctatatattatacgtcattggtaagtacatactttttaaaagagggcttattattattattctgcagtattagttttttcctacattttttttagctagctttagatgctaatccagcaaacagacgtattttttacgtggactttttggtgaaagtgattcattttgatggcattttcgttaaccttaataaatttatctaatgtacttaaaataacaataaatacacaattttgcgtaaagtttactttaaaaatatattgtacatttatgtataagtcaaaaatccacgcaatttttacataatattcatttaactggtctcagtctgtttgctagaaataaatcagttttttgtactattaatttttactgttttttttttataaaatagacaatggtttttgactgagttattctacatatcgcacctccgctcaaagagtgtcataactcaaaaaatttaaaatcggttttattgcaccaacagtttaataaaactataaactcatatctcacaaagtgtcacgtttatgagtaaagtatttatcgttagatgacactagtgtcattatacgattatccaaaatcaacgactgaacacaaacagtgtcacatatcgacttgtgcaaagcatttgtccatctaagatgtgtataaagcgtcgtttgtcgagttaagacaaggacaagagaaaaaatctgcgtatgtgttcaagaaaagtgacacatttattacttatttatctttctttttgcagtattttgtgtttaatgctgttacttgtatttaaagttacatcattaaaaagtacaagtctgttaaccagataataatattatattctgtactgcaagtgccacttttaataaataatacttcgtaaatttttcgttattttatctgtctagtgtcacaactaaaaaaaatatttttaatatatttaatacgatattttatagagcttcaaagaccactgtagctgactaaaatagttattctaattttaatagtttttgagttaaacccgaaaatgttgtaggacaaactttaaacgtcgttttctcgaaactttgcttttttgacttatgacactctgagcggaggtgcgatatttattttattgttccctccaagtgccaactttttatcttacaggttatagttacaggctctttttaaaccattggaaaaaatatactttattagacttttatatttaagaaaaatgttgttttttaaacaaataaactattttggcgaaaaaaa

SEQ ID NO: 1642 - DNA, 2444 bp, Diabrotica virgifera
ggcttaattattttattatagtggtgttacgtttttaattagatttaatcacaattttaataagtgtattaacctcctctccatttttatgagtagaatttttagtttagattgatcatcccgtgttgtgtttctccacataaaccactctaacaatataatagatcctgaaacagtttattccaatagacaagtgtgtcatcaacattacggacctacatatttttggaagtttgtaaaagattataaggtaatatttatctaaacaatcatcctatgtacaagattctttcaaaaattttcattcaactcgatacacatcagtgctttcacgtgacacatagcagtagtgtttagcattttgaaaacaaattggaatatttgaagttttcagtaaaatatggaataaaacattgaattgtctttctgttgttttaatttcctgcgaaatttcatcaaaaatcccgcaaaatttataatttgaaattcctacgtaactaaaatttgtcaatttagttcccattccaatcaagagatggcgttaattcgatccgaaagattaacatggtcgtgaaacgtctatgagtatgtatggtttgtgggacccacattcgcaatagggattgtctgtcaggttcattctaaatataggcaagttttctttgttagacagtgccctgtacgtaacctaaaaataaaaatttgcttttcacattaacaaacaaacaaacaaaatgatatttgacaccaatgacgtatggtcttttgattacatctgtcaacttcgtaaaaaatctttaacgtttcgtgggttttatacaacttcgtatcaaaaccataaaaaacaacaaagggagtaatgtttatgacatagaggtatatattgacatagagggagcctaccttccgcgcttcctgacgacaagatctcatggactggtttgctgcatctctttctaacacattgtatcgaaaatctatgatgacattcagtgtgaatataggcacggaagaggaggacaactgtagcagctttaccatgcgtaagagtgaaacagcactaatccaaataaaaaagatggtgtcgtcacttcgctctgaatgacactctatctatgctaatatataactctatggtttatgacacttttaatggttatgagcattggctgtgtctatatattatacgtcattggtaagtacatactttttaaaagagggcttattattattattctgcagtattagttttttcctacattttttttagctagctttagatgctaatccagcaaacagacgtattttttacgtggactttttggtgaaagtgattcattttgatggcattttcgttaaccttaataaatttatctaatgtacttaaaataacaataaatacacaattttgcgtaaagtttactttaaaaatatattgtacatttatgtataagtcaaaaatccacgcaatttttacataatattcatttaactggtctcagtctgtttgctagaaataaatcagttttttgtactattaatttttactgttttttttttataaaatagacaatggtttttgactgagttattctacatatcgcacctccgctcaaagagtgtcataactcaaaaaatttaaaatcggttttattgcaccaacagtttaataaaactataaactcatatctcacaaagtgtcacgtttatgagtaaagtatttatcgttagatgacactagtgtcattatacgattatccaaaatcaacgactgaacacaaacagtgtcacatatcgacttgtgcaaagcatttgtccatctaagatgtgtataaagcgtcgtttgtcgagttaagacaaggacaagagaaaaaatctgcgtatgtgttcaagaaaagtgacacatttattacttatttatctttctttttgcagtattttgtgtttaatgctgttacttgtatttaaagttacatcattaaaaagtacaagtctgttaaccagataataatattatattctgtactgcaagtgccacttttaataaataatacttcgtaaatttttcgttattttatctgtctagtgtcacaactaaaaaaaatatttttaatatatttaatacgatattttatagagcttcaaagaccactgtagctgactaaaatagttattctaattttaatagtttttgagttaaacccgaaaatgttgtaggacaaactttaaacgtcgttttctcgaaactttgcttttttgacttatgacactctgagcggaggtgcgatatttattttattgttccctccaagtgccaactttttatcttacaggttatagttacaggctctttttaaaccattggaaaaaatatactttattagacttttatatttaagaaaaatgttgttttttaaacaaataaactattttggcgaaaaaaa

SEQ ID NO: 1643 - DNA, 2435 bp, Diabrotica virgifera
ggcttaattattttattatagtggtgttacgtttttaattagatttaatcacaattttaataagtgtattaacctcctctccatttttatgagtagaatttttagtttagattgatcatcccgtgttgtgtttctccacataaaccactctaacaatataatagatcctgaaacagtttattccaatagacaagtgtgtcatcaacattacggacctacatatttttggaagtttgtaaaagattataaggtaatatttatctaaacaatcatcctatgtacaagattctttcaaaaattttcattcaactcgatacacatcagtgctttcacgtgacacatagcagtagtgtttagcattttgaaaacaaattggaatatttgaagttttcagtaaaatatggaataaaacattgaattgtctttctgttgttttaatttcctgcgaaatttcatcaaaaatcccgcaaaatttataatttgaaattcctacgtaactaaaatttgtcaatttagttcccattccaatcaagagatggcgttaattcgatccgaaagattaacatggtcgtgaaacgtctatgagtatgtatggtttgtgggacccacattcgcaatagggattgtctgtcaggttcattctaaatataggcaagttttctttgttagacagtgccctgtacgtaacctaaaaataaaaatttgcttttcacattaacaaacaaacaaacaaaatgatatttgacaccaatgacgtatggtcttttgattacatctgtcaacttcgtaaaaaatctttaacgtttcgtgggttttatacaacttcgtatcaaaaccataaaaaacaacaaagggagtaatgtttatgacatagaggtatatattgacatagagggagcctaccttccgcgcttcctgacgacaagatctcatggactggtttgctgcatctctttctaacacattgtatcgaaaatctatgatgacattcagtgtgaatataggcacggaagaggaggacaactgtagcagctttaccatgcgtaagagtgaaacagcactaatccaaataaaaaagatggtgtcgtcacttcgctctgaatgacactctctctatgttaatatataactctatggtctaaagaagtataacttcaaaaaaattaatttttaggttgtgtacactagagatgttgaaaaagtatctattcgttacaaagtactcgttacttacgaatattgaaagtaacgattactatacagagaggcaaatcgctactttgattactgtgattacttcgttacttcataccaatcgtattagagcgagtaacgactattgtatctacttttgattactctgattacttcgttactttctaccaatcgtatcccagcgagtaacggacgggaccggtattttacgagtcttatcgaatatcgttatcgttatgaagcgttttaagggtgtgagggtgaggagaagatagaagatgaagcagagggaggtataatggtatacgtaaaatatgtaatgtatgtcattaacaaagatcgaatgcgagaaccctatatttttatctagatctacgcgatttgccgatgtagattagatagtagatattcacagaatgaaaataaaaataaaacctacctactgagaaatacgattctcgatatgattaccggtactcaaatacaaaagtaacaaaagtaatcatagtaatcaaagtaacaaatactgtaaatgattactttatacaaaagtaacgatttgtaacgattactcgaaagtaactataatcaacatcactagtgtacaatcaatctatgggtctataaaatagacaagttttataaaagcctcaactgagcgtgtgaattttttgaaattttaatattgattgcagcccatcggaaaaaataaaaacgaaaagttacgtttttggcggttaggaaagggggtcgctggctaaaaaaattacactgagtcttattttttattcacatagaacgtaaaaaaagtttaaaaattaaattctggccgtggggtcattttgcctaaattaaagggggcaccctttgttttttattgtttctgttattttttttttctttattgtagccgtttatatgcatttctatggttgtaaaactattcagtattaccacgacgaagacttgaatataactcacatatagtaaatatttcacaaacctcttagaatacttaaaacgcatatgactgtcaaaatgataaattcactgatacagataattctgaaagtggtcattagtgttcaaaggcttcttgtgagatgtttttattttatagctaagccataacatatgctatgtttacattcgtccaataatatttattttttgttacttgtttttaagttgattttttaacagatacaatctttctatta

SEQ ID NO: 1644 - DNA, 2056 bp, Diabrotica virgifera
cttttgacagttctgaatttggccaaattattttgatttttgtagaatattgaaatattaaaaaaggtacaacaaaacatagagtaagaaaacaatatattaggtgaatattgacagaaattatgatggtaatcaaattatgtaaatcattacatactattttggtagtttcattttaaattttccaaataggtaggtacctatgtaatttttattaggatactgaaacatttacaattattacgtacctgtcgcttttaaaaactatttaaaaagtcactacaattataaacttgcttttttctctgccatcacaacaataaaaactaatatacacatttgttatccataatatccaacaattattgacagatgattttaacacccaatacagatcccttataacgtttgagcgactaataagatagcgtcggtgtgcgcatgcgccagggaatgtaaaaattcaccctcgtgtctaaagcatagaggtatatattaacatagagggagcctaccttccgcgcttcctgacgacaagatctcatggactggtttgctgcatctctttctaacacattgtatcgaaaatctatgatgacattcagtgtgaatataggcacggaagaggaggacaactgtagcagctttaccatgcgtaagagtgaaacagcactaatccaaataaaaaagatggtgtcgtcacttcgctctgaatgacactctatctatgctaatatataactctatggtttatgacacttttaatggttatgagcattggctgtgtctatatattatacgtcattggtaagtacatactttttaaaagagggcttattattattattctgcagtattagttttttcctacattttttttagctagctttagatgctaatccagcaaacagacgtattttttacgtggactttttggtgaaagtgattcattttgatggcattttcgttaaccttaataaatttatctaatgtacttaaaataacaataaatacacaattttgcgtaaagtttactttaaaaatatattgtacatttatgtataagtcaaaaatccacgcaatttttacataatattcatttaactggtctcagtctgtttgctagaaataaatcagttttttgtactattaatttttactgttttttttttataaaatagacaatggtttttgactgagttattctacatatcgcacctccgctcaaagagtgtcataactcaaaaaatttaaaatcggttttattgcaccaacagtttaataaaactataaactcatatctcacaaagtgtcacgtttatgagtaaagtatttatcgttagatgacactagtgtcattatacgattatccaaaatcaacgactgaacacaaacagtgtcacatatcgacttgtgcaaagcatttgtccatctaagatgtgtataaagcgtcgtttgtcgagttaagacaaggacaagagaaaaaatctgcgtatgtgttcaagaaaagtgacacatttattacttatttatctttctttttgcagtattttgtgtttaatgctgttacttgtatttaaagttacatcattaaaaagtacaagtctgttaaccagataataatattatattctgtactgcaagtgccacttttaataaataatacttcgtaaatttttcgttattttatctgtctagtgtcacaactaaaaaaaatatttttaatatatttaatacgatattttatagagcttcaaagaccactgtagctgactaaaatagttattctaattttaatagtttttgagttaaacccgaaaatgttgtaggacaaactttaaacgtcgttttctcgaaactttgcttttttgacttatgacactctgagcggaggtgcgatatttattttattgttccctccaagtgccaactttttatcttacaggttatagttacaggctctttttaaaccattggaaaaaatatactttattagacttttatatttaagaaaaatgttgttttttaaacaaataaactattttggcgaaaaaaa

SEQ ID NO: 1645 - DNA, 2047 bp, Diabrotica virgifera
cttttgacagttctgaatttggccaaattattttgatttttgtagaatattgaaatattaaaaaaggtacaacaaaacatagagtaagaaaacaatatattaggtgaatattgacagaaattatgatggtaatcaaattatgtaaatcattacatactattttggtagtttcattttaaattttccaaataggtaggtacctatgtaatttttattaggatactgaaacatttacaattattacgtacctgtcgcttttaaaaactatttaaaaagtcactacaattataaacttgcttttttctctgccatcacaacaataaaaactaatatacacatttgttatccataatatccaacaattattgacagatgattttaacacccaatacagatcccttataacgtttgagcgactaataagatagcgtcggtgtgcgcatgcgccagggaatgtaaaaattcaccctcgtgtctaaagcatagaggtatatattaacatagagggagcctaccttccgcgcttcctgacgacaagatctcatggactggtttgctgcatctctttctaacacattgtatcgaaaatctatgatgacattcagtgtgaatataggcacggaagaggaggacaactgtagcagctttaccatgcgtaagagtgaaacagcactaatccaaataaaaaagatggtgtcgtcacttcgctctgaatgacactctctctatgttaatatataactctatggtctaaagaagtataacttcaaaaaaattaatttttaggttgtgtacactagagatgttgaaaaagtatctattcgttacaaagtactcgttacttacgaatattgaaagtaacgattactatacagagaggcaaatcgctactttgattactgtgattacttcgttacttcataccaatcgtattagagcgagtaacgactattgtatctacttttgattactctgattacttcgttactttctaccaatcgtatcccagcgagtaacggacgggaccggtattttacgagtcttatcgaatatcgttatcgttatgaagcgttttaagggtgtgagggtgaggagaagatagaagatgaagcagagggaggtataatggtatacgtaaaatatgtaatgtatgtcattaacaaagatcgaatgcgagaaccctatatttttatctagatctacgcgatttgccgatgtagattagatagtagatattcacagaatgaaaataaaaataaaacctacctactgagaaatacgattctcgatatgattaccggtactcaaatacaaaagtaacaaaagtaatcatagtaatcaaagtaacaaatactgtaaatgattactttatacaaaagtaacgatttgtaacgattactcgaaagtaactataatcaacatcactagtgtacaatcaatctatgggtctataaaatagacaagttttataaaagcctcaactgagcgtgtgaattttttgaaattttaatattgattgcagcccatcggaaaaaataaaaacgaaaagttacgtttttggcggttaggaaagggggtcgctggctaaaaaaattacactgagtcttattttttattcacatagaacgtaaaaaaagtttaaaaattaaattctggccgtggggtcattttgcctaaattaaagggggcaccctttgttttttattgtttctgttattttttttttctttattgtagccgtttatatgcatttctatggttgtaaaactattcagtattaccacgacgaagacttgaatataactcacatatagtaaatatttcacaaacctcttagaatacttaaaacgcatatgactgtcaaaatgataaattcactgatacagataattctgaaagtggtcattagtgttcaaaggcttcttgtgagatgtttttattttatagctaagccataacatatgctatgtttacattcgtccaataatatttattttttgttacttgtttttaagttgattttttaacagatacaatctttctatta

SEQ ID NO: 1646 - DNA, 1558 bp, Diabrotica virgifera
  SmartBlast Evalue=7E-20; Info=32 kDa apolipoprotein n=1 Tax= Bombyx mori RepID=B9VTR5_BOMMO
aaagatgaatgatattcttcacaattttcagacgcacattatttaatcaatcattaacatctgtgtataaaagattatatttcattaaaatcaatcgttattaaattaataaaccacgaaaatgattgcttttgcagtaactttttgtttgctggtaatatctgcacagggacaaattcctgttgaaagatgtccagatgtaaaaggagtggcaaatttcgacggatatgcatatttgggtaactggtacgaacaaggtagatatccaactttactggaagatcacggaagatgtgttgttaccaatattgcagtaggccctataagtagaactataaggagtcgtacgcaatatatcaattcagagacaaatgagacacacgttctagaaggagaagcacaacaaggttcaacaactggggaaggtcgatttctagtacatttcttaaatccagacgtaactgtacctttctatgttcttggtacagactatgaaaattattctgtaggtttcgtctgttttgaacgtaatggtgtttttctagagagtcttttccttacaacaagaactccagttccaacacgagatgagatagatgcgattatccaagttcttgacgacaacaatattgatcgtgagcaaataatcgatacagaccaagatgattgtacttattagaacgttattagattaaaataaaatacgagtatattatctgatttctgatttttattttatgtacagctgcggccattgaatttgaatagtttacaagtttacacccttacatatctatttagtagtcaattttttgaatttttacctcgtcaaaagcaacttttacattaaagtaacattacaagtggcggaaccacaatatgtcggttaaaattaaaaaaatcaatattaaataaatctattttacaaaataggcataacaaaatgaaaattatagaaagaagttttttgaataaaatggattacgtttttaataatgaaaataaggaagtctgggttaaaaatatccattttattttaaatatattttattagttatttatgtatcaggggcattacaaagatgtttataccctaagggtgacaagtttataaattcgagggcctctggcccgagagtttatatgtcgccctagggtataaacagctaataatgcacgtggcgcataaaaaactttatagcataccggttcattgcatcaattaaagttttaatattattttatattaattagaagtaatattgtatctcagcaggtatttagtaccgttgctaggaaagtgatgttggttagcaatttcttattaacgtaaacaaagtttttctatgtgacattgtcaaaaaagtcagaatgcaagagaaattcgatacctatttctgaataaataggccaaaaaaagtgactgagaatctgtcaccgaaaaaatttaaagaaaagtacgataaggaatatgcaaaatttcaacagtggatggcagaaaataatactgaatgcgtaaatgagaccgtactactggcatactttggagacatataac

SEQ ID NO: 1647 - DNA, 1555 bp, Diabrotica virgifera
  SmartBlast Evalue=3E-20; Info=32 kDa apolipoprotein n=1 Tax= Bombyx mori RepID=B9VTR5_BOMMO
aaagatgaatgatattcttcacaattttcagacgcacattatttaatcaatcattaacatctgtgtataaaagattatatttcattaaaatcaatcgttattaaattaataaaccacgaaaatgattgcttttgcagtaactttttgtttgctggtaatatctgcacagggacaaattcctgttgaaagatgtccagatgtaaaaggagttgcaaatttcgacggacgtgcatatttgggtgactggtacgaacaaggtagatatccaactttactggaagatcacggaagatgtgttgttaccaatattgcagtaggcaccgatggaactataaggagtcgtacgcaatatatcaattcagagacaaatgagacacacgttctagaaggagaagcacaacaaggttcaacaactggggaaggtcgatttctagtacatttcttaaatccagacgtaactgtacctttctatgttcttggtacagactatgaaaattattctgtaggtttcgtctgttttgaacgtaatggtgtttttctagagagtcttttccttacaacaagaactccagttccaacacgagatgagatagatgcgattatccaagttcttgacgacaacaatattgatcgtgagcaaataatcgatacagaccaagatgattgtacttattagaacgttattagattaaaataaaatacgagtatattatctgatttctgatttttattttatgtacagctgcggccattgaatttgaatagtttacaagtttacacccttacatatctatttagtagtcaattttttgaatttttacctcgtcaaaagcaacttttacattaaagtaacattacaagtggcggaaccacaatatgtcggttaaaattaaaaaaatcaatattaaataaatctattttacaaaataggcataacaaaatgaaaattatagaaagaagttttttgaataaaatggattacgtttttaataatgaaaataaggaagtctgggttaaaaatatccattttattttaaatatattttattagttatttatgtatcaggggcattacaaagatgtttataccctaagggtgacaagtttataaattcgagggcctctggcccgagagtttatatgtcgccctagggtataaacagctaataatgcacgtggcgcataaaaaactttatagcataccggttcattgcatcaattaaagttttaatattattttatattaattagaagtaatattgtatctcagcaggtatttagtaccgttgctaggaaagtgatgttggttagcaatttcttattaacgtaaacaaagtttttctatgtgacattgtcaaaaaagtcagaatgcaagagaaattcgatacctatttctgaataaataggccaaaaaaagtgactgagaatctgtcaccgaaaaaatttaaagaaaagtacgataaggaatatgcaaaatttcaacagtggatggcagaaaataatactgaatgcgtaaatgagaccgtactactggcatactttggagacatataac

SEQ ID NO: 1648 - DNA, 1541 bp, Diabrotica virgifera
catattatcttattattcctaaatatccatacgcacggatcattagcattagaacgcatgattgcgtctcagttttttattattattgtaggcaggaccctgggttatcccgagatgcatgaactgagccaagaggccggccagcctccgttgccaatgctccgcacagcgcagcaggcgtttaaggagacccgttctcctaagagtggcatctacggtgccatcacacgctgcccggagatttaccaacgcacgctaactaacttttcgactccgttgcgtgcatcccgggacaatgaattctagggtcctgactaaaaataatgaaaaaactaaaagtgtgaattttgttatgaaatttgtaacgcaaagcaaaatatcggtaatttatcgtgttttttggattcgcagtagtcggcgtttagaattaaaaaaattcagttgagtatcttaaaaaatgtgaaccttcaacctgtatggactgcaaaacttcaaatctgtatttattttgatatgcatatctacttacagagatagaattgttaacaaataaacgacacaaactttggtaatacacttttacaattgactaactatttttaaaatgatatgatattatgaaattatgaattatgatgacattatgaaatggccctgaattgcattttttggcgcattgttttgctagttcaaatttgtctagatattttacagtaaggtatagtctcccctactgtaaaaatcacgagccgccactggtttacacccttacatatctatttagtagtcaattttttgaatttttacctcgtcaaaagcaacttttacattaaagtaacattacaagtggcggaaccacaatatgtcggttaaaattaaaaaaatcaatattaaataaatctattttacaaaataggcataacaaaatgaaaattatagaaagaagttttttgaataaaatggattacgtttttaataatgaaaataaggaagtctgggttaaaaatatccattttattttaaatatattttattagttatttatgtatcaggggcattacaaagatgtttataccctaagggtgacaagtttataaattcgagggcctctggcccgagagtttatatgtcgccctagggtataaacagctaataatgcacgtggcgcataaaaaactttatagcataccggttcattgcatcaattaaagttttaatattattttatattaattagaagtaatattgtatctcagcaggtatttagtaccgttgctaggaaagtgatgttggttagcaatttcttattaacgtaaacaaagtttttctatgtgacattgtcaaaaaagtcagaatgcaagagaaattcgatacctatttctgaataaataggccaaaaaaagtgactgagaatctgtcaccgaaaaaatttaaagaaaagtacgataaggaatatgcaaaatttcaacagtggatggcagaaaataatactgaatgcgtaaatgagaccgtactactggcatactttggagacatataac

SEQ ID NO: 1649 - DNA, 1254 bp, Diabrotica virgifera
tttgtgatgaaatttggtgtgtggggttggaatggtgtttggaaggacttgttcaagtgactttttcttatatctgtaatgcaaagcaaaatatcggtaatttaccgtgtttttggattcgcagtaggccgcttttagaattaaaaaaattcagttgagtatcttaaaaaatgtgaaccttcaacctgtatggactgcaaaacttcaaatctgtatttattttgatatgcatatctacttacagagatagaattgttaacaaataaacgacacaaactttggtaatacacttttacaattgactaactatttttaaaatgatatgatattatgaaattatgaattatgatgacattatgaaatggccctgaattgcattttttggcgcattgttttgctagttcaaatttgtctagatattttacagtaaggtatagtctcccctactgtaaaaatcacgagccgccactggtttacacccttacatatctatttagtagtcaattttttgaatttttacctcgtcaaaagcaacttttacattaaagtaacattacaagtggcggaaccacaatatgtcggttaaaattaaaaaaatcaatattaaataaatctattttacaaaataggcataacaaaatgaaaattatagaaagaagttttttgaataaaatggattacgtttttaataatgaaaataaggaagtctgggttaaaaatatccattttattttaaatatattttattagttatttatgtatcaggggcattacaaagatgtttataccctaagggtgacaagtttataaattcgagggcctctggcccgagagtttatatgtcgccctagggtataaacagctaataatgcacgtggcgcataaaaaactttatagcataccggttcattgcatcaattaaagttttaatattattttatattaattagaagtaatattgtatctcagcaggtatttagtaccgttgctaggaaagtgatgttggttagcaatttcttattaacgtaaacaaagtttttctatgtgacattgtcaaaaaagtcagaatgcaagagaaattcgatacctatttctgaataaataggccaaaaaaagtgactgagaatctgtcaccgaaaaaatttaaagaaaagtacgataaggaatatgcaaaatttcaacagtggatggcagaaaataatactgaatgcgtaaatgagaccgtactactggcatactttggagacatataac

SEQ ID NO: 1650 - DNA, 709 bp, Diabrotica virgifera
  SmartBlast Evalue=1E-17; Info=Apolipoprotein D n=1 Tax= Camponotus floridanus RepID=E2ABN0_9HYME
aaagatgaatgatattcttcacaattttcagacgcacattatttaatcaatcattaacatctgtgtataaaagattatatttcattaaaatcaatcgttattaaattaataaaccacgaaaatgattgcttttgcagtaactttttgtttgctggtaatatctgcacagggacaaattcctgttgaaaggtgtccagatgtagaagtagttacaaatttcaatggaagtgcatatttgggtgactggtacgaacaagccagatacccaactttactggaagatcacggaagatgtgttgttaccaatattgcagtaggtgacgatagaactataaggagtcgtacccaatatatcaattcagagacaaatgagagacacgtcctagaaggagaaacacaaggttcaacaactggggaaggcaaatttatagtacatttcttaaatccagacgtaactgtacctttctgggttcttggtacagactatgaaagttattctgtaggtttgtcctgttttgaacgagatggtgctcctctagcgagccttttcatttcaacaagaactccatttccaccaaaagatctggtggattcgattctccaagttcttgacgacaacaattttgctataaagccactaatcttcacagaccaaaatgaatgtacttattagattaaaataaaatacgagtatattacctgaaaaaaa

SEQ ID NO: 1651 - DNA, 702 bp, Diabrotica virgifera
  SmartBlast Evalue=1E-17; Info=Apolipoprotein D n=1 Tax= Camponotus floridanus RepID=E2ABN0_9HYME
aaagatgaatgatattcttcacaattttcagacgcacattatttaatcaatcattaacatctgtgtataaaagattatatttcattaaaatcaatcgttattaaattaataaaccacgaaaatgattgcttttgcagtaactttttgtttgctggtaatatctgcacagggacaaattcctgttgaaaggtgtccagatgtagaagtagttacaaatttcaatggaagtgcatatttgggtgactggtacgaacaagccagatacccaactttactggaagatcacggaagatgtgttgttaccaatattgcagtaggtgacgatagaactataaggagtcgtacccaatatatcaattcagagacaaatgagagacacgtcctagaaggagaaacacaaggttcaacaactggggaaggcaaatttatagtacatttcttaaatccagacgtaactgtacctttctgggttcttggtacagactatgaaagttattctgtaggtttgtcctgttttgaacgagatggtgctcctctagcgagccttttcatttcaacaagaactccatttccaccaaaagatctggtggattcgattctccaagttcttgacgacaacaattttgctataaagccactaatcttcacagaccaaaatgaatgtacttattagattaaaataaaatacgagtatattacctg

SEQ ID NO: 1652 - DNA, 942 bp, Diabrotica virgifera
catattatcttattattcctaaatatccatacgcacggatcattagcattagaacgcatgattgcgtctcagttttttattattattgtaggcaggaccctgggttatcccgagatgcatgaactgagccaagaggccggccagcctccgttgccaatgctccgcacagcgcagcaggcgtttaaggagacccgttctcctaagagtggcatctacggtgccatcacacgctgcccggagatttaccaacgcacgctaactaacttttcgactccgttgcgtgcatcccgggacaatgaattctagggtcctgactaaaaataatgaaaaaactaaaagtgtgaattttgttatgaaatttgtaacgcaaagcaaaatatcggtaatttatcgtgttttttggattcgcagtagtcggcgtttagaattaaaaaaattcagttgagtatcttaaaaaatgtgaaccttcaacctgtatggactgcaaaacttcaaatctgtatttattttgatatgcatatctacttacagagatagaattgttaacaaataaacgacacaaactttggtaatacacttttacaattgactaactatttttaaaatgatatgatattatgaaataattatgaattatgatgatattataaaatgtaaataaaaaatggtcataaaaatggggccttcaattaaatttttttggctgatttttttttgctaatacaaatttgtctaaataatttacagttaaacctattgaaaaaatcacgagccgccattggtgatggtgatgagcatcttaataaccggcaaaataacgcaaaagatggaaaacatgaagttgtgagataaaggagatgaaacttgtagaggtgggaaatttagcgatagaaacgtataaatttacattatattgtacatcatgtgcaagtctaaaattca

SEQ ID NO: 1653 - DNA, 655 bp, Diabrotica virgifera
tttgtgatgaaatttggtgtgtggggttggaatggtgtttggaaggacttgttcaagtgactttttcttatatctgtaatgcaaagcaaaatatcggtaatttaccgtgtttttggattcgcagtaggccgcttttagaattaaaaaaattcagttgagtatcttaaaaaatgtgaaccttcaacctgtatggactgcaaaacttcaaatctgtatttattttgatatgcatatctacttacagagatagaattgttaacaaataaacgacacaaactttggtaatacacttttacaattgactaactatttttaaaatgatatgatattatgaaataattatgaattatgatgatattataaaatgtaaataaaaaatggtcataaaaatggggccttcaattaaatttttttggctgatttttttttgctaatacaaatttgtctaaataatttacagttaaacctattgaaaaaatcacgagccgccattggtgatggtgatgagcatcttaataaccggcaaaataacgcaaaagatggaaaacatgaagttgtgagataaaggagatgaaacttgtagaggtgggaaatttagcgatagaaacgtataaatttacattatattgtacatcatgtgcaagtctaaaattca

SEQ ID NO: 1654 - DNA, 1515 bp, Diabrotica virgifera
tctactatttgatgtattcattttttcctcgacctgcctttttcttttttgttttatttcttgtttcgtgaatgtttctcgttagtttattgggtttcattctcatcagatatccatgccatacctttaattgtctttttattattttgtttggatatccttcttattgtctcagttgttattctatccccgtatatgtaccaacttaaaatttgtattttcagacacaatccccaaatatgttcagatgctatttttatataattgcaaattatttggtaactagcaatccgtattgattgcaaaaaaatgtttttgaattataagtgatgtgccttgcaaatatttcgtattttcagtaaaagatttaaatttggtcgcattttttcgacactggttgtacttgaaaggtttaaattataaacctaataagatttctcatgggtatatatttcttcgtaggtaccttatttcaatatatttttgcttccaattttcttaagaggatcggtacgtattttcggctgcaatgctattcaaatggggattcatttttttcgaatcctgagaagctaataagtatttttgaggggtttggacgcagaatgaaggattacgttattggcgagggccgaaagtccctgagaacttctataatgtttattttaataagttacaggggtgaaaaactaagagaaaatttagtgtgatttttaatttcaaatatctcattcaaaataaactttttatttattctaagggactttcggccctcggtaataatttagtctttcattctgcgtttaatttttcaaaatatttattggttttttcaggatttgaaaaaaatgaacacaatgccgtggtaatattttccaaatctatctttgtcatacaacgcactcagtcgaatagaatattgtcagtcagacagtgaaaatttgaaatatttgacatggcatcgggaatattttgagttgttgattaaataatattgatagtgtatttgataaataattgatttaagacgtgaacttaataaaaagttatttattgtttattatttatggagatccaagcagagaatacaccaggatatattctgtgatccaagtattttgttgttaaagatgttcaaaattgtaagcgttcatagtaacaatatattattaaaaaatcactttaacacttttcctcttttctcgattgattattagtttttgttgtacaaataaattattacaatcactgaaaacatagttagtgaaaaattatcacatttattaactgaattaataatttgcaattataaaaataacagttatccaagaacattcaaaagccatctctttaaattaattatgacattttcaagtagaatgacattctagtaatgtttacatatccataccagtgtgaattttactacacgtaatttgccgtgtaaagacagaaaaagtagggatacacgtaaaatatttgcgaattatgtacccatagccttaactactattt

SEQ ID NO: 1655 - DNA, 1543 bp, Diabrotica virgifera
tctactatttgatgtattcattttttcctcgacctgcctttttcttttttgttttatttcttgtttcgtgaatgtttctcgttagtttattgggtttcattctcatcagatatccatgccatacctttaattgtctttttattattttgtttggatatccttcttattgtctcagttgttattctatccccgtatatgtaccaacttaaaatttgtattttcagacacaatccccaaatatgttcagatgctatttttatataattgcaaattatttggtaactagcaatccgtattgattgcaaaaaaatgtttttgaattataagtgatgtgccttgcaaatatttcgtattttcagtaaaagatttaaatttggtcgcattttttcgacactggttgtacttgaaaggtttaaattataaacctaataagatttctcatgggtatatatttcttcgtaggtaccttatttcaatatatttttgcttccaattttcttaagaggatcggtacgtattttcggctgcaatgctattcaaatggggattcatttttttcgaatcctgagaagctaataagtatttttgaggggtttggacgcagaatgaaggattacgttattggcgagggccgaaagtccctgagaacttctataatgtttattttaataagttacaggggtgaaaaactaagagaaaatttagtgtgatttttaatttcaaatatctcattcaaaataaactttttatttattctaagggactttcggccctcggtaataatttagtctttcattctgcgtttaatttttcaaaatatttattggttttttcaggatttgaaaaaaatgaacacaatgccgtggtaatattttccaaatctgtctttgtcttacaacgcactcaaccgaatataatattgtcagcatatattgtcagtcagacactgacaatcagtgacaattttaaatatttgacattgcatcgggaatattttgagaaattgattaaatattattgatatatagtgtatttgataaataattgatttaagacgtgaacttaataaaaagttatttattgtgtattatttgtggaagatccaagcagagaatacatcagatatattctgtgatccaagtattttgttgttagagatgttcaaaattgtaagcgttccaaaataacaatatattattaaaaaatcactttaacacttttcctcttttctcgattgattattagtttttgttgtacaaataaattattacaatcactgaaaacatagttagtgaaaaattatcacatttattaactgaattaataatttgcaattataaaaataacagttatccaagaacattcaaaagccatctctttaaattaattatgacattttcaagtagaatgacattctagtaatgtttacatatccataccagtgtgaattttactacacgtaatttgccgtgtaaagacagaaaaagtagggatacacgtaaaatatttgcgaattatgtacccatagccttaactactattt

SEQ ID NO: 1656 - DNA, 1536 bp, Diabrotica virgifera
tctactatttgatgtattcattttttcctcgacctgcctttttcttttttgttttatttcttgtttcgtgaatgtttctcgttagtttattgggtttcattctcatcagatatccatgccatacctttaattgtctttttattattttgtttggatatccttcttattgtctcagttgttattctatccccgtatatgtaccaacttaaaatttgtattttcagacacaatccccaaatatgttcagatgctatttttatataattgcaaattatttggtaactagcaatccgtattgattgcaaaaaaatgtttttgaattataagtgatgtgccttgcaaatatttcgtattttcagtaaaagatttaaatttggtcgcattttttcgacactggttgtacttgaaaggtttaaattataaacctaataagatttctcatgggtatatatttcttcgtaggtaccttatttcaatatatttttgcttccaattttcttaagaggatcggtacgtattttcggctgcaatgctattcaaatggggattcatttttttcgaatcctgagaagctaataagtatttttgaggggtttggacgcagaatgaaggattacgttattggcgagggccgaaagtccctgagaacttctataatgtttattttaataagttacaggggtgaaaaactaagagaaaatttagtgtgatttttaatttcaaatatctcattcaaaataaactttttatttattctaagggactttcggccctcggtaataatttagtctttcattctgcgtttaatttttcaaaatatttattggttttttcaggatttgaaaaaaatgaacacaatgccgtggtaatattttccaaatctgtctttgtcttacaacgcactcaaccgaatataatattgtcagcatatattgtcagtcagacactgacaatcagtgacaattttaaatatttgacattgcatcgggaatattttgagaaattgattaaatattattgatatatagtgtatttgataaataattgatttaagacgtgaacttaataaaaagttatttattgtgtattatttgtggaagatccaagcagagaatacatcagatatattctgtgatccaagtattttgttgttaaagataaattgtaagcgttccataacaatatattattaaaaaatcactttaacacttttcctcttttctcgattgagtattagtctttgttgtacaaataaattattacaatcactgaatacatagttagtgaaaaaattatcacatttattaactgaattaataatttgcaattataaaaataacagttatccaagaacattcaaaacccatctctttaaattaattatgacattttcaagtagaatgacattctagtaatgtttacatatccataccagtgtgaattttactacacgtaatttgccgtgtaaagacagaaaaagtagggatacacgtaaaatatttgcgaattatgtacccatagccttaactactattt

SEQ ID NO: 1657 - DNA, 725 bp, Diabrotica virgifera
atttattggttttttcaggattcgaaaaaaatcaacacaatgccgtggtaatattttccaaatctatctttgtcttacaacgcactcagccgaatataatattgttagcatatattgtcagtcagacactgacaatcagtgacaattttaaatatttgacattgcatcgggaatatgttgagttattgattaaatattattgaaatatagtgtatttgataaataattgatttaagacgtgaacttaataaaaagttatttattgtgtattatttgtggaagatccaagcagagaatacatcagatatattctgtgatccaagtattttgttgttagagatgttcaaaattgtaagcgttccaaaataacaatatattattaaaaaatcactttaacacttttcctcttttctcgattgattattagtttttgttgtacaaataaattattacaatcactgaaaacatagttagtgaaaaattatcacatttattaactgaattaataatttgcaattataaaaataacagttatccaagaacattcaaaagccatctctttaaattaattatgacattttcaagtagaatgacattctagtaatgtttacatatccataccagtgtgaattttactacacgtaatttgccgtgtaaagacagaaaaagtagggatacacgtaaaatatttgcgaattatgtacccatagccttaactactattt

SEQ ID NO: 1658 - DNA, 718 bp, Diabrotica virgifera
atttattggttttttcaggattcgaaaaaaatcaacacaatgccgtggtaatattttccaaatctatctttgtcttacaacgcactcagccgaatataatattgttagcatatattgtcagtcagacactgacaatcagtgacaattttaaatatttgacattgcatcgggaatatgttgagttattgattaaatattattgaaatatagtgtatttgataaataattgatttaagacgtgaacttaataaaaagttatttattgtgtattatttgtggaagatccaagcagagaatacatcagatatattctgtgatccaagtattttgttgttaaagataaattgtaagcgttccataacaatatattattaaaaaatcactttaacacttttcctcttttctcgattgagtattagtctttgttgtacaaataaattattacaatcactgaatacatagttagtgaaaaaattatcacatttattaactgaattaataatttgcaattataaaaataacagttatccaagaacattcaaaacccatctctttaaattaattatgacattttcaagtagaatgacattctagtaatgtttacatatccataccagtgtgaattttactacacgtaatttgccgtgtaaagacagaaaaagtagggatacacgtaaaatatttgcgaattatgtacccatagccttaactactattt

SEQ ID NO: 1659 - DNA, 665 bp, Diabrotica virgifera
gtccgtggtgatattttccaaatcgaacattcgctatctttgtcatacaacgcactgagtcaaatagaatatgatgacaagacagtgacagttttaaatatttgacatgcatcgggaatattttgagttgttgattaaataatattgatagtgtatttgataaataattgatttaagacgtgaacttaataaaaagttatttattgtttattatttatggagatccaagcagagaatacaccaggatatattctgtgatccaagtattttgttgttaaagatgttcaaaattgtaagcgttcatagtaacaatatattattaaaaaatcactttaacacttttcctcttttctcgattgattattagtttttgttgtacaaataaattattacaatcactgaaaacatagttagtgaaaaattatcacatttattaactgaattaataatttgcaattataaaaataacagttatccaagaacattcaaaagccatctctttaaattaattatgacattttcaagtagaatgacattctagtaatgtttacatatccataccagtgtgaattttactacacgtaatttgccgtgtaaagacagaaaaagtagggatacacgtaaaatatttgcgaattatgtacccatagccttaactactattt

SEQ ID NO: 1660 - DNA, 672 bp, Diabrotica virgifera
  misc_feature (10)..(10): n is a, c, g, or t
atttccaaanctatctttgtcttacaacgcactcagccgaatataatattgtcagcatatattgtcagtcagacactgacaatcagtgacaattttaaatatttgacattgcatcgggaatatgttgagttattgattaaatattattgaaatatagtgtatttgataaataattgatttaagacgtgaacttaataaaaagttatttattgtgtattatttgtggaagatccaagcagagaatacatcagatatattctgtgatccaagtattttgttgttagagatgttcaaaattgtaagcgttccaaaataacaatatattattaaaaaatcactttaacacttttcctcttttctcgattgattattagtttttgttgtacaaataaattattacaatcactgaaaacatagttagtgaaaaattatcacatttattaactgaattaataatttgcaattataaaaataacagttatccaagaacattcaaaagccatctctttaaattaattatgacattttcaagtagaatgacattctagtaatgtttacatatccataccagtgtgaattttactacacgtaatttgccgtgtaaagacagaaaaagtagggatacacgtaaaatatttgcgaattatgtacccatagccttaactactattt

SEQ ID NO: 1661 - DNA, 665 bp, Diabrotica virgifera
  misc_feature (10)..(10): n is a, c, g, or t
atttccaaanctatctttgtcttacaacgcactcagccgaatataatattgtcagcatatattgtcagtcagacactgacaatcagtgacaattttaaatatttgacattgcatcgggaatatgttgagttattgattaaatattattgaaatatagtgtatttgataaataattgatttaagacgtgaacttaataaaaagttatttattgtgtattatttgtggaagatccaagcagagaatacatcagatatattctgtgatccaagtattttgttgttaaagataaattgtaagcgttccataacaatatattattaaaaaatcactttaacacttttcctcttttctcgattgagtattagtctttgttgtacaaataaattattacaatcactgaatacatagttagtgaaaaaattatcacatttattaactgaattaataatttgcaattataaaaataacagttatccaagaacattcaaaacccatctctttaaattaattatgacattttcaagtagaatgacattctagtaatgtttacatatccataccagtgtgaattttactacacgtaatttgccgtgtaaagacagaaaaagtagggatacacgtaaaatatttgcgaattatgtacccatagccttaactactattt

SEQ ID NO: 1662 - DNA, 3520 bp, Diabrotica virgifera
  SmartBlast Evalue=6E-95; Info="GTP-binding protein SAR1B, putative n=3 Tax=Neoptera RepID=E0W2R7_PEDHC"
ctgtcacttctttataatttgtcgttgaaaaagatagggctccaaagtcctattgccaacaaaaaaacaacgcaagacattaaacaacttttttcaagcccatctgtatttaaaaaaacagtgcaaaatgtttctgtgggactggtttacgggaatgctgggatatctaggattgtggaagaaatctggaaaactattattcttaggactggataacgcaggcaaaactacccttctacatatgctcaaggatgacagactggcccagcatcttcccacgttacatcccacatcagaggagctttccattggtaacatgaggtttacgacgttcgatttggggggccacgagcaggctaggagagtgtggagggactactttccagcagtcgatgccatagtgttccttgttgatgccaacgacagctcaagatttgtagaaagccaggaacagctaaatgccctcctctcagacgaaactctatcaaactgtccaatacttatcttaggtaataaaattgatctcccaggtgctgcttcggaagatgaattacgaactagattcggcttgtttggccaaaccacaggcaaaggcaaagtagccagaaatgatctacccggtaggcctctagaactatttatgtgctctatactcaaaagacaaggttatggagaaggtttccgttggttggcacaatatatcgattaattatgtatttttccatttcgttctgtcattgagttaggatattaatgtttgaggaactattggcaacactgcaactacctgattcatttcagatcttaggtactttacataaatatctaaatatagatgttggcaatgtaattttgaacaacagtatatacattcaatgtaaattatatatttttagttaagttaccttcttaaatggtgtttgagtggctatggtactgaaatagtttgactttttgtgttcttcgataactaaaaatgatttcttgtggaaagttacactcagaattacatagttaacttctttatcagcagttgttgtcaagatttccattttgagacgattgttttgtaaattaggtgggaatttttaaaatgttggactgttttttaacatgcctttctcaacttttgttacaaataatgttttgtccagttgtaaatgttttatttaactagagactttctaggttgtgttaataatagtcattggtcaaatacgatagaagccaaaatttgaagaaaaggaacaatgtactagggtggtccgataagtattttgccttcaaaagaaaagtggcgatttatttttcaatattgtctccttctagctcaatacacgtgacccagcgaggcttcacccagattcagcggcttcaatttctgaaggtctgtaaagtagacatcaatagcagcgatgaactcactaaatcgacttacatttctgcccgacgagtgacttttcaaatttggaaacgaaaagaaatcgcacagggccaaatctggagaatacagtggatgggatagtagttagtagtccgaatcgaaaaatttggccatggcgacggcgaaggtgtgagcgggtgcgttgtcgtggaagagtactttttatcttccccaattggggctgttttttctgcaaatcggcgtcgaatcgatccaataatgcgccaaagtaaagccctgtaaccgttttgccctttttttcaggaagctgatatatatcacactttgtgaatcccagaaaacggtggtcatcactttttcggtcgttaggacagtctttgccttcttcgttcgcggtgcgacgtccactgtatcaactgttccttggtttctggtgagtactggtggatccaagtttcgttgatgattatgaaacaatgtagaaactccttcagattacgcttaaacagccttagatattgctctaaggtggtctcatggtggcgcttattgtcctgggtgaacaaatttatttatttattaacgggataccacccaatttaatatatacacaaaatattataattatctagtgatacaataaatataaagatatagtaaatatgtatgacaaaaattggcgatgcagcaatatagaaaaaacaaatgataaaataataagtaaataacaaatataaatcacataagattacaaaatttttttaaacactgtctacaaacattttccgaagcgcacagcaacaaattaaagtctattctatttccatttagaattattctactcagaggagaatgcctaccaaagttgcagcgatgaaatttaattgcaaaattttgagatgttctagtaactctagagagaccattaaagtcaattagagacagtagatcattgcaattaatttttgaattcagttgtttatgaagaaacaaaacatcagcatacatccgcctggaagatagcccaggaaggattaatttatttctaattctgagtatcaatggtcacttaaaggtttgtgtaatttaacttaagtaccgaatgaatttagtatggactttttcaagcttggttatatggacttcataagtgggtgaccaaacaactgagcaatactcaagaacagatctaactagggaaatgtaaatcagtctaatggaattaatgttatgcaaacatctagaagttctaataatgaagcctaacattttaaatgcggcacccaccgcgtcgacagctttctcatgcccaaaatcatgaaggatatgactcatgcgaaccttcagtcgatggtctgccagtgggtgagaagagtcaccatacacagcattcaagcgctctttgatttcactatacactttcccttccaaaaacaagaatcgaatcaccggccgatattgctcttttttcatttttctataatccccagacatgctcacttccacacgcggtcaaaacaaaacaacgaaagttgagattttgacatagataggccatttacaagaatgtattacatatatgatagcagatttatcttgcggtagtctcgccatcgagcgaagaagctaagtacttattggaccacccatgtattcatatggaataagttgtaatcattggttagttttatgtattagaaacaatgggttcctttttatttggtgcataaatattaagaaaactgatgaaactcatttgatcataataaacgatatttattaggattttcactttctaacaaaaattgtttgtagaagtttgacaaacaggaaaagaaacctaaacataagtgactcaaaaatgatttttcgtgcgataatagacaaaatctacctaatacccattcttcttaaagtcggtaatataatttattttatttatgatcttgtaaatgttattctgttgtgtttggcgactgtcctgcaagcagttaaataaaacttgcccaaaacggtttccaagtttcagtcaacacttactgtattttaatccgttatgtaattttattgtatattatcaaatacatttggatttggaataaaaagatacacttg

SEQ ID NO: 1663 - DNA, 3500 bp, Diabrotica virgifera
  SmartBlast Evalue=6E-95; Info="GTP-binding protein SAR1B, putative n=3 Tax=Neoptera RepID=E0W2R7_PEDHC"
ctgtcacttctttataatttgtcgttgaaaaagatagggctccaaagtcctattgccaacaaaaaaacaacgcaagacattaaacaacttttttcaagcccatctgtatttaaaaaaacagtgcaaaatgtttctgtgggactggtttacgggaatgctgggatatctaggattgtggaagaaatctggaaaactattattcttaggactggataacgcaggcaaaactacccttctacatatgctcaaggatgacagactggcccagcatcttcccacgttacatcccacatcagaggagctttccattggtaacatgaggtttacgacgttcgatttggggggccacgagcaggctaggagagtgtggagggactactttccagcagtcgatgccatagtgttccttgttgatgccaacgacagctcaagatttgtagaaagccaggaacagctaaatgccctcctctcagacgaaactctatcaaactgtccaatacttatcttaggtaataaaattgatctcccaggtgctgcttcggaagatgaattacgaactagattcggcttgtttggccaaaccacaggcaaaggcaaagtagccagaaatgatctacccggtaggcctctagaactatttatgtgctctatactcaaaagacaaggttatggagaaggtttccgttggttggcacaatatatcgattaattatgtatttttccatttcgttctgtcattgagttaggatattaatgtttgaggaactattggcaacactgcaactacctgattcatttcagatcttaggtactttacataaatatctaaatatagatgttggcaatgtaattttgaacaacagtatatacattcaatgtaaattatatatttttagttaagttaccttcttaaatggtgtttgagtggctatggtactgaaatagtttgactttttgtgttcttcgataactaaaaatgatttcttgtggaaagttacactcagaattacatagttaacttctttatcagcagttgttgtcaagatttccattttgagacgattgttttgtaaattaggtgggaatttttaaaatgttggactgttttttaacatgcctttctcaacttttgttacaaataatgttttgtccagttgtaaatgttttatttaactagagactttctaggttgtgttaataatagtcattggtcaaatacgatagaagccaaaatttgaagaaaaggaacaatgtactagggtggtccgataagtattttgccttcaaaagaaaagtggcgatttatttttcaatattgtctccttctagctcaatacacgtgacccagcgaggcttcacccagattcagcggcttcaatttctgaaggtctgtaaagtagacatcaatagcagcgatgaactcactaaatcgacttacatttctgcccgacgagtgacttttcaaatttggaaacgaaaagaaatcgcacagggccaaatctggagaatacagtggatgggatagtagttagtagtccgaatcgaaaaatttggccatggcgacggcgaaggtgtgagcgggtgcgttgtcgtggaagagtactttttatcttccccaattggggctgttttttctgcaaatcggcgtcgaatcgatccaataatgcgccaaagtaaagccctgtaaccgttttgccctttttttcaggaagctgatatatatcacactttgtgaatcccagaaaacggtggtcatcactttttcggtcgttaggacagtctttgccttcttcgttcgcggtgcgacgtccactgtatcaactgttccttggtttctggtgagtactggtggatccaagtttcgttgatgattatgaaacaatgtagaaactccttcagattacgcttaaacagccttagatattgctctaaggtggtctcatggtggcgcttattgtcctgggtgaacaaatttatttatttattaacgggataccacccaatttaatatatacacaaaatattataattatctagtgatacaataaatataaagatatagtaaatatgtatgacaaaaattggcgatgcagcaatatagaaaaaacaaatgataaaataataagtaaataacaaatataaatcacataagattacaaaatttttttaaacactgtctacaaacattttccgaagcgcacagcaacaaattaaagtctattctatttccatttagaattattctactcagaggagaatgcctaccaaagttgcagcgatgaaatttaattgcaaaattttgagatgttctagtaactctagagagaccattaaagtcaattagagacagtagatcattgcaattaatttttgaattcagttgtttatgaagaaacaaaacatcagcatacatccgcctggaagatagcccaggaaggattaatttatttctaattctgagtatcaatggtcacttaaaggtttgtgtaatttaatttaagtacctaatgtatttagtatggacttttcaagcttggctatatggacttcataagtgggtgaccaaacaactgagcaatactcaagaacagatctaactagggaaatgtaaatcagtctgatggaattaatgttatgcaaatatctagaagttctaataatgaagcctaacattttaaatgcggcacccaccgcgtcgacagctttctcatgcccaaaatcatgaaggatatgactcatacaccatgtacagcacatgtgtcaccatacacagcattcaagcgctctttgatttcactatacactttcccttccaaaaacaagaatcgaatcaccggccgatattgctcttttttcatttttctataatccccagacatgctcacttccacacgcggtcaaaacaaaacaacgaaagttgagattttgacatagataggccatttacaagaatgtattacatatatgatagcagatttatcttgcggtagtctcgccatcgagcgaagaagctaagtacttattggaccacccatgtattcatatggaataagttgtaatcattggttagttttatgtattagaaacaatgggttcctttttatttggtgcataaatattaagaaaactgatgaaactcatttgatcataataaacgatatttattaggattttcactttctaacaaaaattgtttgtagaagtttgacaaacaggaaaagaaacctaaacataagtgactcaaaaatgatttttcgtgcgataatagacaaaatctacctaatacccattcttcttaaagtcggtaatataatttattttatttatgatcttgtaaatgttattctgttgtgtttggcgactgtcctgcaagcagttaaataaaacttgcccaaaacggtttccaagtttcagtcaacacttactgtattttaatccgttatgtaattttattgtatattatcaaatacatttggatttggaataaaaagatacacttg

SEQ ID NO: 1664 - DNA, 3527 bp, Diabrotica virgifera
  SmartBlast Evalue=6E-95; Info="GTP-binding protein SAR1B, putative n=3 Tax=Neoptera RepID=E0W2R7_PEDHC"
ctgtcacttctttataatttgtcgttgaaaaagatagggctccaaagtcctattgccaacaaaaaaacaacgcaagacattaaacaacttttttcaagcccatctgtatttaaaaaaacagtgcaaaatgtttctgtgggactggtttacgggaatgctgggatatctaggattgtggaagaaatctggaaaactattattcttaggactggataacgcaggcaaaactacccttctacatatgctcaaggatgacagactggcccagcatcttcccacgttacatcccacatcagaggagctttccattggtaacatgaggtttacgacgttcgatttggggggccacgagcaggctaggagagtgtggagggactactttccagcagtcgatgccatagtgttccttgttgatgccaacgacagctcaagatttgtagaaagccaggaacagctaaatgccctcctctcagacgaaactctatcaaactgtccaatacttatcttaggtaataaaattgatctcccaggtgctgcttcggaagatgaattacgaactagattcggcttgtttggccaaaccacaggcaaaggcaaagtagccagaaatgatctacccggtaggcctctagaactatttatgtgctctatactcaaaagacaaggttatggagaaggtttccgttggttggcacaatatatcgattaattatgtatttttccatttcgttctgtcattgagttaggatattaatgtttgaggaactattggcaacactgcaactacctgattcatttcagatcttaggtactttacataaatatctaaatatagatgttggcaatgtaattttgaacaacagtatatacattcaatgtaaattatatatttttagttaagttaccttcttaaatggtgtttgagtggctatggtactgaaatagtttgactttttgtgttcttcgataactaaaaatgatttcttgtggaaagttacactcagaattacatagttaacttctttatcagcagttgttgtcaagatttccattttgagacgattgttttgtaaattaggtgggaatttttaaaatgttggactgttttttaacatgcctttctcaacttttgttacaaataatgttttgtccagttgtaaatgttttatttaactagagactttctaggttgtgttaataatagtcattggtcaaatacgatagaagccaaaatttgaagaaaaggaacaatgtactagggtggtccgataagtattttgccttcaaaagaaaagtggcgatttatttttcaatattgtctccttctagctcgatacacgtgacccagcgaggcttcacccagcttcagctgcttcaatttctgaaggtctgtaaagtagacatcaatagcagcgatgaactcactaaatcgacttacatttctgcccgacgagtgacttttcaaatttggaaacgaaaagaaatcgcacaggaccaaatctggagaatacagtggatgggatagtagttagtagtccgaatcgaccaatttggccatggcgacggcgaatgtgtgagcgggtgtgttgtcgtggaagagtactttttatcttccccaattggggctgttttttctgcaagtcggcgtcgaatcgatccaataatgcgccaaagtaaagccctgtaaccgttttgccctttttttcaggaagctgatatatatcacactttgtgaatcccagaaaatggtggtcatcactttttcggtcgttaggacagtctttgccttcttcggagtacgttcgcggtgcgacgtccactgtatcaactgttccttggtttctggtgagtactggtggatccaagtttcgttgatgattatgaaacaatgtagaaactccttcagattacgcttaaacagccttagatattgctctaaggtggtctcatggtggcgcttattgtcctgggtgaacaaatttatttatttattaacgggataccacccaatttaatatatacacaaaatattataattatctagtgatacaataaatataaagatatagtaaatatgtatgacaaaaattggcgatgcagcaatatagaaaaaacaaatgataaaataataagtaaataacaaatataaatcacataagattacaaaatttttttaaacactgtctacaaacattttccgaagcgcacagcaacaaattaaagtctattctatttccatttagaattattctactcagaggagaatgcctaccaaagttgcagcgatgaaatttaattgcaaaattttgagatgttctagtaactctagagagaccattaaagtcaattagagacagtagatcattgcaattaatttttgaattcagttgtttatgaagaaacaaaacatcagcatacatccgcctggaagatagcccaggaaggattaatttatttctaattctgagtatcaatggtcacttaaaggtttgtgtaatttaacttaagtaccgaatgaatttagtatggactttttcaagcttggttatatggacttcataagtgggtgaccaaacaactgagcaatactcaagaacagatctaactagggaaatgtaaatcagtctaatggaattaatgttatgcaaacatctagaagttctaataatgaagcctaacattttaaatgcggcacccaccgcgtcgacagctttctcatgcccaaaatcatgaaggatatgactcatgcgaaccttcagtcgatggtctgccagtgggtgagaagagtcaccatacacagcattcaagcgctctttgatttcactatacactttcccttccaaaaacaagaatcgaatcaccggccgatattgctcttttttcatttttctataatccccagacatgctcacttccacacgcggtcaaaacaaaacaacgaaagttgagattttgacatagataggccatttacaagaatgtattacatatatgatagcagatttatcttgcggtagtctcgccatcgagcgaagaagctaagtacttattggaccacccatgtattcatatggaataagttgtaatcattggttagttttatgtattagaaacaatgggttcctttttatttggtgcataaatattaagaaaactgatgaaactcatttgatcataataaacgatatttattaggattttcactttctaacaaaaattgtttgtagaagtttgacaaacaggaaaagaaacctaaacataagtgactcaaaaatgatttttcgtgcgataatagacaaaatctacctaatacccattcttcttaaagtcggtaatataatttattttatttatgatcttgtaaatgttattctgttgtgtttggcgactgtcctgcaagcagttaaataaaacttgcccaaaacggtttccaagtttcagtcaacacttactgtattttaatccgttatgtaattttattgtatattatcaaatacatttggatttggaataaaaagatacacttg

SEQ ID NO: 1665 - DNA, 3507 bp, Diabrotica virgifera
  SmartBlast Evalue=6E-95; Info="GTP-binding protein SAR1B, putative n=3 Tax=Neoptera RepID=E0W2R7_PEDHC"
ctgtcacttctttataatttgtcgttgaaaaagatagggctccaaagtcctattgccaacaaaaaaacaacgcaagacattaaacaacttttttcaagcccatctgtatttaaaaaaacagtgcaaaatgtttctgtgggactggtttacgggaatgctgggatatctaggattgtggaagaaatctggaaaactattattcttaggactggataacgcaggcaaaactacccttctacatatgctcaaggatgacagactggcccagcatcttcccacgttacatcccacatcagaggagctttccattggtaacatgaggtttacgacgttcgatttggggggccacgagcaggctaggagagtgtggagggactactttccagcagtcgatgccatagtgttccttgttgatgccaacgacagctcaagatttgtagaaagccaggaacagctaaatgccctcctctcagacgaaactctatcaaactgtccaatacttatcttaggtaataaaattgatctcccaggtgctgcttcggaagatgaattacgaactagattcggcttgtttggccaaaccacaggcaaaggcaaagtagccagaaatgatctacccggtaggcctctagaactatttatgtgctctatactcaaaagacaaggttatggagaaggtttccgttggttggcacaatatatcgattaattatgtatttttccatttcgttctgtcattgagttaggatattaatgtttgaggaactattggcaacactgcaactacctgattcatttcagatcttaggtactttacataaatatctaaatatagatgttggcaatgtaattttgaacaacagtatatacattcaatgtaaattatatatttttagttaagttaccttcttaaatggtgtttgagtggctatggtactgaaatagtttgactttttgtgttcttcgataactaaaaatgatttcttgtggaaagttacactcagaattacatagttaacttctttatcagcagttgttgtcaagatttccattttgagacgattgttttgtaaattaggtgggaatttttaaaatgttggactgttttttaacatgcctttctcaacttttgttacaaataatgttttgtccagttgtaaatgttttatttaactagagactttctaggttgtgttaataatagtcattggtcaaatacgatagaagccaaaatttgaagaaaaggaacaatgtactagggtggtccgataagtattttgccttcaaaagaaaagtggcgatttatttttcaatattgtctccttctagctcgatacacgtgacccagcgaggcttcacccagcttcagctgcttcaatttctgaaggtctgtaaagtagacatcaatagcagcgatgaactcactaaatcgacttacatttctgcccgacgagtgacttttcaaatttggaaacgaaaagaaatcgcacaggaccaaatctggagaatacagtggatgggatagtagttagtagtccgaatcgaccaatttggccatggcgacggcgaatgtgtgagcgggtgtgttgtcgtggaagagtactttttatcttccccaattggggctgttttttctgcaagtcggcgtcgaatcgatccaataatgcgccaaagtaaagccctgtaaccgttttgccctttttttcaggaagctgatatatatcacactttgtgaatcccagaaaatggtggtcatcactttttcggtcgttaggacagtctttgccttcttcggagtacgttcgcggtgcgacgtccactgtatcaactgttccttggtttctggtgagtactggtggatccaagtttcgttgatgattatgaaacaatgtagaaactccttcagattacgcttaaacagccttagatattgctctaaggtggtctcatggtggcgcttattgtcctgggtgaacaaatttatttatttattaacgggataccacccaatttaatatatacacaaaatattataattatctagtgatacaataaatataaagatatagtaaatatgtatgacaaaaattggcgatgcagcaatatagaaaaaacaaatgataaaataataagtaaataacaaatataaatcacataagattacaaaatttttttaaacactgtctacaaacattttccgaagcgcacagcaacaaattaaagtctattctatttccatttagaattattctactcagaggagaatgcctaccaaagttgcagcgatgaaatttaattgcaaaattttgagatgttctagtaactctagagagaccattaaagtcaattagagacagtagatcattgcaattaatttttgaattcagttgtttatgaagaaacaaaacatcagcatacatccgcctggaagatagcccaggaaggattaatttatttctaattctgagtatcaatggtcacttaaaggtttgtgtaatttaatttaagtacctaatgtatttagtatggacttttcaagcttggctatatggacttcataagtgggtgaccaaacaactgagcaatactcaagaacagatctaactagggaaatgtaaatcagtctgatggaattaatgttatgcaaatatctagaagttctaataatgaagcctaacattttaaatgcggcacccaccgcgtcgacagctttctcatgcccaaaatcatgaaggatatgactcatacaccatgtacagcacatgtgtcaccatacacagcattcaagcgctctttgatttcactatacactttcccttccaaaaacaagaatcgaatcaccggccgatattgctcttttttcatttttctataatccccagacatgctcacttccacacgcggtcaaaacaaaacaacgaaagttgagattttgacatagataggccatttacaagaatgtattacatatatgatagcagatttatcttgcggtagtctcgccatcgagcgaagaagctaagtacttattggaccacccatgtattcatatggaataagttgtaatcattggttagttttatgtattagaaacaatgggttcctttttatttggtgcataaatattaagaaaactgatgaaactcatttgatcataataaacgatatttattaggattttcactttctaacaaaaattgtttgtagaagtttgacaaacaggaaaagaaacctaaacataagtgactcaaaaatgatttttcgtgcgataatagacaaaatctacctaatacccattcttcttaaagtcggtaatataatttattttatttatgatcttgtaaatgttattctgttgtgtttggcgactgtcctgcaagcagttaaataaaacttgcccaaaacggtttccaagtttcagtcaacacttactgtattttaatccgttatgtaattttattgtatattatcaaatacatttggatttggaataaaaagatacacttg

SEQ ID NO: 1666 - DNA, 2412 bp, Diabrotica virgifera
  SmartBlast Evalue=4E-95; Info="GTP-binding protein SAR1B, putative n=3 Tax=Neoptera RepID=E0W2R7_PEDHC"
ctgtcacttctttataatttgtcgttgaaaaagatagggctccaaagtcctattgccaacaaaaaaacaacgcaagacattaaacaacttttttcaagcccatctgtatttaaaaaaacagtgcaaaatgtttctgtgggactggtttacgggaatgctgggatatctaggattgtggaagaaatctggaaaactattattcttaggactggataacgcaggcaaaactacccttctacatatgctcaaggatgacagactggcccagcatcttcccacgttacatcccacatcagaggagctttccattggtaacatgaggtttacgacgttcgatttggggggccacgagcaggctaggagagtgtggagggactactttccagcagtcgatgccatagtgttccttgttgatgccaacgacagctcaagatttgtagaaagccaggaacagctaaatgccctcctctcagacgaaactctatcaaactgtccaatacttatcttaggtaataaaattgatctcccaggtgctgcttcggaagatgaattacgaactagattcggcttgtttggccaaaccacaggcaaaggcaaagtagccagaaatgatctacccggtaggcctctagaactatttatgtgctctatactcaaaagacaaggttatggagaaggtttccgttggttggcacaatatatcgattaattatgtatttttccatttcgttctgtcattgagttaggatattaatgtttgaggaactattggcaacactgcaactacctgattcatttcagatcttaggtactttacataaatatctaaatatagatgttggcaatgtaattttgaacaacagtatatacattcaatgtaaattatatatttttagttaagttaccttcttaaatggtgtttgagtggctatggtactgaaatagtttgactttttgtgttcttcgataactaaaaatgatttcttgtggaaagttacactcagaattacatagttaacttctttatcagcagttgttgtcaagatttccattttgagacgattgttttgtaaattaggtgggaatttttaaaatgttggactgttttttaacatgcctttctcaacttttgttacaaataatgttttgtccagttgtaaatgttttatttaactagagactttctaggttgtgttaataatagtcattggtcaaatacgatagaagccaaaatttgaagaaaaggaacaatgtactagggtggtccgataagtattttgccttcaaaagaaaagtggcgatttatttttcaatattgtctccttctagctcaatacacgtgacccagcgaggcttcacccagattcagcggcttcaatttctgaaggtctgtaaagtagacatcaatagcagcgatgaactcactaaatcgacttacatttctgcccgacgagtgacttttcaaatttggaaacgaaaagaaatcgcacagggccaaatctggagaatacagtggatgggatagtagttagtagtccgaatcgaaaaatttggccatggcgacggcgaaggtgtgagcgggtgcgttgtcgtggaagagtactttttatcttccccaattggggctgttttttctgcaagtcggtgtcgaatcgacccaataattcgccaaagtaaagccctgtgaccgttttgccctttttttcaggaagctgatatatatcacactttgtgaatcccagaaaacggtggtcatcacttttcggtcgttaggacagtctttgccttcttcggagtatgttcgcggggcgacgtccactgtatcaactgttccttggtttctggtgagtactggtggatccaagtttcgtcgatgattatgaaacaatgtataaacaataggaaggtttaatttatttctaattctgagtaggaatggtcacttaaaggtttgtgtaatttaacttaagtacctaatgaatttattttggactttttcaagcttggctatatggacttcataagcgggtgaccaaacaacagatctaactagggaaatgtaaatcagtctgattgaattaatgttatgcaaacatctagaagttctaataatgaagcctaacatgttaaatgcggcacccaccgcgtcgacagctttctcatgcccaaaatcatgaaggatatgactcatgcgaaccttcagtcgatggtctgccagtgggtgagaagagtcaccctacacagcattcaagcgctctttgatttcactatacactttcccttccaaaagcaagaatcgaatcactggccgatattgctcttttttcatttttctataatccccagatatgctcacttccacacgcggtcaaaacaaaacaacgaaggttgagattttgacatagataggcc

SEQ ID NO: 1667 - DNA, 901 bp, Diabrotica virgifera
aaaaactttgaccatcacccaaattttattcctcggaaacacaatccacaaccccacaaataccaccacttctctcaataaaaatgcaaatatttcgaaaatcatcaactccaggcccacaagaccttatacaaatttttcatatttccaaacaatatattcaaaaatgatccaatacacagggtgctccatttcaaaaaaatacaaccccggttcacaccgtcgttccgactcaccctgtataatcgaaaataatttcagaatacagacctccctgatacacattagttcccgttataaacactctcttgtatatctcatagtttagccgtaatcagggaagccagaggtttggcgcaccctgtatgatagcagatttatcttgcggtagtggcgccatcgagcgaagaagctaagtacttattggaccacccatgtattcatatggaataagttgtaatcattggttagttttatgtattagaaacaatgggttcctttttatttggtgcataaatattaagaaaactgatgaaactcatttgatcataataaacgatatttattaggattttcactttctaacaaaaattgtttgtggaagtttgacaaacaggaaaagaaacctaaacataagtgactcaaaaatgatttttcgtgcgataatagacaaaatctacctaatacccattcttcttaaagtcggtaatataatttattttatttatgatcttgtaaatgttattctgttgtgtttggcgattgtcctgcaagcagttaaataaaacttgcccaaaacggtttccaagtttcagtcaacacttactgtattttaatccgttatgtaattttattgtatattatcaaatacatttggatttggaataaaaagatacacttg

SEQ ID NO: 1668 - DNA, 785 bp, Diabrotica virgifera
ggcctctaggaccttatacaaatttttcacatttttaaataatacattcaaaaatgatttaatatacagggtgttccattaaaaaataaaactctagttcacaccgtcgttccgactcaccttgtataatcgaaaataacctcagaatacagacctccctgatacacattagttcccgttataaacactctcttgtatatctcatagtttagccgtaatcagggaagccagaggtttggcgcaccctgtatgatagcagatttatcttgcggtagtggcgccatcgagcgaagaagctaagtacttattggaccacccatgtattcatatggaataagttgtaatcattggttagttttatgtattagaaacaatgggttcctttttatttggtgcataaatattaagaaaactgatgaaactcatttgatcataataaacgatatttattaggattttcactttctaacaaaaattgtttgtggaagtttgacaaacaggaaaagaaacctaaacataagtgactcaaaaatgatttttcgtgcgataatagacaaaatctacctaatacccattcttcttaaagtcggtaatataatttattttatttatgatcttgtaaatgttattctgttgtgtttggcgattgtcctgcaagcagttaaataaaacttgcccaaaacggtttccaagtttcagtcaacacttactgtattttaatccgttatgtaattttattgtatattatcaaatacatttggatttggaataaaaagatacacttg

SEQ ID NO: 1669 - DNA, 2501 bp, Diabrotica virgifera
  SmartBlast Evalue=1E-175; Info=Cytochrome oxidase subunit I (Fragment) n=23 Tax=Polyphaga RepID=D2YZ69_9CUCU
tagcttgacaagctaatgttatatttttaactaaatttttcattagagataggtgttcaactatcatcctatggtttaaaattccattgcttactttcagctatctaatgaaagttcaattattttaagaattcatttagaaaaatatttaggtgaaattctttctaatacaataggtataaatctatggtttgcaccacaaatctctgaacattgtccaaaaaaaattcctgatcgtctaagtgagaaactaatttggttaagacgtccgggtgttgcatcaatttttactcctaatgaaggaatagttcatgaatgaataacatctgctgcagtaactaatattcgaatattagtttcaaatgggacagcaattcgattatcaacatctaataatcgaaaattaaaatcatttaattcattagttggaattatatatgaatcaaattctacatttttgaaatctgaatattcataggatcagtatcattgatgaccaatagttttaattgtaatagctgggttattaacttcatctagaatataaattaatcgtaatgatgggatagcaataaaaattaatgtaattgtaggtaaaatagttcaaataatttcaattaattgaccttcaagaagatttcgatgtaaaaatttattaaaaaataaaaaaatattagttgaccaactaaaactgtaataattactaaaattattaatgcatgatcatgaaaataagataattgttctattaatggtgatgatctatcttgtaatatgaaattttttcaagttgaaatttctaaaaaaagtttaaactttatatttggggtttaaatccagtgcactaatctgccatattagaaatttgatgataatattggcaattcagaatatctgtgttcagctggagggttaaattgtagtcattcaattgaagaagttattcttaaaggtcttaatctttttcgttgaaaagaaaaagcttctcaaataataaaaattaagaataataccccaattaaagaaattagtgatccaatagaagatacaatatttcataatataaatacatcaggataatctgaatatcgtcgaggtattcctattaatcctaaaaaatgttgagggaagaaggttaaatttacaccaataaatataataaaaaattgaatttttaaataaaaattatttaaagttatacctgtaaataaaggaaatcattggataaatcccgctataatagcaaatacagctcctatagataatacataatgaaaatgtgcaacaacataataggtatcatgaagtacaatatcaattgaggagtttgctaaaactacccctgttaatcctccaactgtaaataaaaaaataaaacctaaagctcagagtgttactggactatatgtaatagtagttccatgataagtagctaatcatctaaatactttaattccagttggtacagcaataattatagttgctgaggtaaaataagctcgggtatcaacatccattccaactgtaaatatatgatgagctcaaacaataaaacctaataagccaattgctattatagcataaattattcctaaagtaccaaaagcttctttttttcttctctcttgcctaacaatatgagaaattaatccaaatcctggtaaaattaaaatatatacttcaggatgaccaaaaaatcaaaataaatgttgatagagaattggatcccctccaccagctggatcaaaaaatgatgtatttaaatttcgatctgttaataatattgtaatagctccagctaaaactggtaaagataatagaagaaggattgctgtaattacgacagctcaaacaaataggggtattcgatcaaaggttattcctattggtcgtatattaattactgttgtaataaaattaattgcacctaaaattgaagaaataccagctaaatgtaatctaaaaatagctaaatctactgatggacctccatgggcaatatttgatgacagaggcgggtaaactgttcatccggtaccaacccccctttctactatccttcttaataataataataaaagagacgggggaagcaatcaaaatcttatattatttattcgagggaatgctatatcgggagcaccaattattaagggtacaagtcaatttccaaaaccaccaattataataggtataactataaaaaaaattataataaatgcatgagctgtaacaataacattataaatttggtcatttccaattaaagatccgggccttcctaattctgctcgtactaaaattcttaatgaagttcctaccattcctgctcaaattccaaaaataaagtataaagttccaatatctttatgattagttgaaaataatcatttattcggtaaaatggctgagattaagcaataaactgtaaatttatttacgaatttatattcttttaccaagtcttatattcaattatgattttaaattgcaaatttaaa

SEQ ID NO: 1670 - DNA, 1642 bp, Diabrotica virgifera
  SmartBlast Evalue=1E-175; Info=Cytochrome oxidase subunit I (Fragment) n=23 Tax=Polyphaga RepID=D2YZ69_9CUCU
tttaatttgatgataatattggcaattcagaatatctgtgttcagctggagggttaaattgtagtcattcaattgaagaagttattcttaaaggtcttaatctttttcgttgaaaagaaaaagcttctcaaataataaaaattaagaataataccccaattaaagaaattagtgatccaatagaagatacaatatttcataatataaatacatcaggataatctgaatatcgtcgaggtattcctattaatcctaaaaaatgttgagggaagaaggttaaatttacaccaataaatataataaaaaattgaatttttaaataaaaattatttaaagttatacctgtaaataaaggaaatcattggataaatcccgctataatagcaaatacagctcctatagataatacataatgaaaatgtgcaacaacataataggtatcatgaagtacaatatcaattgaggagtttgctaaaactacccctgttaatcctccaactgtaaataaaaaaataaaacctaaagctcagagtgttactggactatatgtaatagtagttccatgataagtagctaatcatctaaatactttaattccagttggtacagcaataattatagttgctgaggtaaaataagctcgggtatcaacatccattccaactgtaaatatatgatgagctcaaacaataaaacctaataagccaattgctattatagcataaattattcctaaagtaccaaaagcttctttttttcttctctcttgcctaacaatatgagaaattaatccaaatcctggtaaaattaaaatatatacttcaggatgaccaaaaaatcaaaataaatgttgatagagaattggatcccctccaccagctggatcaaaaaatgatgtatttaaatttcgatctgttaataatattgtaatagctccagctaaaactggtaaagataatagaagaaggattgctgtaattacgacagctcaaacaaataggggtattcgatcaaaggttattcctattggtcgtatattaattactgttgtaataaaattaattgcacctaaaattgaagaaataccagctaaatgtaatctaaaaatagctaaatctactgatggacctccatgggcaatatttgatgacagaggcgggtaaactgttcatccggtaccaacccccctttctactatccttcttaataataataataaaagagacgggggaagcaatcaaaatcttatattatttattcgagggaatgctatatcgggagcaccaattattaagggtacaagtcaatttccaaaaccaccaattataataggtataactataaaaaaaattataataaatgcatgagctgtaacaataacattataaatttggtcatttccaattaaagatccgggccttcctaattctgctcgtactaaaattcttaatgaagttcctaccattcctgctcaaattccaaaaataaagtataaagttccaatatctttatgattagttgaaaataatcatttattcggtaaaatggctgagattaagcaataaactgtaaatttatttacgaatttatattcttttaccaagtcttatattcaattatgattttaaattgcaaatttaaa

SEQ ID NO: 1671 - DNA, 1639 bp, Diabrotica virgifera
  SmartBlast Evalue=1E-175; Info=Cytochrome oxidase subunit I (Fragment) n=23 Tax=Polyphaga RepID=D2YZ69_9CUCU
aatttgatgataatattggcaattcagaatatctgtgttcagctggagggttaaattgtagtcattcaattgaagaagttattcttaaaggtcttaatctttttcgttgaaaagaaaaagcttctcaaataataaaaattaagaataataccccaattaaagaaattagtgatccaatagaagatacaatatttcataatataaatacatcaggataatctgaatatcgtcgaggtattcctattaatcctaaaaaatgttgagggaagaaggttaaatttacaccaataaatataataaaaaattgaatttttaaataaaaattatttaaagttatacctgtaaataaaggaaatcattggataaatcccgctataatagcaaatacagctcctatagataatacataatgaaaatgtgcaacaacataataggtatcatgaagtacaatatcaattgaggagtttgctaaaactacccctgttaatcctccaactgtaaataaaaaaataaaacctaaagctcagagtgttactggactatatgtaatagtagttccatgataagtagctaatcatctaaatactttaattccagttggtacagcaataattatagttgctgaggtaaaataagctcgggtatcaacatccattccaactgtaaatatatgatgagctcaaacaataaaacctaataagccaattgctattatagcataaattattcctaaagtaccaaaagcttctttttttcttctctcttgcctaacaatatgagaaattaatccaaatcctggtaaaattaaaatatatacttcaggatgaccaaaaaatcaaaataaatgttgatagagaattggatcccctccaccagctggatcaaaaaatgatgtatttaaatttcgatctgttaataatattgtaatagctccagctaaaactggtaaagataatagaagaaggattgctgtaattacgacagctcaaacaaataggggtattcgatcaaaggttattcctattggtcgtatattaattactgttgtaataaaattaattgcacctaaaattgaagaaataccagctaaatgtaatctaaaaatagctaaatctactgatggacctccatgggcaatatttgatgacagaggcgggtaaactgttcatccggtaccaacccccctttctactatccttcttaataataataataaaagagacgggggaagcaatcaaaatcttatattatttattcgagggaatgctatatcgggagcaccaattattaagggtacaagtcaatttccaaaaccaccaattataataggtataactataaaaaaaattataataaatgcatgagctgtaacaataacattataaatttggtcatttccaattaaagatccgggccttcctaattctgctcgtactaaaattcttaatgaagttcctaccattcctgctcaaattccaaaaataaagtataaagttccaatatctttatgattagttgaaaataatcatttattcggtaaaatggctgagattaagcaataaactgtaaatttatttacgaatttatattcttttaccaagtcttatattcaattatgattttaaattgcaaatttaaa

SEQ ID NO: 1672 - DNA, 1647 bp, Diabrotica virgifera
  SmartBlast Evalue=1E-105; Info=Chitinase 4 n=2 Tax=Tribolium castaneum RepID=A1YR26_TRICA
tgtgactgtagcagggatatagattggagaaatgtgggtaaaattggttttagttctagttgctacccaactgtcctctgagattgtatcagctactacatccagagtggtgtgttatcatggaacatgggctcgttatagaaacggaaaagggtcttaccaacttacggacatacctacttcattatgtacccatttaatctacagttttatcggattatctgcgtctggagaaatggtttccttagactcttatttggacaatgatttaaataatctaaataaatttactggcttgaaatcatcaaactcaaatttaaagactctcgttgccatcggaggctggaacgaaggttctgttaaattctcaactcttgctgcatcagcatctcttagaagtacatttatacaaaatgctttacaatattgtcaaaatcataattttgatggacttgatttcgattgggaatatccagctcaacgtggtggagccgcagctgacaaggaaaacttcataactctactaaaagaaaccaaagcagtttttgaagcaaatggtctattagtatcagttgctgttgccgctggttctgcatctgtggcactatcgtacgatattcctcgtatatcccaatatgtcgacatgattaacgtaatgacatacgatttacacggttcttgggatggagtattgggacataatgcacccttgtatgcatcttccgttgacaccactgcggcgagtaaacaactcaacgttgatgctgctatttcaaactggattgctcaaggcgctgatccccaaaaaatcaaccttggtgtacctttgtatggaagaactttcacaatcaccagtagcaccaacgtcgctgtaggagcagtttctagcggagcaggtatttcaggtccctacacattggaagctggatatttaggatataatgaaattgttgaaaaagaattacaaggaggatggacctatgtctgggacaatgaacagcaagttccccatatgtacaaaggagaccaatgggtaggatttgatgatccaaaagccgtacaagttaaaaccaaatatgcacaagataaaggacttggtggtgttatggcttgggctatcgaaacagatgatttccaaggattatctggagttaaaaatccactcttaagagctattaatgaacaattggcaacatcttcaaacgctgctgctgaaacaaatgaaattgcagctgcagctgcggaatcctcagcttccgctgcagaatcttcggcttcagctgcagaatcatcagcttccgctgcagagtcgtcagcttcggctgcagaatcctcagcttctaacacaaacagtgaggctgcttcaaatacctcaaacaatgaagccgcgtcaaattcaaaagttcagaacagtgtgtgctctaaggctggatatgttagggatcccagcgattgctccaaattctactattgcgctgctaataccagtggtgttttagttggtgttcaaatgtcatgttacggtggtctttattttgatactaacagtaacgtatgtaactggaaggcgttagttactaactgtaactaatagaagaaatcattgtacttttaaagttttcctttgttggacagatggtgatagta

SEQ ID NO: 1673 - DNA, 5454 bp, Diabrotica virgifera
  SmartBlast Evalue=3E-10; Info=Neural-cadherin (Fragment) n=1 Tax=Culex quinquefasciatus RepID=B0XD21_CULQU
aaaaaataactttatttttaaaatagattattcctatcacacttctcgtatctactattaggtaatacaaaacaagaacatccgtccgaagatctataatacacttttgctaaatctgcatttacacagcagcaatataatatgcttttattcaacttttgctgatgcttcctcgcttttgtcttcttctaaagctttatcgatgtcatcgtcgttgacactgtctatttggagcttctctacgttttcatcgaaagctaccgattttttcctttctttcatatccggatctgtgctagaatccctcggttcttcttctcccaattctgcaagggtgctgttaaagataaaaccagtgggtcgtctttcttcgattgaacctgatcgaattgttgaatctctgtttgatggcctttttaacgcacttttgtcaaatcgaactttggtgttcatatattcgtcttcggtcattttgtcgtatctcgatttcctgaatttataaaagtaaaatcctgctgttcctgctagcaggataaacatcaaaactgacagaattgaaatagccacaatataaccagtcgtattcatttctttatctgtcgtctcactctgatgtttaagctcaatgttgagtatagcatctccataaacaccttgtctattcttgtcagatatagtgactttcaatgcaatgttgttcaattttttgatttcgtctttaggtagtgtcctataaagagttacttgtactcgtgtgtgtttataattacattggaagtatttttcataatggtaatcatttgataaatcgcattctatatattcgtctaaaacattggtgacaacaaccatatcgtcactgctgaattctcctttggacacgatatactgagcgtcattgatcaatttcgggaactgaatagattctgtaggattattgtcgttgtcgtaatctctaacttgtaaatttaccactgttgttgctgaacgggttgtagtcttgacttgtgcatacagtactactggaatattcgttaaacttctaagagtcgtactggcagctgtatccttcagactgatacggaccactttattggtataaagtacatcgaaatattcattgtatggtcccgctattttcacttccacattttcatctgtttggtccgtggttacagttattttttcataatctaaatcagccatattgttcgatacattgtagagacctttgtaagcaggatactcaaaggatatgtgtttattatcattacctccatcattgttcatacggatgtttagcacagctgaggagctttgttgcgactttgtaatagtagcgatcatttctaacgaaatataggcattagattggaaatcatcatctgacagatcctctttcttttccactgttactacttgatctttgtaggaaatgctaaacttatctttaaactcggaatcatcgctgaatttcacttctatttcatcgttttgcctatctgtagtaagtttgatctccttatcttctttaaattcgccttttccatttactacggaatattcgccagtatttatagtgttgtcaaaacttatttttccttgctctggtgtcggagtatcatctgtgataatcaataagtttattacagtgttgtcctcgactttggaattcttgaccgttgcttttaattgtatagatattgttgaaattttcttaagatcagctattggtatatcggcagttttagttattgttactttagatttgtcgtatgaagctttaaaatatttgtggtagtcgttgtctacatcaaccgatatatgatctgcatcttgatctgtcgccaatgcaatctcatcaacatatatggtagcttctccctctttaacagtgtagtttccattataaagagaagaactgaattttacggaacctttattatattctatgttgacattgacgacggtttttccaactttctgtgttcctgatgatgtagcttcaagagctaggggaattacagacaccttttcataaacatcagaaggaattttagcttttacggtaacaataacttcataattgtcctgtttaacgtcaaagtacgctccatataaagaatcaggcgaaattagaactttgagattaccagcagcttctttggtatcaatagtgattccttcggttccaaatgaacgttcatcatcactgctaatagtatagtttgcttcatataaagctttcttgaaatctatcgaattactctctccatctactggaagatcaattaccaaagtagcgaaggccttggggagttgatccagtgatgcttgcagaactacactcaaactgtgtgcttctaagatcttgtcgggcagttcctttttactagaaatggtataaacgcctgcagttcctgtaggattaacgccaaaatagttgttggcattaaattcatcagtagctacaaattcaacaacagcatctttcaggtcctcactcgatttcaaactaatgtctttatctaactcaatatctggtagaggactagacttgatataatcagcactgtagtagacatcagagaaggttaggtcagacgtaaccacattatcttccaaggcaattatgacagtggcgtagcctatttcgtcgttattcttttcagttgctgacaaagtcaaaaccagctcagtttttcctttgatatcatcatcggggagaggatcttttaaagttactttccatacgttgtccgtgagagtgaacttgaagtattttgaaatatctgaatcactatctaaagacaatttgagttggatgtcatcttgcttgtctttgttggtaattttaatgtcacctatttcgaaagaacttacttctgcagctttgtagctaccgcgatattgtatagacgagaatttaggagctgtcactgcgaggaaattcaagactagagctgcttgtccaagttcttcgttccccttttctgtagctatcaaagttaagagtaaatcgtttgtagatgttttaatctttggtactgacagcaccgctatcttccaaactttggctgcatcgtcaaaagtgatgttgaagttatctttataatcttgttcaaggatactgacattaatatccgataaatcatctttattggtaatcgctatttctgcatccaaacttgtggtagcatcatcgcattcagactgataataaggcttatcgaatctaggtgcatctttgctattaattttcggcagcgtcatcagcagagtacattcgcctacatccttggtggtggaatctgtagctatgacagacataactatatcattggagtttagtgtgtctgcatctagattttgatcaacggttatagtccattttccatcagtatattttatataaagtttttctggtagttatcagtggttaaagtaacactctttgggtcatctctgttactgaatgcgaactgctcgtcaagagttacagtagccttgttgtctccagatacagtgtagctagcggtataatatgttttggaaaactttggagcatcttcagtgttcacattaggtaatttgagatcgatgacagaaaagctggtcagtttggtggttttgtcagtagctgtaatggaaactactagatcggagcgatccagctctttaaggtccagtatgccgtttgtaacgactttccattgtttctcctcgtaggtaaatgtaaaatattctgaataatcattagacgttatgtcaatgttagtatcatcaacgtcagcaccaaatccaatttgatctatcaaatttacagttgctgtagtgccagaaactttgtactctgcttgataatacggtttggagaagataggagcagtaagttccggaagttttaaagtaaatgcagccactggtttatgctcgtcatctccgtctattgtagcagataatgtcgttatgacgggtccagttacagcgtttaggtctagtggtttaacgatggttatagaccaggctgtctttgttgtatcgtaagcaacgctgaagtaatcggtataatcagaaactactatgtgaaccttgcttatatcagctatattttcgaagttaatttcttgatcaaatggaattgttcctgagccctccttaggatattcggcggaataataaacatctttgaattttggaactttatcatcaacagaagaacctgtcaatttaattacaagtaccgacgaaccctttgaagttattccagtttcactagcctccatcactaagatcaactctgttgtggtgtcgaaaacggagtcatccagtggtttggtgattttaatccgccatttgtcagaatcgtattcaacatcaaagttagcagtataatcattaattgctatctttaaatttttgggatcaatagtttcggtgaaagcaacatctgttttaaaatctatataatctgtttggtcttttttatattcagcttcataatataagtccttaaattgtggtcccacttctgttgtatctgttttgagttcgataactaacacagaccttcctgttttagtcacgcctgtttctgtagcttccatggtcagtatgatttctgatagagagtcaaaaactttagaatctagagggtctgttatttgtatacgccatttcttttcagttgtatcgtaagttaccgcaaaattgtccttataagaatctattgtaatttctatattctttggatcattgtctgcttcaaaagcaacatctgttttaaaatctagataatcagtttggccttgtttatattcagattgatagtataagtccttaaattgtggtcccacttctgttgcgtctgttttgagttcgataaccaacacagattttcctgttttagtaattccagactctgtagcttccatggtcagtacgatttctgataaggattcaaaatctttagagtccagaggggattttatttttatacgccacatttgttgagctgtatcataagttacctcgaaattgtccatataagaatccattgatatttttatattctttggatcaatgtctctttcaaatgccacaggtgttttaaaatctatataacgagtttggccttgtttatattcagactgataatataagtccttaaattgtggacccacttctgtagcatcagttttgagttcgataaccaacacagattttccagttttggtgacccctgattctgtagcttccatggttataacgatttctgataaagattcaaaatctttggaatcgaggggagattttatttgtattcgccatttcttgttagttgcatcataaattactgcgaagttgtcagtataagaatctattgttattttagattatttggatcattgtcttctttgaatgtcacagcggatttaaaatctatataatcag

SEQ ID NO: 1674 - DNA, 5454 bp, Diabrotica virgifera
  SmartBlast Evalue=3E-10; Info=Neural-cadherin (Fragment) n=1 Tax=Culex quinquefasciatus RepID=B0XD21_CULQU
aaaaaataactttatttttaaaatagattattcctatcacacttctcgtatctactattaggtaatacaaaacaagaacatccgtccgaagatctataatacacttttgctaaatctgcatttacacagcagcaatataatatgcttttattcaacttttgctgatgcttcctcgcttttgtcttcttctaaagctttatcgatgtcatcgtcgttgacactgtctatttggagcttctctacgttttcatcgaaagctaccgattttttcctttctttcatatccggatctgtgctagaatccctcggttcttcttctcccaattctgcaagggtgctgttaaagataaaaccagtgggtcgtctttcttcgattgaacctgatcgaattgttgaatctctgtttgatggcctttttaacgcacttttgtcaaatcgaactttggtgttcatatattcgtcttcggtcattttgtcgtatctcgatttcctgaatttataaaagtaaaatcctgctgttcctgctagcaggataaacatcaaaactgacagaattgaaatagccacaatataaccagtcttattcatttctttctctgtcgtctctctctcatgtttaagctcaatgttgagtatagcatctccataaacaccttgtctattcttgtcagatatagtgactttcaatgcaatgttgttcaattttttgatttcgtctttaggtagtgtcctataaagagttacttgtactcgtgtgtgtttataattacattggaagtatttttcataatggtaatcatttgataaatcgcacgctatatattcatctaaaacattggtgacaacaaccatatcgtcactgctgaattctcctttggacacgatatactgagcgtcattgatcactttcgggaagtgaatagattctgtaggattattatcgttgtcgtaatctctaacttgtaaatttaccactgttgttgctgaacgggttgtagtcttgacttgtgcatacagtactactggaatattcgttaaacttctaagagtcgtactggcagctgtatccttcagactgatacggaccactttattggtataaagtacatcgaaatattcattgtatggtcccgctattttcacttccacattttcatctgtttggtccgtggttacagttattttttcataatctaaatcagccatattgttcgatacattgtagagacctttgtaagcaggatactcaaaggatatgtgtttattatcattacctccatcattgttcatacggatgtttagcacagctgaggagctttgttgcgactttgtaatagtagcgatcatttctaacgaaatataggcattagattggaaatcatcatctgacagatcctctttcttttccactgttactacttgatctttgtaggaaatgctaaacttatctttaaactcggaatcatcgctgaatttcacttctatttcatcgttttgcctatctgtagtaagtttgatctccttatcttctttaaattcgccttttccatttactacggaatattcgccagtatttatagtgttgtcaaaacttatttttccttgctctggtgtcggagtatcatctgtgataatcaataagtttattacagtgttgtcctcgactttggaattcttgaccgttgcttttaattgtatagatattgttgaaattttcttaagatcagctattggtatatcggcagttttagttattgttactttagatttgtcgtatgaagctttaaaatatttgtggtagtcgttgtctacatcaaccgatatatgatctgcatcttgatctgtcgccaatgcaatctcatcaacatatatggtagcttctccctctttaacagtgtagtttccattataaagagaagaactgaattttacggaacctttattatattctatgttgacattgacgacggtttttccaactttctgtgttcctgatgatgtagcttcaagagctaggggaattacagacaccttttcataaacatcagaaggaattttagcttttacggtaacaataacttcataattgtcctgtttaacgtcaaagtacgctccatataaagaatcaggcgaaattagaactttgagattaccagcagcttctttggtatcaatagtgattccttcggttccaaatgaacgttcatcatcactgctaatagtatagtttgcttcatataaagctttcttgaaatctatcgaattactctctccatctactggaagatcaattaccaaagtagcgaaggccttggggagttgatccagtgatgcttgcagaactacactcaaactgtgtgcttctaagatcttgtcgggcagttcctttttactagaaatggtataaacgcctgcagttcctgtaggattaacgccaaaatagttgttggcattaaattcatcagtagctacaaattcaacaacagcatctttcaggtcctcactcgatttcaaactaatgtctttatctaactcaatatctggtagaggactagacttgatataatcagcactgtagtagacatcagagaaggttaggtcagacgtaaccacattatcttccaaggcaattatgacagtggcgtagcctatttcgtcgttattcttttcagttgctgacaaagtcaaaaccagctcagtttttcctttgatatcatcatcggggagaggatcttttaaagttactttccatacgttgtccgtgagagtgaacttgaagtattttgaaatatctgaatcactatctaaagacaatttgagttggatgtcatcttgcttgtctttgttggtaattttaatgtcacctatttcgaaagaacttacttctgcagctttgtagctaccgcgatattgtatagacgagaatttaggagctgtcactgcgaggaaattcaagactagagctgcttgtccaagttcttcgttccccttttctgtagctatcaaagttaagagtaaatcgtttgtagatgttttaatctttggtactgacagcaccgctatcttccaaactttggctgcatcgtcaaaagtgatgttgaagttatctttataatcttgttcaaggatactgacattaatatccgataaatcatctttattggtaatcgctatttctgcatccaaacttgtggtagcatcatcgcattcagactgataataaggcttatcgaatctaggtgcatctttgctattaattttcggcagcgtcatcagcagagtacattcgcctacatccttggtggtggaatctgtagctatgacagacataactatatcattggagtttagtgtgtctgcatctagattttgatcaacggttatagtccattttccatcagtatattttatataaagtttttctggtagttatcagtggttaaagtaacactctttgggtcatctctgttactgaatgcgaactgctcgtcaagagttacagtagccttgttgtctccagatacagtgtagctagcggtataatatgttttggaaaactttggagcatcttcagtgttcacattaggtaatttgagatcgatgacagaaaagctggtcagtttggtggttttgtcagtagctgtaatggaaactactagatcggagcgatccagctctttaaggtccagtatgccgtttgtaacgactttccattgtttctcctcgtaggtaaatgtaaaatattctgaataatcattagacgttatgtcaatgttagtatcatcaacgtcagcaccaaatccaatttgatctatcaaatttacagttgctgtagtgccagaaactttgtactctgcttgataatacggtttggagaagataggagcagtaagttccggaagttttaaagtaaatgcagccactggtttatgctcgtcatctccgtctattgtagcagataatgtcgttatgacgggtccagttacagcgtttaggtctagtggtttaacgatggttatagaccaggctgtctttgttgtatcgtaagcaacgctgaagtaatcggtataatcagaaactactatgtgaaccttgcttatatcagctatattttcgaagttaatttcttgatcaaatggaattgttcctgagccctccttaggatattcggcggaataataaacatctttgaattttggaactttatcatcaacagaagaacctgtcaatttaattacaagtaccgacgaaccctttgaagttattccagtttcactagcctccatcactaagatcaactctgttgtggtgtcgaaaacggagtcatccagtggtttggtgattttaatccgccatttgtcagaatcgtattcaacatcaaagttagcagtataatcattaattgctatctttaaatttttgggatcaatagtttcggtgaaagcaacatctgttttaaaatctatataatctgtttggtcttttttatattcagcttcataatataagtccttaaattgtggtcccacttctgttgtatctgttttgagttcgataactaacacagaccttcctgttttagtcacgcctgtttctgtagcttccatggtcagtatgatttctgatagagagtcaaaaactttagaatctagagggtctgttatttgtatacgccatttcttttcagttgtatcgtaagttaccgcaaaattgtccttataagaatctattgtaatttctatattctttggatcattgtctgcttcaaaagcaacatctgttttaaaatctagataatcagtttggccttgtttatattcagattgatagtataagtccttaaattgtggtcccacttctgttgcgtctgttttgagttcgataaccaacacagattttcctgttttagtaattccagactctgtagcttccatggtcagtacgatttctgataaggattcaaaatctttagagtccagaggggattttatttttatacgccacatttgttgagctgtatcataagttacctcgaaattgtccatataagaatccattgatatttttatattctttggatcaatgtctctttcaaatgccacaggtgttttaaaatctatataacgagtttggccttgtttatattcagactgataatataagtccttaaattgtggacccacttctgtagcatcagttttgagttcgataaccaacacagattttccagttttggtgacccctgattctgtagcttccatggttataacgatttctgataaagattcaaaatctttggaatcgaggggagattttatttgtattcgccatttcttgttagttgcatcataaattactgcgaagttgtcagtataagaatctattgttattttagattatttggatcattgtcttctttgaatgtcacagcggatttaaaatctatataatcag

SEQ ID NO: 1675 - DNA, 5454 bp, Diabrotica virgifera
  SmartBlast Evalue=2E-10; Info=Neural-cadherin (Fragment) n=1 Tax=Culex quinquefasciatus RepID=B0XD21_CULQU
aaaaaataactttatttttaaaatagattattcctatcacacttctcgtatctactattaggtaatacaaaacaagaacatccgtccgaagatctataatacacttttgctaaatctgcatttacacagcagcaatataatatgcttttattcaacttttgctgatgcttcctcgcttttgtcttcttctaaagctttatcgatgtcatcgtcgttgacactgtctatttggagcttctctacgttttcatcgaaagctaccgattttttcctttctttcatatccggatctgtgctagaatccctcggttcttcttctcccaattctgcaagggtgctgttaaagataaaaccagtgggtcgtctttcttcgattgaacctgatcgaattgttgaatctctgtttgatggcctttttaacgcacttttgtcaaatcgaactttggtgttcatatattcgtcttcggtcattttgtcgtatctcgatttcctgaatttataaaagtaaaatcctgctgttcctgctagcaggataaacatcaaaactgacagaattgaaatagccacaatataaccagtcgtattcatttctttatctgtcgtctcactctgatgtttaagctcaatgttgagtatagcatctccataaacaccttgtctattcttgtcagatatagtgactttcaatgcaatgttgttcaattttttgatttcgtctttaggtagtgtcctataaagagttacttgtactcgtgtgtgtttataattacattggaagtatttttcataatggtaatcatttgataaatcgcattctatatattcgtctaaaacattggtgacaacaaccatatcgtcactgctgaattctcctttggacacgatatactgagcgtcattgatcaatttcgggaactgaatagattctgtaggattattgtcgttgtcgtaatctctaacttgtaaatttaccactgttgttgctgaacgggttgtagtcttgacttgtgcatacagtactactggaatattcgttaaacttctaagagtcgtactggcagctgtatccttcagactgatacggaccactttattggtataaagtacatcgaaatattcattgtatggtcccgctattttcacttccacattttcatctgtttggtccgtggttacagttattttttcataatctaaatcagccatattgttcgatacattgtagagacctttgtaagcaggatactcaaaggatatgtgtttattatcattacctccatcattgttcatacggatgtttagcacagctgaggagctttgttgcgactttgtaatagtagcgatcatttctaacgaaatataggcattagattggaaatcatcatctgacagatcctctttcttttccactgttactacttgatctttgtaggaaatgctaaacttatctttaaactcggaatcatcgctgaatttcacttctatttcatcgttttgcctatctgtagtaagtttgatctccttatcttctttaaattcgccttttccatttactacggaatattcgccagtatttatagtgttgtcaaaacttatttttccttgctctggtgtcggagtatcatctgtgataatcaataagtttattacagtgttgtcctcgactttggaattcttgaccgttgcttttaattgtatagatattgttgaaattttcttaagatcagctattggtatatcggcagttttagttattgttactttagatttgtcgtatgaagctttaaaatatttgtggtagtcgttgtctacatcaaccgatatatgatctgcatcttgatctgtcgccaatgcaatctcatcaacatatatggtagcttctccctctttaacagtgtagtttccattataaagagaagaactgaattttacggaacctttattatattctatgttgacattgacgacggtttttccaactttctgtgttcctgatgatgtagcttcaagagctaggggaattacagacaccttttcataaacatcagaaggaattttagcttttacggtaacaataacttcataattgtcctgtttaacgtcaaagtacgctccatataaagaatcaggcgaaattagaactttgagattaccagcagcttctttggtatcaatagtgattccttcggttccaaatgaacgttcatcatcactgctaatagtatagtttgcttcatataaagctttcttgaaatctatcgaattactctctccatctactggaagatcaattaccaaagtagcgaaggccttggggagttgatccagtgatgcttgcagaactacactcaaactgtgtgcttctaagatcttgtcgggcagttcctttttactagaaatggtataaacgcctgcagttcctgtaggattaacgccaaaatagttgttggcattaaattcatcagtagctacaaattcaacaacagcatctttcaggtcctcactcgatttcaaactaatgtctttatctaactcaatatctggtagaggactagacttgatataatcagcactgtagtagacatcagagaaggttaggtcagacgtaaccacattatcttccaaggcaattatgacagtggcgtagcctatttcgtcgttattcttttcagttgctgacaaagtcaaaaccagctcagtttttcctttgatatcatcatcggggagaggatcttttaaagttactttccatacgttgtccgtgagagtgaacttgaagtattttgaaatatctgaatcactatctaaagacaatttgagttggatgtcatcttgcttgtctttgttggtaattttaatgtcacctatttcgaaagaacttacttctgcagctttgtagctaccgcgatattgtatagacgagaatttaggagctgtcactgcgaggaaattcaagactagagctgcttgtccaagttcttcgttccccttttctgtagctatcaaagttaagagtaaatcgtttgtagatgttttaatctttggtactgacagcaccgctatcttccaaactttggctgcatcgtcaaaagtgatgttgaagttatctttataatcttgttcaaggatactgacattaatatccgataaatcatctttattggtaatcgctatttctgcatccaaacttgtggtagcatcatcgcattcagactgataataaggcttatcgaatctaggtgcatctttgctattaattttcggcagcgtcatcagcagagtacattcgcctacatccttggtggtggaatctgtagctatgacagacataactatatcattggagtttagtgtgtctgcatctagattttgatcaacggttatagtccattttccatcagtatattttatataaagtttttctggtagttatcagtggttaaagtaacactctttgggtcatctctgttactgaatgcgaactgctcgtcaagagttacagtagccttgttgtctccagatacagtgtagctagcggtataatatgttttggaaaactttggagcatcttcagtgttcacattaggtaatttgagatcgatgatagaaaagctggtcagtttggtggttttgtcggtagctgtaatggaaacaactagattggaacgatccagctctttaaggtccagtatgccgtttgtaacgactttccattgtttcttctcataggtaaatgtaaaatattcggaataatcattagacgttatgtcaatgttattatcatcaacgtcagcaccaaacccaatttgatctatcaaatttacagttgctgtagtgccagaaactttgtactctgcttgataatacggtttggagaagataggagcagtaagttccggaagttttaaagtaaatgcagccactggtttatgctcgtcatctccgtctattgtagcagataatgtcgttatgacgggtccagttacagcgtttaggtctagtggtttaacgatggttatagaccaggctgtctttgttgtatcgtaagcaacgctgaagtaatcggtataatcagaaactactatgtgaaccttgcttatatcagctatattttcgaagttaatttcttgatcaaatggaattgttcctgagccctccttaggatattcggcggaataataaacatctttgaattttggaactttatcatcaacagaagaacctgtcaatttaattacaagtaccgacgaaccctttgaagttattccagtttcactagcctccatcactaagatcaactctgttgtggtgtcgaaaacggagtcatccagtggtttggtgattttaatccgccatttgtcagaatcgtattcaacatcaaagttagcagtataatcattaattgctatctttaaatttttgggatcaatagtttcggtgaaagcaacatctgttttaaaatctatataatctgtttggtcttttttatattcagcttcataatataagtccttaaattgtggtcccacttctgttgtatctgttttgagttcgataactaacacagaccttcctgttttagtcacgcctgtttctgtagcttccatggtcagtatgatttctgatagagagtcaaaaactttagaatctagagggtctgttatttgtatacgccatttcttttcagttgtatcgtaagttaccgcaaaattgtccttataagaatctattgtaatttctatattctttggatcattgtctgcttcaaaagcaacatctgttttaaaatctagataatcagtttggccttgtttatattcagattgatagtataagtccttaaattgtggtcccacttctgttgcgtctgttttgagttcgataaccaacacagattttcctgttttagtaattccagactctgtagcttccatggtcagtacgatttctgataaggattcaaaatctttagagtccagaggggattttatttttatacgccacatttgttgagctgtatcataagttacctcgaaattgtccatataagaatccattgatatttttatattctttggatcaatgtctctttcaaatgccacaggtgttttaaaatctatataacgagtttggccttgtttatattcagactgataatataagtccttaaattgtggacccacttctgtagcatcagttttgagttcgataaccaacacagattttccagttttggtgacccctgattctgtagcttccatggttataacgatttctgataaagattcaaaatctttggaatcgaggggagattttatttgtattcgccatttcttgttagttgcatcataaattactgcgaagttgtcagtataagaatctattgttattttagattatttggatcattgtcttctttgaatgtcacagcggatttaaaatctatataatcag

SEQ ID NO: 1676 - DNA, 5454 bp, Diabrotica virgifera
  SmartBlast Evalue=2E-10; Info=Neural-cadherin (Fragment) n=1 Tax=Culex quinquefasciatus RepID=B0XD21_CULQU
aaaaaataactttatttttaaaatagattattcctatcacacttctcgtatctactattaggtaatacaaaacaagaacatccgtccgaagatctataatacacttttgctaaatctgcatttacacagcagcaatataatatgcttttattcaacttttgctgatgcttcctcgcttttgtcttcttctaaagctttatcgatgtcatcgtcgttgacactgtctatttggagcttctctacgttttcatcgaaagctaccgattttttcctttctttcatatccggatctgtgctagaatccctcggttcttcttctcccaattctgcaagggtgctgttaaagataaaaccagtgggtcgtctttcttcgattgaacctgatcgaattgttgaatctctgtttgatggcctttttaacgcacttttgtcaaatcgaactttggtgttcatatattcgtcttcggtcattttgtcgtatctcgatttcctgaatttataaaagtaaaatcctgctgttcctgctagcaggataaacatcaaaactgacagaattgaaatagccacaatataaccagtcttattcatttctttctctgtcgtctctctctcatgtttaagctcaatgttgagtatagcatctccataaacaccttgtctattcttgtcagatatagtgactttcaatgcaatgttgttcaattttttgatttcgtctttaggtagtgtcctataaagagttacttgtactcgtgtgtgtttataattacattggaagtatttttcataatggtaatcatttgataaatcgcacgctatatattcatctaaaacattggtgacaacaaccatatcgtcactgctgaattctcctttggacacgatatactgagcgtcattgatcactttcgggaagtgaatagattctgtaggattattatcgttgtcgtaatctctaacttgtaaatttaccactgttgttgctgaacgggttgtagtcttgacttgtgcatacagtactactggaatattcgttaaacttctaagagtcgtactggcagctgtatccttcagactgatacggaccactttattggtataaagtacatcgaaatattcattgtatggtcccgctattttcacttccacattttcatctgtttggtccgtggttacagttattttttcataatctaaatcagccatattgttcgatacattgtagagacctttgtaagcaggatactcaaaggatatgtgtttattatcattacctccatcattgttcatacggatgtttagcacagctgaggagctttgttgcgactttgtaatagtagcgatcatttctaacgaaatataggcattagattggaaatcatcatctgacagatcctctttcttttccactgttactacttgatctttgtaggaaatgctaaacttatctttaaactcggaatcatcgctgaatttcacttctatttcatcgttttgcctatctgtagtaagtttgatctccttatcttctttaaattcgccttttccatttactacggaatattcgccagtatttatagtgttgtcaaaacttatttttccttgctctggtgtcggagtatcatctgtgataatcaataagtttattacagtgttgtcctcgactttggaattcttgaccgttgcttttaattgtatagatattgttgaaattttcttaagatcagctattggtatatcggcagttttagttattgttactttagatttgtcgtatgaagctttaaaatatttgtggtagtcgttgtctacatcaaccgatatatgatctgcatcttgatctgtcgccaatgcaatctcatcaacatatatggtagcttctccctctttaacagtgtagtttccattataaagagaagaactgaattttacggaacctttattatattctatgttgacattgacgacggtttttccaactttctgtgttcctgatgatgtagcttcaagagctaggggaattacagacaccttttcataaacatcagaaggaattttagcttttacggtaacaataacttcataattgtcctgtttaacgtcaaagtacgctccatataaagaatcaggcgaaattagaactttgagattaccagcagcttctttggtatcaatagtgattccttcggttccaaatgaacgttcatcatcactgctaatagtatagtttgcttcatataaagctttcttgaaatctatcgaattactctctccatctactggaagatcaattaccaaagtagcgaaggccttggggagttgatccagtgatgcttgcagaactacactcaaactgtgtgcttctaagatcttgtcgggcagttcctttttactagaaatggtataaacgcctgcagttcctgtaggattaacgccaaaatagttgttggcattaaattcatcagtagctacaaattcaacaacagcatctttcaggtcctcactcgatttcaaactaatgtctttatctaactcaatatctggtagaggactagacttgatataatcagcactgtagtagacatcagagaaggttaggtcagacgtaaccacattatcttccaaggcaattatgacagtggcgtagcctatttcgtcgttattcttttcagttgctgacaaagtcaaaaccagctcagtttttcctttgatatcatcatcggggagaggatcttttaaagttactttccatacgttgtccgtgagagtgaacttgaagtattttgaaatatctgaatcactatctaaagacaatttgagttggatgtcatcttgcttgtctttgttggtaattttaatgtcacctatttcgaaagaacttacttctgcagctttgtagctaccgcgatattgtatagacgagaatttaggagctgtcactgcgaggaaattcaagactagagctgcttgtccaagttcttcgttccccttttctgtagctatcaaagttaagagtaaatcgtttgtagatgttttaatctttggtactgacagcaccgctatcttccaaactttggctgcatcgtcaaaagtgatgttgaagttatctttataatcttgttcaaggatactgacattaatatccgataaatcatctttattggtaatcgctatttctgcatccaaacttgtggtagcatcatcgcattcagactgataataaggcttatcgaatctaggtgcatctttgctattaattttcggcagcgtcatcagcagagtacattcgcctacatccttggtggtggaatctgtagctatgacagacataactatatcattggagtttagtgtgtctgcatctagattttgatcaacggttatagtccattttccatcagtatattttatataaagtttttctggtagttatcagtggttaaagtaacactctttgggtcatctctgttactgaatgcgaactgctcgtcaagagttacagtagccttgttgtctccagatacagtgtagctagcggtataatatgttttggaaaactttggagcatcttcagtgttcacattaggtaatttgagatcgatgatagaaaagctggtcagtttggtggttttgtcggtagctgtaatggaaacaactagattggaacgatccagctctttaaggtccagtatgccgtttgtaacgactttccattgtttcttctcataggtaaatgtaaaatattcggaataatcattagacgttatgtcaatgttattatcatcaacgtcagcaccaaacccaatttgatctatcaaatttacagttgctgtagtgccagaaactttgtactctgcttgataatacggtttggagaagataggagcagtaagttccggaagttttaaagtaaatgcagccactggtttatgctcgtcatctccgtctattgtagcagataatgtcgttatgacgggtccagttacagcgtttaggtctagtggtttaacgatggttatagaccaggctgtctttgttgtatcgtaagcaacgctgaagtaatcggtataatcagaaactactatgtgaaccttgcttatatcagctatattttcgaagttaatttcttgatcaaatggaattgttcctgagccctccttaggatattcggcggaataataaacatctttgaattttggaactttatcatcaacagaagaacctgtcaatttaattacaagtaccgacgaaccctttgaagttattccagtttcactagcctccatcactaagatcaactctgttgtggtgtcgaaaacggagtcatccagtggtttggtgattttaatccgccatttgtcagaatcgtattcaacatcaaagttagcagtataatcattaattgctatctttaaatttttgggatcaatagtttcggtgaaagcaacatctgttttaaaatctatataatctgtttggtcttttttatattcagcttcataatataagtccttaaattgtggtcccacttctgttgtatctgttttgagttcgataactaacacagaccttcctgttttagtcacgcctgtttctgtagcttccatggtcagtatgatttctgatagagagtcaaaaactttagaatctagagggtctgttatttgtatacgccatttcttttcagttgtatcgtaagttaccgcaaaattgtccttataagaatctattgtaatttctatattctttggatcattgtctgcttcaaaagcaacatctgttttaaaatctagataatcagtttggccttgtttatattcagattgatagtataagtccttaaattgtggtcccacttctgttgcgtctgttttgagttcgataaccaacacagattttcctgttttagtaattccagactctgtagcttccatggtcagtacgatttctgataaggattcaaaatctttagagtccagaggggattttatttttatacgccacatttgttgagctgtatcataagttacctcgaaattgtccatataagaatccattgatatttttatattctttggatcaatgtctctttcaaatgccacaggtgttttaaaatctatataacgagtttggccttgtttatattcagactgataatataagtccttaaattgtggacccacttctgtagcatcagttttgagttcgataaccaacacagattttccagttttggtgacccctgattctgtagcttccatggttataacgatttctgataaagattcaaaatctttggaatcgaggggagattttatttgtattcgccatttcttgttagttgcatcataaattactgcgaagttgtcagtataagaatctattgttattttagattatttggatcattgtcttctttgaatgtcacagcggatttaaaatctatataatcag

SEQ ID NO: 1677 - DNA, 2012 bp, Diabrotica virgifera
  SmartBlast Evalue=1E-17; Info=Conserved Plasmodium protein n=1 Tax=Plasmodium falciparum 3D7 RepID=Q8IJ80_PLAF7
aaaaatagtgttttatttaatatactcgtttgaataataatattgaatgtaaaataaataaaaaatacttctaattaattgtattattaaatttccatagtattcatgcgagtttggtacatcattctttcgttcattagcatcggtttcatcatctccatattggtcattttatcagacatcatcctttggttcatcatttctttgttcatcattttttcattcatcatttgctggtcaatttctttcatcattaggggtacttgtttttgagccatcatttttcttgtcatcattaattgttggtttatcatttggtcttccaacatttttttgttcatcatttcacgtttcatcattttttctttcattatgttattattaatcatcattttgagggccaccattttttcgttcattgtttgtggaactccttgttcggtcatcatttgtcttctcatcgtcatgtttgggaccatcatttgttgattcatcatttcaggttccatcattttttcattcatcatcatatcaggttgcatcaatttttggttcatcatttgtggaacttcgtgttcggacatcatttctcttctcatcctcatgttaggggccatcattttttgattcatcatttgttgtcccaacattcttttgctcatcatcatgggcatcatcattttttcgttcatcatttcgttattcatcatcatgtctggttgcatcattttttggttcatcatgtgttggggcatcatcattttttcgttcatcatttcgttattcatcatcatgtctggttgcatcattttttgattcatcatgtgttggggcatcatattattttccatcattctttggttcatcatgtgttggggcatcatattattttccatcattctttggttcatcatgttttgggacatcatgtttttgtccatcattgattgcatgttcatcatacgtctgtccatcatttctgagttcatcatcatttgtaagggaactctgttcatatattgttggtattgttgggggtacatctgatcacgtaccatttggtccatcattgacatttgttgttcctgcatttgtggctgtctgatgttaagcataaagcgggccaatggactcatttggttttgttggtacatttgttccattcttggttgataagacatttgttggtagtactcggggttcatgtatctttgtgagagcatatattctggatagtattgttcttccatcatatttccttggtactgattttgtctgacttgttgaaggcgcattaataagcgttgcattggggtcatggtttccataacattttggttcatgttccagtattgttgaacttccataccattcatgtgcatttgcatccttcttaattcgttttctgcttcttcaaccggaacgacaccactaacttcatgcataacttcaattccatctttaagaggaataacaacatctttggtcatcacttcaggtttcaagtctttcttcatgacatttttggtgtcatacatggtcatcatgggttcttcaaccatttggttatccaacatgctcaatacggataggacctttggatgtaagacatcattttgaaccaacagtttgatcatcttcatgattttaccgtaggtcattgaatctactacatcatattggctgaaaataccatccaaaacatccatctgggtgtaaacttctcccaagttcttgatgtatttggtgtccaaaatatttctgatgtctacattcttattggtgatgggttcatccaagtcgtatacaattttacttgtggaaccttgcttgagtgtgactgtgagtctctttgggttgcttaaacttcttctgatattaatttcgtatttggtgttcaggagattgatgccaccatcgtcgtccactaaaacaccgacgcttaaagtgctgacggcacagcaacaagccactagcgcaaagaataccaaaaccttcatgttgatgcacgg

SEQ ID NO: 1678 - DNA, 2050 bp, Diabrotica virgifera
  SmartBlast Evalue=1E-17; Info=Conserved Plasmodium protein n=1 Tax=Plasmodium falciparum 3D7 RepID=Q8IJ80_PLAF7
aaaaatagtgttttatttaatatactcgtttgaataataatattgaatgtaaaataaataaaaaatacttctaattaattgtattattaaatttccatagtattcatgcgagtttggtacatcattctttcgttcattagcatcggtttcatcatctccatattggtcattttatcagacatcatcctttggttcatcatttctttgttcatcattttttcattcatcatttgctggtcaatttctttcatcattaggggtacttgtttttgagccatcatttttcttgtcatcattaattgttggtttatcatttggtcttccaacatttttttgttcatcatttcacgtttcatcattttttctttcattatgttattattaatcatcattttgagggccaccattttttcgttcattgtttgtggaactccttgttcggtcatcatttgtcttctcatcgtcatgtttgggaccatcatttgttgattcatcatttcaggttccatcattttttcattcatcatcatatcaggttgcatcaatttttggttcatcatttgtggaacttcgtgttcggacatcatttctcttctcatcctcatgttaggggccatcattttttgattcatcatttgttgtcccaacattcttttgctcatcatcatgggcatcatcattttttcgttcatcatttcgttattcatcatcatgtctggttgcatcattttttggttcatcatgtgttggggcatcatcattttttcgttcatcatttcgttattcatcatcatgtctggttgcatcattttttggttcatcatgtgttggggcatcatcattttttcgttcatcatttcgttattcatcatcatgtctggttgcatcattttttggttcatcatgtgttggggcatcatattattttccatcattctttggttaatcatgttttgggacatcatgttgttgtccatcattgattgcatgttcatcatacgtctgtccatcatttctgagttcatcatcatttgtaagggaactctgttcatatattgttggtattgttgggggtacatctgatcacgtaccatttggtccatcattgacatttgttgttcctgcatttgtggctgtctgatgttaagcataaagcgggccaatggactcatttggttttgttggtacatttgttccattcttggttgataagacatttgttggtagtactcggggttcatgtatctttgtgagagcatatattctggatagtattgttcttccatcatatttccttggtactgattttgtctgacttgttgaaggcgcattaataagcgttgcattggggtcatggtttccataacattttggttcatgttccagtgtttttgaacttccataccattcatttgcatttgcatccttcttaattcgttttctgcttcttcaaccggaacgacaccactaacttcatgcataactgcaattccgtctttaagaggaataacaacatctttggtcatcacttcaggtttcaagtctttcttcatgacatttttggtgtcatacatggtcatcatgggttcttcaaccatttggttatccaacatgctcaatacagataggacctttggatgtaagacatcattttgaaccaacagtttgatcatattcatgattttaccgtaggtcattgaatctactacatcatattggctgaaaataccatccaaaacatccatctgggtgtaaacttctcccaagttcttgatgtatttggtgtccaaaatatttctgatgtctacattcttattggtgatgggttcatccaagtcgtatacaattttgcttgtggaaccttgcttgagtgtgactgtgagcctctttgggttgcttaaacttcttctgatattaatttcgtatttggtgttcagaagattgattccaccatcgtcgtccactaaaacaccgacgcttaaagtgctgacggcacagcaacaagccactagcgcaaagaataccaaaaccttcatgttgatgcacggtt

SEQ ID NO: 1679 - DNA, 2014 bp, Diabrotica virgifera
  SmartBlast Evalue=1E-17; Info=Conserved Plasmodium protein n=1 Tax=Plasmodium falciparum 3D7 RepID=Q8IJ80_PLAF7
aaaaatagtgttttatttaatatactcgtttgaataataatattgaatgtaaaataaataaaaaatacttctaattaattgtattattaaatttccatagtattcatgcgagtttggtacatcattctttcgttcattagcatcggtttcatcatctccatattggtcattttatcagacatcatcctttggttcatcatttctttgttcatcattttttcattcatcatttgctggtcaatttctttcatcattaggggtacttgtttttgagccatcatttttcttgtcatcattaattgttggtttatcatttggtcttccaacatttttttgttcatcatttcacgtttcatcattttttctttcattatgttattattaatcatcattttgagggccaccattttttcgttcattgtttgtggaactccttgttcggtcatcatttgtcttctcatcgtcatgtttgggaccatcatttgttgattcatcatttcaggttccatcattttttcattcatcatcatatcaggttgcatcaatttttggttcatcatttgtggaacttcgtgttcggacatcatttctcttctcatcctcatgttaggggccatcattttttgattcatcatttgttgtcccaacattcttttgctcatcatcatgggcatcatcattttttcgttcatcatttcgttattcatcatcatgtctggttgcatcattttttggttcatcatgtgttggggcatcatcattttttcgttcatcatttcgttattcatcatcatgtctggttgcatcattttttgattcatcatgtgttggggcatcatattattttccatcattctttggttcatcatgtgttggggcatcatattattttccatcattctttggttcatcatgttttgggacatcatgtttttgtccatcattgattgcatgttcatcatacgtctgtccatcatttctgagttcatcatcatttgtaagggaactctgttcatatattgttggtattgttgggggtacatctgatcacgtaccatttggtccatcattgacatttgttgttcctgcatttgtggctgtctgatgttaagcataaagcgggccaatggactcatttggttttgttggtacatttgttccattcttggttgataagacatttgttggtagtactcggggttcatgtatctttgtgagagcatatattctggatagtattgttcttccatcatatttccttggtactgattttgtctgacttgttgaaggcgcattaataagcgttgcattggggtcatggtttccataacattttggttcatgttccagtgtttttgaacttccataccattcatttgcatttgcatccttcttaattcgttttctgcttcttcaaccggaacgacaccactaacttcatgcataactgcaattccgtctttaagaggaataacaacatctttggtcatcacttcaggtttcaagtctttcttcatgacatttttggtgtcatacatggtcatcatgggttcttcaaccatttggttatccaacatgctcaatacagataggacctttggatgtaagacatcattttgaaccaacagtttgatcatattcatgattttaccgtaggtcattgaatctactacatcatattggctgaaaataccatccaaaacatccatctgggtgtaaacttctcccaagttcttgatgtatttggtgtccaaaatatttctgatgtctacattcttattggtgatgggttcatccaagtcgtatacaattttgcttgtggaaccttgcttgagtgtgactgtgagcctctttgggttgcttaaacttcttctgatattaatttcgtatttggtgttcagaagattgattccaccatcgtcgtccactaaaacaccgacgcttaaagtgctgacggcacagcaacaagccactagcgcaaagaataccaaaaccttcatgttgatgcacggtt

SEQ ID NO: 1680 - DNA, 2050 bp, Diabrotica virgifera
  SmartBlast Evalue=1E-17; Info=Conserved Plasmodium protein n=1 Tax=Plasmodium falciparum 3D7 RepID=Q8IJ80_PLAF7
aaaaatagtgttttatttaatatactcgtttgaataataatattgaatgtaaaataaataaaaaatacttctaattaattgtattattaaatttccatagtattcatgcgagtttggtacatcattctttcgttcattagcatcggtttcatcatctccatattggtcattttatcagacatcatcctttggttcatcatttctttgttcatcattttttcattcatcatttgctggtcaatttctttcatcattaggggtacttgtttttgagccatcatttttcttgtcatcattaattgttggtttatcatttggtcttccaacatttttttgttcatcatttcacgtttcatcattttttctttcattatgttattattaatcatcattttgagggccaccattttttcgttcattgtttgtggaactccttgttcggtcatcatttgtcttctcatcgtcatgtttgggaccatcatttgttgattcatcatttcaggttccatcattttttcattcatcatcatatcaggttgcatcaatttttggttcatcatttgtggaacttcgtgttcggacatcatttctcttctcatcctcatgttaggggccatcattttttgattcatcatttgttgtcccaacattcttttgctcatcatcatgggcatcatcattttttcgttcatcatttcgttattcatcatcatgtctggttgcatcattttttggttcatcatgtgttggggcatcatcattttttcgttcatcatttcgttattcatcatcatgtctggttgcatcattttttggttcatcatgtgttggggcatcatcattttttcgttcatcatttcgttattcatcatcatgtctggttgcatcattttttggttcatcatgtgttggggcatcatattattttccatcattctttggttaatcatgttttgggacatcatgttgttgtccatcattgattgcatgttcatcatacgtctgtccatcatttctgagttcatcatcatttgtgagggaactctgttcatatattgttggtattgttgtgggtacatctgatcacgtaccatttggtccatcattgacatttggtgttcctgcatttgtggctgtctgatgttaagcataaagcgggccaatggactcatttggttttgttggtacatttgttccattcttggttgataagacatttgttggtagtactcggggttcatgtatctttgggagagcatatattctggatagtattgttcttccatcatatttccttggtactgattttgtctgacttgttgaaggcgcattaataagcgttgcattggggtcatggtttccataacattttggttcatgttccagtgctgttgaacttccataccattcatttgcatttgcatccttcttaatgcgttttctgcttcttcaaccggaacgacaccactaacttcatgcataactgcaattccatctttaagaggaataacaacatctttggtcatcacttcaggtttcaagtctttcttcatgacatttttggtgtcatacatggtcatcatgggttcttcaaccatttggttatccaacatgctcaatacagataggacctttggatgtaagacatcattttgaaccaacagtttgatcatattcatgattttaccgtaggtcattgaatctactacatcatattggctgaaaataccatccaaaacatccatctgggtgtaaacttctcccaagttcttgatgtatttggtgtccaaaatatttctgatgtctacattcttattggtgatgggttcatccaagtcgtatacaattttgcttgtggaaccttgcttgagtgtgactgtgagcctctttgggttgcttaaacttcttctgatattaatttcgtatttggtgttcagaagattgattccaccatcgtcgtccactaaaacaccgacgcttaaagtgctgacggcacagcaacaagccactagcgcaaagaataccaaaaccttcatgttgatgcacggtt

SEQ ID NO: 1681 - DNA, 2014 bp, Diabrotica virgifera
  SmartBlast Evalue=1E-17; Info=Conserved Plasmodium protein n=1 Tax=Plasmodium falciparum 3D7 RepID=Q8IJ80_PLAF7
aaaaatagtgttttatttaatatactcgtttgaataataatattgaatgtaaaataaataaaaaatacttctaattaattgtattattaaatttccatagtattcatgcgagtttggtacatcattctttcgttcattagcatcggtttcatcatctccatattggtcattttatcagacatcatcctttggttcatcatttctttgttcatcattttttcattcatcatttgctggtcaatttctttcatcattaggggtacttgtttttgagccatcatttttcttgtcatcattaattgttggtttatcatttggtcttccaacatttttttgttcatcatttcacgtttcatcattttttctttcattatgttattattaatcatcattttgagggccaccattttttcgttcattgtttgtggaactccttgttcggtcatcatttgtcttctcatcgtcatgtttgggaccatcatttgttgattcatcatttcaggttccatcattttttcattcatcatcatatcaggttgcatcaatttttggttcatcatttgtggaacttcgtgttcggacatcatttctcttctcatcctcatgttaggggccatcattttttgattcatcatttgttgtcccaacattcttttgctcatcatcatgggcatcatcattttttcgttcatcatttcgttattcatcatcatgtctggttgcatcattttttggttcatcatgtgttggggcatcatcattttttcgttcatcatttcgttattcatcatcatgtctggttgcatcattttttgattcatcatgtgttggggcatcatattattttccatcattctttggttcatcatgtgttggggcatcatattattttccatcattctttggttcatcatgttttgggacatcatgtttttgtccatcattgattgcatgttcatcatacgtctgtccatcatttctgagttcatcatcatttgtgagggaactctgttcatatattgttggtattgttgtgggtacatctgatcacgtaccatttggtccatcattgacatttggtgttcctgcatttgtggctgtctgatgttaagcataaagcgggccaatggactcatttggttttgttggtacatttgttccattcttggttgataagacatttgttggtagtactcggggttcatgtatctttgggagagcatatattctggatagtattgttcttccatcatatttccttggtactgattttgtctgacttgttgaaggcgcattaataagcgttgcattggggtcatggtttccataacattttggttcatgttccagtgctgttgaacttccataccattcatttgcatttgcatccttcttaatgcgttttctgcttcttcaaccggaacgacaccactaacttcatgcataactgcaattccatctttaagaggaataacaacatctttggtcatcacttcaggtttcaagtctttcttcatgacatttttggtgtcatacatggtcatcatgggttcttcaaccatttggttatccaacatgctcaatacagataggacctttggatgtaagacatcattttgaaccaacagtttgatcatattcatgattttaccgtaggtcattgaatctactacatcatattggctgaaaataccatccaaaacatccatctgggtgtaaacttctcccaagttcttgatgtatttggtgtccaaaatatttctgatgtctacattcttattggtgatgggttcatccaagtcgtatacaattttgcttgtggaaccttgcttgagtgtgactgtgagcctctttgggttgcttaaacttcttctgatattaatttcgtatttggtgttcagaagattgattccaccatcgtcgtccactaaaacaccgacgcttaaagtgctgacggcacagcaacaagccactagcgcaaagaataccaaaaccttcatgttgatgcacggtt

SEQ ID NO: 1682 - DNA, 3065 bp, Diabrotica virgifera
  SmartBlast Evalue=1E-13; Info=Reverse transcriptase n=2 Tax= Ostrinia nubilalis RepID=A4KWG0_OSTNU
tatattacatatatgatattgaatctttttaatttccctgttccatcctggaagaagtaagtaactagaaatactagaagccacaaaccataggtattgtatcaaatacaaaattggcccaagaataaaattcattggaatagttaatttaaatttagttttgttttacataggcagtgattaaagtaattgattaattaattgaattaagaatttgccaatcaatctaaataaatagttaaagtagagcataacaatatttattcaataagagtacgccattagccttatttgactttatctattgtaaataagatttttaggtggttgttaataaattacgctattataaaaatatttattgcatgaggtgatataaaacgaaagttcattaaataaataagctaacctacacatgaaatacttgaagactatgtccaccttgcaggtgttttataaaaacatctgcgctatatacacatatatgtacaaaaactataataaagtgctttttagttcaataacattaatatgactcgaaaaatacccatacgtataaaataagtcaagttgtacctacttaatttaaatatttttttttctacactcacttgataaagaaggctttttcgcttgtcaatggcaaccaaaagttgacgtttactgaataccgtcactttctcgctctaccataccaccatacaatacaaacaaattgaacatgcatactcataaacgctcgtcgtccgtagcaaccatacatcccatacagtacaaacaaattgaatattcaaactcataaagttaatgatttaaacatagtttcattttattaagtgattgtagaaacaatgttgtatgtattacaagcaaaaagtgacattattgctttcgagtaattaataattaatattgctattcaagcaataatgtatcacttttcgctcttaaaacattaataactattaaaaaccaattacctacattattatgtaatttgctgtaaaattaaatttaattgtagtagtacgttagaatggattcttagttttgacatctaactagatgggtggagcttataaactttttccagacgttccttttgcgaagttttatacgcaacaacggtctttctcctttgtaagtgaccaaacttgggagccatatgtgaaaacaggaagtatacactggttaaaaattcgcgttctaagatatttcgggtattttttgtttttcaaaatgtagcttaatgtaccgaatgctatccaagccagtctgattcgcctttttatttctgccgtttggttttccttgctgagtgttaagatatgtccgaagtatatatttcttaacttgttctattatattttgacctaacgtgatcaaggagttttcgtccgggtttgtcataatcttttttttattgtaattcaccctcagtcctctattttcggcttcatcgtttaattcttctagcatggtttttaaggctacttttgtatcagcgattaagattataattatcgtcagttagattatatctaactgaagtttagtttaaattaatatttaggaaccagaatatcaatactagtatttataacaaaaactgaataagattgaaacacaattttagatctattgattgtaaggcttaagatttagacttaagactatattttcatatcaaatgttcatatctccactcatctcgtgtcatgtcacaaacttagaacttagtattcaattttgatgattaaatcaagaaatctttcatattacacaactattttttattaagtcacactgtttagcaatcaaaacacaaatatagttctataagctattttgcttgctgcggagcaaagagctcttattggtttggtgaggtcttctccagtgacaagaccacgttaaccgtttctcaggccagctggccagaattacacaaggttaaagaaaatataatttgtcgaaagttatagaaatgtacatcctctaagattactgaaagaaaatttatattatcaaaacttaaaaaaaaaaagattggttagatacttatcacagaaatgatacattttaaaatcttctaaagtatagggaataaacataatccttaagaaaggaatacaacattttaggaaattttctaaatttctgcctgctctcaaagtataatctatccactgatttttatttttgttgttccttgtttctgtgatcatgtatacaacttgtccgtcggccaaaatctgactcgaaaaacatcaaatatgcttcagatcgactctttttctctttctgtattggaagaaatcctgcaaggatccgcatatgaaaaattcacgaagcagtagaaatcgaaaaaatagggccaataatccaacaaaagaagaacagccgaaaagaaacgtttactctacaagccgcctcttcctggtcttcactctactccacagagacagaactacacacattacccgaaaacagacccagaagagggaaaaaggatttgtataaacatcttaaatatataaccaacattatccaagatgacaatagacatttcagcgagagtagttgtccaatcttattgcaaatggtacttttccgtgtgaggtgaacactgtacctattttcgatacctttgctaaagaaagtccagtaattctgaaatatactgtttctttctcatagtatacgtgatatatgtgatctagttacttattccatactttaaagtggccacaaaagcctaggttaagcatcgatataattgtagtagattaatttttcatctctgggtacttaggtatctacttaattactgtatccatcaatccatccccaggcagttgtgtttcgcctctcttttttgggcaggtgagtttattgagtaggtacgtgagctatcatgatcaacaacagtcttcactgttgataccaataccaaactacatacaagtacctacagcaaaaaattgcaatggaactacacatacggttagttcaaactccgaagaggattagttaaactactatctagggccggttgttcgaac

SEQ ID NO: 1683 - DNA, 2398 bp, Diabrotica virgifera
  SmartBlast Evalue=2E-17; Info=Conserved Plasmodium protein n=1 Tax=Plasmodium falciparum 3D7 RepID=Q8IJ80_PLAF7
tatattacatatatgatattgaatctttttaatttccctgttccatcctggaagaagtaagtaactagaaatactagaagccacaaaccataggtattgtatcaaatacaaaattggcccaagaataaaattcattggaatagttaatttaaatttagttttgttttacataggcagtgattaaagtaattgattaattaattgaattaagaatttgccaatcaatctaaataaatagttaaagtagagcataacaatatttattcaataagagtacgccattagccttatttgactttatctattgtaaataagatttttaggtggttgttaataaattacgctattataaaaatagtgttttatttaatatactcgtttgaataataatattgaatgtaaaataaataaaaaatacttctaattaattgtattattaaatttccatagtattcatgcgagtttggtacatcattctttcgttcattagcatcggtttcatcatctccatattggtcattttatcagacatcatcctttggttcatcatttctttgttcatcattttttcattcatcatttgctggtcaatttctttcatcattaggggtacttgtttttgagccatcatttttcttgtcatcattaattgttggtttatcatttggtcttccaacatttttttgttcatcatttcacgtttcatcattttttctttcattatgttattattaatcatcattttgagggccaccattttttcgttcattgtttgtggaactccttgttcggtcatcatttgtcttctcatcgtcatgtttgggaccatcatttgttgattcatcatttcaggttccatcattttttcattcatcatcatatcaggttgcatcaatttttggttcatcatttgtggaacttcgtgttcggacatcatttctcttctcatcctcatgttaggggccatcattttttgattcatcatttgttgtcccaacattcttttgctcatcatcatgggcatcatcattttttcgttcatcatttcgttattcatcatcatgtctggttgcatcattttttggttcatcatgtgttggggcatcatcattttttcgttcatcatttcgttattcatcatcatgtctggttgcatcattttttggttcatcatgtgttggggcatcatcattttttcgttcatcatttcgttattcatcatcatgtctggttgcatcattttttggttcatcatgtgttggggcatcatattattttccatcattctttggttaatcatgttttgggacatcatgttgttgtccatcattgattgcatgttcatcatacgtctgtccatcatttctgagttcatcatcatttgtaagggaactctgttcatatattgttggtattgttgggggtacatctgatcacgtaccatttggtccatcattgacatttgttgttcctgcatttgtggctgtctgatgttaagcataaagcgggccaatggactcatttggttttgttggtacatttgttccattcttggttgataagacatttgttggtagtactcggggttcatgtatctttgtgagagcatatattctggatagtattgttcttccatcatatttccttggtactgattttgtctgacttgttgaaggcgcattaataagcgttgcattggggtcatggtttccataacattttggttcatgttccagtattgttgaacttccataccattcatgtgcatttgcatccttcttaattcgttttctgcttcttcaaccggaacgacaccactaacttcatgcataacttcaattccatctttaagaggaataacaacatctttggtcatcacttcaggtttcaagtctttcttcatgacatttttggtgtcatacatggtcatcatgggttcttcaaccatttggttatccaacatgctcaatacggataggacctttggatgtaagacatcattttgaaccaacagtttgatcatcttcatgattttaccgtaggtcattgaatctactacatcatattggctgaaaataccatccaaaacatccatctgggtgtaaacttctcccaagttcttgatgtatttggtgtccaaaatatttctgatgtctacattcttattggtgatgggttcatccaagtcgtatacaattttacttgtggaaccttgcttgagtgtgactgtgagtctctttgggttgcttaaacttcttctgatattaatttcgtatttggtgttcaggagattgatgccaccatcgtcgtccactaaaacaccgacgcttaaagtgctgacggcacagcaacaagccactagcgcaaagaataccaaaaccttcatgttgatgcacgg

SEQ ID NO: 1684 - DNA, 2362 bp, Diabrotica virgifera
  SmartBlast Evalue=2E-17; Info=Conserved Plasmodium protein n=1 Tax=Plasmodium falciparum 3D7 RepID=Q8IJ80_PLAF7
tatattacatatatgatattgaatctttttaatttccctgttccatcctggaagaagtaagtaactagaaatactagaagccacaaaccataggtattgtatcaaatacaaaattggcccaagaataaaattcattggaatagttaatttaaatttagttttgttttacataggcagtgattaaagtaattgattaattaattgaattaagaatttgccaatcaatctaaataaatagttaaagtagagcataacaatatttattcaataagagtacgccattagccttatttgactttatctattgtaaataagatttttaggtggttgttaataaattacgctattataaaaatagtgttttatttaatatactcgtttgaataataatattgaatgtaaaataaataaaaaatacttctaattaattgtattattaaatttccatagtattcatgcgagtttggtacatcattctttcgttcattagcatcggtttcatcatctccatattggtcattttatcagacatcatcctttggttcatcatttctttgttcatcattttttcattcatcatttgctggtcaatttctttcatcattaggggtacttgtttttgagccatcatttttcttgtcatcattaattgttggtttatcatttggtcttccaacatttttttgttcatcatttcacgtttcatcattttttctttcattatgttattattaatcatcattttgagggccaccattttttcgttcattgtttgtggaactccttgttcggtcatcatttgtcttctcatcgtcatgtttgggaccatcatttgttgattcatcatttcaggttccatcattttttcattcatcatcatatcaggttgcatcaatttttggttcatcatttgtggaacttcgtgttcggacatcatttctcttctcatcctcatgttaggggccatcattttttgattcatcatttgttgtcccaacattcttttgctcatcatcatgggcatcatcattttttcgttcatcatttcgttattcatcatcatgtctggttgcatcattttttggttcatcatgtgttggggcatcatcattttttcgttcatcatttcgttattcatcatcatgtctggttgcatcattttttgattcatcatgtgttggggcatcatattattttccatcattctttggttcatcatgtgttggggcatcatattattttccatcattctttggttcatcatgttttgggacatcatgtttttgtccatcattgattgcatgttcatcatacgtctgtccatcatttctgagttcatcatcatttgtaagggaactctgttcatatattgttggtattgttgggggtacatctgatcacgtaccatttggtccatcattgacatttgttgttcctgcatttgtggctgtctgatgttaagcataaagcgggccaatggactcatttggttttgttggtacatttgttccattcttggttgataagacatttgttggtagtactcggggttcatgtatctttgtgagagcatatattctggatagtattgttcttccatcatatttccttggtactgattttgtctgacttgttgaaggcgcattaataagcgttgcattggggtcatggtttccataacattttggttcatgttccagtattgttgaacttccataccattcatgtgcatttgcatccttcttaattcgttttctgcttcttcaaccggaacgacaccactaacttcatgcataacttcaattccatctttaagaggaataacaacatctttggtcatcacttcaggtttcaagtctttcttcatgacatttttggtgtcatacatggtcatcatgggttcttcaaccatttggttatccaacatgctcaatacggataggacctttggatgtaagacatcattttgaaccaacagtttgatcatcttcatgattttaccgtaggtcattgaatctactacatcatattggctgaaaataccatccaaaacatccatctgggtgtaaacttctcccaagttcttgatgtatttggtgtccaaaatatttctgatgtctacattcttattggtgatgggttcatccaagtcgtatacaattttacttgtggaaccttgcttgagtgtgactgtgagtctctttgggttgcttaaacttcttctgatattaatttcgtatttggtgttcaggagattgatgccaccatcgtcgtccactaaaacaccgacgcttaaagtgctgacggcacagcaacaagccactagcgcaaagaataccaaaaccttcatgttgatgcacgg

SEQ ID NO: 1685 - DNA, 2400 bp, Diabrotica virgifera
  SmartBlast Evalue=2E-17; Info=Conserved Plasmodium protein n=1 Tax=Plasmodium falciparum 3D7 RepID=Q8IJ80_PLAF7
tatattacatatatgatattgaatctttttaatttccctgttccatcctggaagaagtaagtaactagaaatactagaagccacaaaccataggtattgtatcaaatacaaaattggcccaagaataaaattcattggaatagttaatttaaatttagttttgttttacataggcagtgattaaagtaattgattaattaattgaattaagaatttgccaatcaatctaaataaatagttaaagtagagcataacaatatttattcaataagagtacgccattagccttatttgactttatctattgtaaataagatttttaggtggttgttaataaattacgctattataaaaatagtgttttatttaatatactcgtttgaataataatattgaatgtaaaataaataaaaaatacttctaattaattgtattattaaatttccatagtattcatgcgagtttggtacatcattctttcgttcattagcatcggtttcatcatctccatattggtcattttatcagacatcatcctttggttcatcatttctttgttcatcattttttcattcatcatttgctggtcaatttctttcatcattaggggtacttgtttttgagccatcatttttcttgtcatcattaattgttggtttatcatttggtcttccaacatttttttgttcatcatttcacgtttcatcattttttctttcattatgttattattaatcatcattttgagggccaccattttttcgttcattgtttgtggaactccttgttcggtcatcatttgtcttctcatcgtcatgtttgggaccatcatttgttgattcatcatttcaggttccatcattttttcattcatcatcatatcaggttgcatcaatttttggttcatcatttgtggaacttcgtgttcggacatcatttctcttctcatcctcatgttaggggccatcattttttgattcatcatttgttgtcccaacattcttttgctcatcatcatgggcatcatcattttttcgttcatcatttcgttattcatcatcatgtctggttgcatcattttttggttcatcatgtgttggggcatcatcattttttcgttcatcatttcgttattcatcatcatgtctggttgcatcattttttggttcatcatgtgttggggcatcatcattttttcgttcatcatttcgttattcatcatcatgtctggttgcatcattttttggttcatcatgtgttggggcatcatattattttccatcattctttggttaatcatgttttgggacatcatgttgttgtccatcattgattgcatgttcatcatacgtctgtccatcatttctgagttcatcatcatttgtaagggaactctgttcatatattgttggtattgttgggggtacatctgatcacgtaccatttggtccatcattgacatttgttgttcctgcatttgtggctgtctgatgttaagcataaagcgggccaatggactcatttggttttgttggtacatttgttccattcttggttgataagacatttgttggtagtactcggggttcatgtatctttgtgagagcatatattctggatagtattgttcttccatcatatttccttggtactgattttgtctgacttgttgaaggcgcattaataagcgttgcattggggtcatggtttccataacattttggttcatgttccagtgtttttgaacttccataccattcatttgcatttgcatccttcttaattcgttttctgcttcttcaaccggaacgacaccactaacttcatgcataactgcaattccgtctttaagaggaataacaacatctttggtcatcacttcaggtttcaagtctttcttcatgacatttttggtgtcatacatggtcatcatgggttcttcaaccatttggttatccaacatgctcaatacagataggacctttggatgtaagacatcattttgaaccaacagtttgatcatattcatgattttaccgtaggtcattgaatctactacatcatattggctgaaaataccatccaaaacatccatctgggtgtaaacttctcccaagttcttgatgtatttggtgtccaaaatatttctgatgtctacattcttattggtgatgggttcatccaagtcgtatacaattttgcttgtggaaccttgcttgagtgtgactgtgagcctctttgggttgcttaaacttcttctgatattaatttcgtatttggtgttcagaagattgattccaccatcgtcgtccactaaaacaccgacgcttaaagtgctgacggcacagcaacaagccactagcgcaaagaataccaaaaccttcatgttgatgcacggtt

SEQ ID NO: 1686 - DNA, 2364 bp, Diabrotica virgifera
  SmartBlast Evalue=2E-17; Info=Conserved Plasmodium protein n=1 Tax=Plasmodium falciparum 3D7 RepID=Q8IJ80_PLAF7
tatattacatatatgatattgaatctttttaatttccctgttccatcctggaagaagtaagtaactagaaatactagaagccacaaaccataggtattgtatcaaatacaaaattggcccaagaataaaattcattggaatagttaatttaaatttagttttgttttacataggcagtgattaaagtaattgattaattaattgaattaagaatttgccaatcaatctaaataaatagttaaagtagagcataacaatatttattcaataagagtacgccattagccttatttgactttatctattgtaaataagatttttaggtggttgttaataaattacgctattataaaaatagtgttttatttaatatactcgtttgaataataatattgaatgtaaaataaataaaaaatacttctaattaattgtattattaaatttccatagtattcatgcgagtttggtacatcattctttcgttcattagcatcggtttcatcatctccatattggtcattttatcagacatcatcctttggttcatcatttctttgttcatcattttttcattcatcatttgctggtcaatttctttcatcattaggggtacttgtttttgagccatcatttttcttgtcatcattaattgttggtttatcatttggtcttccaacatttttttgttcatcatttcacgtttcatcattttttctttcattatgttattattaatcatcattttgagggccaccattttttcgttcattgtttgtggaactccttgttcggtcatcatttgtcttctcatcgtcatgtttgggaccatcatttgttgattcatcatttcaggttccatcattttttcattcatcatcatatcaggttgcatcaatttttggttcatcatttgtggaacttcgtgttcggacatcatttctcttctcatcctcatgttaggggccatcattttttgattcatcatttgttgtcccaacattcttttgctcatcatcatgggcatcatcattttttcgttcatcatttcgttattcatcatcatgtctggttgcatcattttttggttcatcatgtgttggggcatcatcattttttcgttcatcatttcgttattcatcatcatgtctggttgcatcattttttgattcatcatgtgttggggcatcatattattttccatcattctttggttcatcatgtgttggggcatcatattattttccatcattctttggttcatcatgttttgggacatcatgtttttgtccatcattgattgcatgttcatcatacgtctgtccatcatttctgagttcatcatcatttgtaagggaactctgttcatatattgttggtattgttgggggtacatctgatcacgtaccatttggtccatcattgacatttgttgttcctgcatttgtggctgtctgatgttaagcataaagcgggccaatggactcatttggttttgttggtacatttgttccattcttggttgataagacatttgttggtagtactcggggttcatgtatctttgtgagagcatatattctggatagtattgttcttccatcatatttccttggtactgattttgtctgacttgttgaaggcgcattaataagcgttgcattggggtcatggtttccataacattttggttcatgttccagtgtttttgaacttccataccattcatttgcatttgcatccttcttaattcgttttctgcttcttcaaccggaacgacaccactaacttcatgcataactgcaattccgtctttaagaggaataacaacatctttggtcatcacttcaggtttcaagtctttcttcatgacatttttggtgtcatacatggtcatcatgggttcttcaaccatttggttatccaacatgctcaatacagataggacctttggatgtaagacatcattttgaaccaacagtttgatcatattcatgattttaccgtaggtcattgaatctactacatcatattggctgaaaataccatccaaaacatccatctgggtgtaaacttctcccaagttcttgatgtatttggtgtccaaaatatttctgatgtctacattcttattggtgatgggttcatccaagtcgtatacaattttgcttgtggaaccttgcttgagtgtgactgtgagcctctttgggttgcttaaacttcttctgatattaatttcgtatttggtgttcagaagattgattccaccatcgtcgtccactaaaacaccgacgcttaaagtgctgacggcacagcaacaagccactagcgcaaagaataccaaaaccttcatgttgatgcacggtt

SEQ ID NO: 1687 - DNA, 2400 bp, Diabrotica virgifera
  SmartBlast Evalue=2E-17; Info=Conserved Plasmodium protein n=1 Tax=Plasmodium falciparum 3D7 RepID=Q8IJ80_PLAF7
tatattacatatatgatattgaatctttttaatttccctgttccatcctggaagaagtaagtaactagaaatactagaagccacaaaccataggtattgtatcaaatacaaaattggcccaagaataaaattcattggaatagttaatttaaatttagttttgttttacataggcagtgattaaagtaattgattaattaattgaattaagaatttgccaatcaatctaaataaatagttaaagtagagcataacaatatttattcaataagagtacgccattagccttatttgactttatctattgtaaataagatttttaggtggttgttaataaattacgctattataaaaatagtgttttatttaatatactcgtttgaataataatattgaatgtaaaataaataaaaaatacttctaattaattgtattattaaatttccatagtattcatgcgagtttggtacatcattctttcgttcattagcatcggtttcatcatctccatattggtcattttatcagacatcatcctttggttcatcatttctttgttcatcattttttcattcatcatttgctggtcaatttctttcatcattaggggtacttgtttttgagccatcatttttcttgtcatcattaattgttggtttatcatttggtcttccaacatttttttgttcatcatttcacgtttcatcattttttctttcattatgttattattaatcatcattttgagggccaccattttttcgttcattgtttgtggaactccttgttcggtcatcatttgtcttctcatcgtcatgtttgggaccatcatttgttgattcatcatttcaggttccatcattttttcattcatcatcatatcaggttgcatcaatttttggttcatcatttgtggaacttcgtgttcggacatcatttctcttctcatcctcatgttaggggccatcattttttgattcatcatttgttgtcccaacattcttttgctcatcatcatgggcatcatcattttttcgttcatcatttcgttattcatcatcatgtctggttgcatcattttttggttcatcatgtgttggggcatcatcattttttcgttcatcatttcgttattcatcatcatgtctggttgcatcattttttggttcatcatgtgttggggcatcatcattttttcgttcatcatttcgttattcatcatcatgtctggttgcatcattttttggttcatcatgtgttggggcatcatattattttccatcattctttggttaatcatgttttgggacatcatgttgttgtccatcattgattgcatgttcatcatacgtctgtccatcatttctgagttcatcatcatttgtgagggaactctgttcatatattgttggtattgttgtgggtacatctgatcacgtaccatttggtccatcattgacatttggtgttcctgcatttgtggctgtctgatgttaagcataaagcgggccaatggactcatttggttttgttggtacatttgttccattcttggttgataagacatttgttggtagtactcggggttcatgtatctttgggagagcatatattctggatagtattgttcttccatcatatttccttggtactgattttgtctgacttgttgaaggcgcattaataagcgttgcattggggtcatggtttccataacattttggttcatgttccagtgctgttgaacttccataccattcatttgcatttgcatccttcttaatgcgttttctgcttcttcaaccggaacgacaccactaacttcatgcataactgcaattccatctttaagaggaataacaacatctttggtcatcacttcaggtttcaagtctttcttcatgacatttttggtgtcatacatggtcatcatgggttcttcaaccatttggttatccaacatgctcaatacagataggacctttggatgtaagacatcattttgaaccaacagtttgatcatattcatgattttaccgtaggtcattgaatctactacatcatattggctgaaaataccatccaaaacatccatctgggtgtaaacttctcccaagttcttgatgtatttggtgtccaaaatatttctgatgtctacattcttattggtgatgggttcatccaagtcgtatacaattttgcttgtggaaccttgcttgagtgtgactgtgagcctctttgggttgcttaaacttcttctgatattaatttcgtatttggtgttcagaagattgattccaccatcgtcgtccactaaaacaccgacgcttaaagtgctgacggcacagcaacaagccactagcgcaaagaataccaaaaccttcatgttgatgcacggtt

SEQ ID NO: 1688 - DNA, 2715 bp, Diabrotica virgifera
  SmartBlast Evalue=1E-13; Info=Reverse transcriptase n=2 Tax= Ostrinia nubilalis RepID=A4KWG0_OSTNU
aaaaatatttattgcatgaggtgatataaaacgaaagttcattaaataaataagctaacctacacatgaaatacttgaagactatgtccaccttgcaggtgttttataaaaacatctgcgctatatacacatatatgtacaaaaactataataaagtgctttttagttcaataacattaatatgactcgaaaaatacccatacgtataaaataagtcaagttgtacctacttaatttaaatatttttttttctacactcacttgataaagaaggctttttcgcttgtcaatggcaaccaaaagttgacgtttactgaataccgtcactttctcgctctaccataccaccatacaatacaaacaaattgaacatgcatactcataaacgctcgtcgtccgtagcaaccatacatcccatacagtacaaacaaattgaatattcaaactcataaagttaatgatttaaacatagtttcattttattaagtgattgtagaaacaatgttgtatgtattacaagcaaaaagtgacattattgctttcgagtaattaataattaatattgctattcaagcaataatgtatcacttttcgctcttaaaacattaataactattaaaaaccaattacctacattattatgtaatttgctgtaaaattaaatttaattgtagtagtacgttagaatggattcttagttttgacatctaactagatgggtggagcttataaactttttccagacgttccttttgcgaagttttatacgcaacaacggtctttctcctttgtaagtgaccaaacttgggagccatatgtgaaaacaggaagtatacactggttaaaaattcgcgttctaagatatttcgggtattttttgtttttcaaaatgtagcttaatgtaccgaatgctatccaagccagtctgattcgcctttttatttctgccgtttggttttccttgctgagtgttaagatatgtccgaagtatatatttcttaacttgttctattatattttgacctaacgtgatcaaggagttttcgtccgggtttgtcataatcttttttttattgtaattcaccctcagtcctctattttcggcttcatcgtttaattcttctagcatggtttttaaggctacttttgtatcagcgattaagattataattatcgtcagttagattatatctaactgaagtttagtttaaattaatatttaggaaccagaatatcaatactagtatttataacaaaaactgaataagattgaaacacaattttagatctattgattgtaaggcttaagatttagacttaagactatattttcatatcaaatgttcatatctccactcatctcgtgtcatgtcacaaacttagaacttagtattcaattttgatgattaaatcaagaaatctttcatattacacaactattttttattaagtcacactgtttagcaatcaaaacacaaatatagttctataagctattttgcttgctgcggagcaaagagctcttattggtttggtgaggtcttctccagtgacaagaccacgttaaccgtttctcaggccagctggccagaattacacaaggttaaagaaaatataatttgtcgaaagttatagaaatgtacatcctctaagattactgaaagaaaatttatattatcaaaacttaaaaaaaaaaagattggttagatacttatcacagaaatgatacattttaaaatcttctaaagtatagggaataaacataatccttaagaaaggaatacaacattttaggaaattttctaaatttctgcctgctctcaaagtataatctatccactgatttttatttttgttgttccttgtttctgtgatcatgtatacaacttgtccgtcggccaaaatctgactcgaaaaacatcaaatatgcttcagatcgactctttttctctttctgtattggaagaaatcctgcaaggatccgcatatgaaaaattcacgaagcagtagaaatcgaaaaaatagggccaataatccaacaaaagaagaacagccgaaaagaaacgtttactctacaagccgcctcttcctggtcttcactctactccacagagacagaactacacacattacccgaaaacagacccagaagagggaaaaaggatttgtataaacatcttaaatatataaccaacattatccaagatgacaatagacatttcagcgagagtagttgtccaatcttattgcaaatggtacttttccgtgtgaggtgaacactgtacctattttcgatacctttgctaaagaaagtccagtaattctgaaatatactgtttctttctcatagtatacgtgatatatgtgatctagttacttattccatactttaaagtggccacaaaagcctaggttaagcatcgatataattgtagtagattaatttttcatctctgggtacttaggtatctacttaattactgtatccatcaatccatccccaggcagttgtgtttcgcctctcttttttgggcaggtgagtttattgagtaggtacgtgagctatcatgatcaacaacagtcttcactgttgataccaataccaaactacatacaagtacctacagcaaaaaattgcaatggaactacacatacggttagttcaaactccgaagaggattagttaaactactatctagggccggttgttcgaac

SEQ ID NO: 1689 - DNA, 2364 bp, Diabrotica virgifera
  SmartBlast Evalue=2E-17; Info=Conserved Plasmodium protein n=1 Tax=Plasmodium falciparum 3D7 RepID=Q8IJ80_PLAF7
tatattacatatatgatattgaatctttttaatttccctgttccatcctggaagaagtaagtaactagaaatactagaagccacaaaccataggtattgtatcaaatacaaaattggcccaagaataaaattcattggaatagttaatttaaatttagttttgttttacataggcagtgattaaagtaattgattaattaattgaattaagaatttgccaatcaatctaaataaatagttaaagtagagcataacaatatttattcaataagagtacgccattagccttatttgactttatctattgtaaataagatttttaggtggttgttaataaattacgctattataaaaatagtgttttatttaatatactcgtttgaataataatattgaatgtaaaataaataaaaaatacttctaattaattgtattattaaatttccatagtattcatgcgagtttggtacatcattctttcgttcattagcatcggtttcatcatctccatattggtcattttatcagacatcatcctttggttcatcatttctttgttcatcattttttcattcatcatttgctggtcaatttctttcatcattaggggtacttgtttttgagccatcatttttcttgtcatcattaattgttggtttatcatttggtcttccaacatttttttgttcatcatttcacgtttcatcattttttctttcattatgttattattaatcatcattttgagggccaccattttttcgttcattgtttgtggaactccttgttcggtcatcatttgtcttctcatcgtcatgtttgggaccatcatttgttgattcatcatttcaggttccatcattttttcattcatcatcatatcaggttgcatcaatttttggttcatcatttgtggaacttcgtgttcggacatcatttctcttctcatcctcatgttaggggccatcattttttgattcatcatttgttgtcccaacattcttttgctcatcatcatgggcatcatcattttttcgttcatcatttcgttattcatcatcatgtctggttgcatcattttttggttcatcatgtgttggggcatcatcattttttcgttcatcatttcgttattcatcatcatgtctggttgcatcattttttgattcatcatgtgttggggcatcatattattttccatcattctttggttcatcatgtgttggggcatcatattattttccatcattctttggttcatcatgttttgggacatcatgtttttgtccatcattgattgcatgttcatcatacgtctgtccatcatttctgagttcatcatcatttgtgagggaactctgttcatatattgttggtattgttgtgggtacatctgatcacgtaccatttggtccatcattgacatttggtgttcctgcatttgtggctgtctgatgttaagcataaagcgggccaatggactcatttggttttgttggtacatttgttccattcttggttgataagacatttgttggtagtactcggggttcatgtatctttgggagagcatatattctggatagtattgttcttccatcatatttccttggtactgattttgtctgacttgttgaaggcgcattaataagcgttgcattggggtcatggtttccataacattttggttcatgttccagtgctgttgaacttccataccattcatttgcatttgcatccttcttaatgcgttttctgcttcttcaaccggaacgacaccactaacttcatgcataactgcaattccatctttaagaggaataacaacatctttggtcatcacttcaggtttcaagtctttcttcatgacatttttggtgtcatacatggtcatcatgggttcttcaaccatttggttatccaacatgctcaatacagataggacctttggatgtaagacatcattttgaaccaacagtttgatcatattcatgattttaccgtaggtcattgaatctactacatcatattggctgaaaataccatccaaaacatccatctgggtgtaaacttctcccaagttcttgatgtatttggtgtccaaaatatttctgatgtctacattcttattggtgatgggttcatccaagtcgtatacaattttgcttgtggaaccttgcttgagtgtgactgtgagcctctttgggttgcttaaacttcttctgatattaatttcgtatttggtgttcagaagattgattccaccatcgtcgtccactaaaacaccgacgcttaaagtgctgacggcacagcaacaagccactagcgcaaagaataccaaaaccttcatgttgatgcacggtt

SEQ ID NO: 1690 - DNA, 2048 bp, Diabrotica virgifera
  SmartBlast Evalue=1E-17; Info=Conserved Plasmodium protein n=1 Tax=Plasmodium falciparum 3D7 RepID=Q8IJ80_PLAF7
aaaaatagtgttttatttaatatactcgtttgaataataatattgaatgtaaaataaataaaaaatacttctaattaattgtattattaaatttccatagtattcatgcgagtttggtacatcattctttcgttcattagcatcggtttcatcatctccatattggtcattttatcagacatcatcctttggttcatcatttctttgttcatcattttttcattcatcatttgctggtcaatttctttcatcattaggggtacttgtttttgagccatcatttttcttgtcatcattaattgttggtttatcatttggtcttccaacatttttttgttcatcatttcacgtttcatcattttttctttcattatgttattattaatcatcattttgagggccaccattttttcgttcattgtttgtggaactccttgttcggtcatcatttgtcttctcatcgtcatgtttgggaccatcatttgttgattcatcatttcaggttccatcattttttcattcatcatcatatcaggttgcatcaatttttggttcatcatttgtggaacttcgtgttcggacatcatttctcttctcatcctcatgttaggggccatcattttttgattcatcatttgttgtcccaacattcttttgctcatcatcatgggcatcatcattttttcgttcatcatttcgttattcatcatcatgtctggttgcatcattttttggttcatcatgtgttggggcatcatcattttttcgttcatcatttcgttattcatcatcatgtctggttgcatcattttttggttcatcatgtgttggggcatcatcattttttcgttcatcatttcgttattcatcatcatgtctggttgcatcattttttggttcatcatgtgttggggcatcatattattttccatcattctttggttaatcatgttttgggacatcatgttgttgtccatcattgattgcatgttcatcatacgtctgtccatcatttctgagttcatcatcatttgtaagggaactctgttcatatattgttggtattgttgggggtacatctgatcacgtaccatttggtccatcattgacatttgttgttcctgcatttgtggctgtctgatgttaagcataaagcgggccaatggactcatttggttttgttggtacatttgttccattcttggttgataagacatttgttggtagtactcggggttcatgtatctttgtgagagcatatattctggatagtattgttcttccatcatatttccttggtactgattttgtctgacttgttgaaggcgcattaataagcgttgcattggggtcatggtttccataacattttggttcatgttccagtattgttgaacttccataccattcatgtgcatttgcatccttcttaattcgttttctgcttcttcaaccggaacgacaccactaacttcatgcataacttcaattccatctttaagaggaataacaacatctttggtcatcacttcaggtttcaagtctttcttcatgacatttttggtgtcatacatggtcatcatgggttcttcaaccatttggttatccaacatgctcaatacggataggacctttggatgtaagacatcattttgaaccaacagtttgatcatcttcatgattttaccgtaggtcattgaatctactacatcatattggctgaaaataccatccaaaacatccatctgggtgtaaacttctcccaagttcttgatgtatttggtgtccaaaatatttctgatgtctacattcttattggtgatgggttcatccaagtcgtatacaattttacttgtggaaccttgcttgagtgtgactgtgagtctctttgggttgcttaaacttcttctgatattaatttcgtatttggtgttcaggagattgatgccaccatcgtcgtccactaaaacaccgacgcttaaagtgctgacggcacagcaacaagccactagcgcaaagaataccaaaaccttcatgttgatgcacgg

SEQ ID NO: 1691 - DNA, 1811 bp, Diabrotica virgifera
  SmartBlast Evalue=5E-44; Info=Abhydrolase domain-containing protein 12 n=1 Tax=Harpegnathos saltator RepID=E2C8H0_9HYME
aattaataaaatttattcataaaaaaatttaataaataaggtaacaaaatatagacgccggaacagttgcaaacagatgctactggaaactaatacaaaaattgaatacattagaccagcggttctcaatctgtggtacatgtaccactggtggtacatatcattatttgcggtggtacacaaaacgcaaaaacagccaaaatcagcaccactttatagttaattagattacctagctagataggtatttcagttaggtggtaccaaaaataataaaaagttttttgtggtacatggtacatgactcaaaaagattgagaatcactgcattagactatctttttgtattagttccataaatcttcagaccatataagattccaagtttgttgatattcacttttgagcatttttgatataggtactcttcttgacttttagatttgaacacactatgtgatggtttgtgttttggacatcataataacaaaactggaaattaaatttctcgttgaaaattcgatttttaccgttgaaggtgtagatatcaacctcttcttttatgctggtccttgcaaaatccgataaactcgtcaatatattttggtacatttggatcgcttgtaataccaacatgcccatatcccagcctaccaaataggtggaaggtaacgtttccttgatctggaatttttcgttccgtactggcaacatggtacactttttcgccaagggtgtagggaattacgttgtcgtcttgagcgtgcataaccatgatggggcaatcaacatcgaggatatttgttgtagttttaaattggaagccatttttttcaattgggtttagtacagtcgctgtgaaccatggcatccaagaaaatatctttcctaacgacgttgctggaatttcctccctcatggtagtaaacggagattctaaaattagtccggatggtacgatactttgttccttgagccttttgactgagtgggtgcttaaagctgttcctaacgaatggccccatacgtaaatatcgttgtctgttaaagctcggatccattgaaatacctgggatgtatcaccaacaattcctagttctgttggtggtttatctggaccggaatcaccatatcctctgtggtccagtgaaatgaccaaaaagtgcttccttaacacctcgtacgtttctttgggctttattctgttacatccaacaccatgcagatatattgcaattggactcttcgtatttctaatgatttcacttgctgttttgtcatcctgacctgcgatttttgtagattgtatctgattttcttgtaacaacagccaagctccgatgcttactagagagccgtctatcagatctttggtggttatatagaaatttactaccccggtcataccatatttttgaggattgttgaattcgggattcttcggatcttgaaaattaaagaatatgaagaacctttgtactgatatggaattcataaatactagtggaaatattacccatattgccaaaaatatgagaagtagaataatgaataatgctacacccgaaataaacgcaatcttctgccacaacttccaactcttaaaaaactgttttttattcatatcgttttgaccattctctacagatgtataaactgaatccactgaattagaacgccaatcaacaatgtgacaaggtccatcgtcagtcgtctgaagtcacagtgataaattgtcttatgtcttatttacccatcatcttgatataaattacggagaagttgcacaaataccactgtctactttcttg

SEQ ID NO: 1692 - DNA, 1815 bp, Diabrotica virgifera
  SmartBlast Evalue=5E-44; Info=Abhydrolase domain-containing protein 12 n=1 Tax=Harpegnathos saltator RepID=E2C8H0_9HYME
aattaataaaatttattcataaaaaaatttaataaataaggtaacaaaatatagacgccggaacagttgcaaacagatgctactggaaactaatacaaaaattgaatacattagaccagcggttctcaatctgtggtacatgtaccactggtggtacatatcattatttgcggtggtacacaaaacgcaaaaacagccaaaatcagcaccactttatagttaattaattagattacccagctagataggtatttcagttaggtggtaccaaaaataataaaaagtattttgtggtacatggtacatgactcaaaaagattgagaatcactgcattagactatctttttgtattagttccataaatcttcagaccatataagattccaggtttgttgatattcacttttgaacatttttgatatacgtactcttcttgacttttagatttgaacacactatgtgatggtttgtgttttggacatcaaaataacaaagctggaaattaaatttctcgttgaaaattcgatttttaccgttgaaggtgtagatatcaacctcttcttttatgctggtccttgcaaaatcctataaactcgtcaatatattttggtacatttggatcgcttgtaataccaacatgcccatatcccagcctaccaaataggtggaaggtaacgtttccttgatctggaatttttcgttccgtactggcaacatggtacactttttcgccaagggtgtagggaattacgttgtcgtcttgagcgtgcataaccatgatggggcaatcaacatcgaggatatttgttgtagttttaaattggaagccatttttttcaattgggtttagtacagtcgctgtgaaccatggcatccaagaaaatatctttcctaacgacgttgctggaatttcctccctcatggtagtaaacggagattctaaaattagtccggatggtacgatactttgttccttgagccttttgactgagtgggtgcttaaagctgttcctaacgaatggccccatacgtaaatatcgttgtctgttaaagctcggatccattgaaatacctgggatgtatcaccaacaattcctagttctgttggtggtttatctggaccggaatcaccatatcctctgtggtccagtgaaatgaccaaaaagtgcttcctcaaaacctcgtacgtttcttttggctttattctgttacacccaacaccatgcagatatattgcaattggactctttgtatttctaatgatttcactcgctgttttgtcatcctgacctgcgatttttgtagattgtatctgattttcttgtaacaacagccaagctccgatgcttactagagagccgtctatcagatctttggtggttatatagaaatttactaccccggtcatgccatatttttgaggattgttgaattcgggattcttcggatcttgaaaattaaagaatatgaagaacctttgtactgatatggaattcataaatactagaggaaatattacccatattgccaaaaatatgagaagtagaatgatgaataatgctacacccgaaataaacgcaatcttctgccacaacttccaactcttaaaaaactgttttttattcatatcgttttgaccattctctacagatgtataaactgaatccactgaattagaacgccaatcaacaatgtgacaaggtccatcgtcagtcgtctgaagtcacagtgataaattgtcttatgtcttatttacccatcatcttgatataaattacggagaagttgcacaaataccactgtctactttcttg

SEQ ID NO: 1693 - DNA, 1815 bp, Diabrotica virgifera
  SmartBlast Evalue=5E-44; Info=Abhydrolase domain-containing protein 12 n=1 Tax=Harpegnathos saltator RepID=E2C8H0_9HYME
aattaataaaatttattcataaaaaaatttaataaataaggtaacaaaatatagacgccggaacagttgcaaacagatgctactggaaactaatacaaaaattgaatacattagaccagcggttctcaatctgtggtacatgtaccactggtggtacatatcattatttgcggtggtacacaaaacgcaaaaacagccaaaatcagcaccactttatagttaattaattagattacccagctagataggtatttcagttaggtggtaccaaaaataataaaaagtattttgtggtacatggtacatgactcaaaaagattgagaatcactgcattagactatctttttgtattagttccataaatcttcagaccatataagattccaggtttgttgatattcacttttgaacatttttgatatacgtactcttcttgacttttagatttgaacacactatgtgatggtttgtgttttggacatcaaaataacaaagctggaaattaaatttctcgttgaaaattcgatttttaccgttgaaggtgtagatatcaacctcttcttttatgctggtccttgcaaaatcctataaactcgtcaatatattttggtacatttggatcgcttgtaataccaacatgcccatatcccagcctaccaaataggtggaaggtaacgtttccttgatctggaatttttcgttccgtactggcaacatggtacactttttcgccaagggtgtagggaattacgttgtcgtcttgagcgtgcataaccatgatggggcaatcaacatcgaggatatttgttgtagttttaaattggaagccatttttttcaattgggtttagtacagtcgctgtgaaccatggcatccaagaaaatatctttcctaacgacgttgctggaatttcctccctcatggtagtaaacggagattctaaaattagtccggatggtacgatactttgttccttgagccttttgactgagtgggtgcttaaagctgttcctaacgaatggccccatacgtaaatatcgttgtctgttaaagctcggatccattgaaatacctgggatgtatcaccaacaattcctagttctgttggtggtttatctggaccggaatcaccatatcctctgtggtccagtgaaatgaccaaaaagtgcttccttaacacctcgtacgtttctttgggctttattctgttacatccaacaccatgcagatatattgcaattggactcttcgtatttctaatgatttcacttgctgttttgtcatcctgacctgcgatttttgtagattgtatctgattttcttgtaacaacagccaagctccgatgcttactagagagccgtctatcagatctttggtggttatatagaaatttactaccccggtcataccatatttttgaggattgttgaattcgggattcttcggatcttgaaaattaaagaatatgaagaacctttgtactgatatggaattcataaatactagtggaaatattacccatattgccaaaaatatgagaagtagaataatgaataatgctacacccgaaataaacgcaatcttctgccacaacttccaactcttaaaaaactgttttttattcatatcgttttgaccattctctacagatgtataaactgaatccactgaattagaacgccaatcaacaatgtgacaaggtccatcgtcagtcgtctgaagtcacagtgataaattgtcttatgtcttatttacccatcatcttgatataaattacggagaagttgcacaaataccactgtctactttcttg

SEQ ID NO: 1694 - DNA, 628 bp, Diabrotica virgifera
aattaataaaatttattcataaaaaaatttaataaataaggtaacaaaatatagacgccggaacagttgcaaacagatgctactggaaactaatacaaaaattgaatacattagaccagcggttctcaatctgtggtacatgtaccactggtggtacatatcattatttgcggtggtacacaaaacgcaaaaacagccaaaatcagcaccactttatagttaattagattacctagctagataggtatttcagttaggtggtaccaaaaataataaaagtatttggtggtacatgaccaaaaagattgagaaccgctgaaataagatatttgaatttccagtttccagaaaacttgaagtttctgaagtaacagacagtgagaaaatataatggagtattatttatcaacataatatttactatttacacattttctatttatatagtactttatgtagtttattttcattcataaatgttcgtaaaatatactctcctttccattttatttttgacttaaagtctaacaacctatctaagagactcattaatgttcagttgagcgagatgctattatccgaggtgtgaaattccataaataagggatctacctgtttcatgaaatga

SEQ ID NO: 1695 - DNA, 1857 bp, Diabrotica virgifera
  SmartBlast Evalue=5E-44; Info=Abhydrolase domain-containing protein 12 n=1 Tax=Harpegnathos saltator RepID=E2C8H0_9HYME
aattaataaaatttattcataaaaaaatttaataaataaggtaacaaaatatagacgccggaacagttgcaaacagatgctactggaaactaatacaaaaattgaatacattagaccagcggttctcaatctgtggtacatgtaccactggtggtacatatcattatttgcggtggtacacaaaacgcaaaaacagccaaaatcagcaccactttatagttaattagattacctagctagataggtatttcagttaggtggtaccaaaaataataaaaagttttttgtggtacatggtacatgactcaaaaagattgagaatcactgcattagactatctttttgtattagttccataaatcttcagaccatataagattccaagtttgttgatattcacttttgagcatttttgatataggtactcttcttgacttttagatttgaacacactatgtgatggtttgtgttttggacatcataataacaaaactggaaattaaatttctcgttgaaaattcgatttttaccgttgaaggtgtagatatcaacctcttcttttatgctggtccttgcaaaatccgataaactcgtcaatatattttggtacatttggatcgcttgtaataccaacatgcccatatcccagcctaccaaataggtggaaggtaacgtttccttgatctggaatttttcgttccgtactggcaacatggtacactttttcgccaagggtgtagggaattacgttgtcgtcttgagcgtgcataaccatgatggggcaatcaacatcgaggatatttgttgtagttttaaattggaagccatttttttcaattgggtttagtacagtcgctgtgaaccatggcatccaagaaaatatctttcctaacgacgttgctggaatttcctccctcatggtagtaaacggagattctaaaattagtccggatggtacgatactttgttccttgagccttttgactgagtgggtgcttaaagctgttcctaacgaatggccccatacgtaaatatcgttgtctgttaaagctcggatccattgaaatacctgggatgtatcaccaacaattcctagttctgttggtggtttatctggaccggaatcaccatatcctctgtggtccagtgaaatgaccaaaaagtgcttcctcaaaacctcgtacgtttcttttggctttattctgttacacccaacaccatgcagatatattgcaattggactctttgtatttctaatgatttcactcgctgttttgtcatcctgacctgcgatttttgtagattgtatctgattttcttgtaacaacagccaagctccgatgcttactagagagccgtctatcagatctttggtggttatatagaaatttactaccccggtcatgccatatttttgaggattgttgaattcgggattcttcggatcttgaaaattaaagaatatgaagaacctttgtactgatatggaattcataaatactagaggaaatattacccatattgccaaaaatatgagaagtagaatgatgaataatgctacacccgaaataaacgcaatcttctgccacaacttccaactcttaaaaaactgttttttattcatatcgttttgaccattctctacagatgtataaactgaatccactgaattagaacgaaaacatcggagttttcccatttttctataatatttttatctcggtcaatcaagtaataaaagcaaaaaaatcgtcgtttgtatagggaaatcaatactcggaaaattatctttcttatctttagaataaaagtttggttgcgtgtgtaggtatatcgactggattcacatattagaag

SEQ ID NO: 1696 - DNA, 1857 bp, Diabrotica virgifera
  SmartBlast Evalue=5E-44; Info=Abhydrolase domain-containing protein 12 n=1 Tax=Harpegnathos saltator RepID=E2C8H0_9HYME
aattaataaaatttattcataaaaaaatttaataaataaggtaacaaaatatagacgccggaacagttgcaaacagatgctactggaaactaatacaaaaattgaatacattagaccagcggttctcaatctgtggtacatgtaccactggtggtacatatcattatttgcggtggtacacaaaacgcaaaaacagccaaaatcagcaccactttatagttaattagattacctagctagataggtatttcagttaggtggtaccaaaaataataaaaagttttttgtggtacatggtacatgactcaaaaagattgagaatcactgcattagactatctttttgtattagttccataaatcttcagaccatataagattccaagtttgttgatattcacttttgagcatttttgatataggtactcttcttgacttttagatttgaacacactatgtgatggtttgtgttttggacatcataataacaaaactggaaattaaatttctcgttgaaaattcgatttttaccgttgaaggtgtagatatcaacctcttcttttatgctggtccttgcaaaatccgataaactcgtcaatatattttggtacatttggatcgcttgtaataccaacatgcccatatcccagcctaccaaataggtggaaggtaacgtttccttgatctggaatttttcgttccgtactggcaacatggtacactttttcgccaagggtgtagggaattacgttgtcgtcttgagcgtgcataaccatgatggggcaatcaacatcgaggatatttgttgtagttttaaattggaagccatttttttcaattgggtttagtacagtcgctgtgaaccatggcatccaagaaaatatctttcctaacgacgttgctggaatttcctccctcatggtagtaaacggagattctaaaattagtccggatggtacgatactttgttccttgagccttttgactgagtgggtgcttaaagctgttcctaacgaatggccccatacgtaaatatcgttgtctgttaaagctcggatccattgaaatacctgggatgtatcaccaacaattcctagttctgttggtggtttatctggaccggaatcaccatatcctctgtggtccagtgaaatgaccaaaaagtgcttccttaacacctcgtacgtttctttgggctttattctgttacatccaacaccatgcagatatattgcaattggactcttcgtatttctaatgatttcacttgctgttttgtcatcctgacctgcgatttttgtagattgtatctgattttcttgtaacaacagccaagctccgatgcttactagagagccgtctatcagatctttggtggttatatagaaatttactaccccggtcataccatatttttgaggattgttgaattcgggattcttcggatcttgaaaattaaagaatatgaagaacctttgtactgatatggaattcataaatactagtggaaatattacccatattgccaaaaatatgagaagtagaataatgaataatgctacacccgaaataaacgcaatcttctgccacaacttccaactcttaaaaaactgttttttattcatatcgttttgaccattctctacagatgtataaactgaatccactgaattagaacgaaaacatcggagttttcccatttttctataatatttttatctcggtcaatcaagtaataaaagcaaaaaaatcgtcgtttgtatagggaaatcaatactcggaaaattatctttcttatctttagaataaaagtttggttgcgtgtgtaggtatatcgactggattcacatattagaag

SEQ ID NO: 1697 - DNA, 1840 bp, Diabrotica virgifera
  SmartBlast Evalue=5E-44; Info=Abhydrolase domain-containing protein 12 n=1 Tax=Harpegnathos saltator RepID=E2C8H0_9HYME
aattaataaaatttattcataaaaaaatttaataaataaggtaacaaaatatagacgccggaacagttgcaaacagatgctactggaaactaatacaaaaattgaatacattagaccagcggttctcaatctgtggtacatgtaccactggtggtacatatcattatttgcggtggtacacaaaacgcaaaaacagccaaaatcagcaccactttatagttaattagattacctagctagataggtatttcagttaggtggtaccaaaaataataaaaagttttttgtggtacatggtacatgactcaaaaagattgagaatcactgcattagactatctttttgtattagttccataaatcttcagaccatataagattccaagtttgttgatattcacttttgagcatttttgatataggtactcttcttgacttttagatttgaacacactatgtgatggtttgtgttttggacatcataataacaaaactggaaattaaatttctcgttgaaaattcgatttttaccgttgaaggtgtagatatcaacctcttcttttatgctggtccttgcaaaatccgataaactcgtcaatatattttggtacatttggatcgcttgtaataccaacatgcccatatcccagcctaccaaataggtggaaggtaacgtttccttgatctggaatttttcgttccgtactggcaacatggtacactttttcgccaagggtgtagggaattacgttgtcgtcttgagcgtgcataaccatgatggggcaatcaacatcgaggatatttgttgtagttttaaattggaagccatttttttcaattgggtttagtacagtcgctgtgaaccatggcatccaagaaaatatctttcctaacgacgttgctggaatttcctccctcatggtagtaaacggagattctaaaattagtccggatggtacgatactttgttccttgagccttttgactgagtgggtgcttaaagctgttcctaacgaatggccccatacgtaaatatcgttgtctgttaaagctcggatccattgaaatacctgggatgtatcaccaacaattcctagttctgttggtggtttatctggaccggaatcaccatatcctctgtggtccagtgaaatgaccaaaaagtgcttcctcaaaacctcgtacgtttcttttggctttattctgttacacccaacaccatgcagatatattgcaattggactctttgtatttctaatgatttcactcgctgttttgtcatcctgacctgcgatttttgtagattgtatctgattttcttgtaacaacagccaagctccgatgcttactagagagccgtctatcagatctttggtggttatatagaaatttactaccccggtcatgccatatttttgaggattgttgaattcgggattcttcggatcttgaaaattaaagaatatgaagaacctttgtactgatatggaattcataaatactagaggaaatattacccatattgccaaaaatatgagaagtagaatgatgaataatgctacacccgaaataaacgcaatcttctgccacaacttccaactcttaaaaaactgttttttattcatatcgttttgaccattctctacagatgtataaactgaatccactgaattagaacgaaaacatcgaagcttccccatatttctataatttttgttatctcgctcaatcaagtaataaaagcaaaaaatcgtcgtttgtatagggaaatcaatactcggaaaattatcttcttatctttagaataaacgtttggttgcgtgtatatcgactggattcac

SEQ ID NO: 1698 - DNA, 1861 bp, Diabrotica virgifera
  SmartBlast Evalue=5E-44; Info=Abhydrolase domain-containing protein 12 n=1 Tax=Harpegnathos saltator RepID=E2C8H0_9HYME
aattaataaaatttattcataaaaaaatttaataaataaggtaacaaaatatagacgccggaacagttgcaaacagatgctactggaaactaatacaaaaattgaatacattagaccagcggttctcaatctgtggtacatgtaccactggtggtacatatcattatttgcggtggtacacaaaacgcaaaaacagccaaaatcagcaccactttatagttaattaattagattacccagctagataggtatttcagttaggtggtaccaaaaataataaaaagtattttgtggtacatggtacatgactcaaaaagattgagaatcactgcattagactatctttttgtattagttccataaatcttcagaccatataagattccaggtttgttgatattcacttttgaacatttttgatatacgtactcttcttgacttttagatttgaacacactatgtgatggtttgtgttttggacatcaaaataacaaagctggaaattaaatttctcgttgaaaattcgatttttaccgttgaaggtgtagatatcaacctcttcttttatgctggtccttgcaaaatcctataaactcgtcaatatattttggtacatttggatcgcttgtaataccaacatgcccatatcccagcctaccaaataggtggaaggtaacgtttccttgatctggaatttttcgttccgtactggcaacatggtacactttttcgccaagggtgtagggaattacgttgtcgtcttgagcgtgcataaccatgatggggcaatcaacatcgaggatatttgttgtagttttaaattggaagccatttttttcaattgggtttagtacagtcgctgtgaaccatggcatccaagaaaatatctttcctaacgacgttgctggaatttcctccctcatggtagtaaacggagattctaaaattagtccggatggtacgatactttgttccttgagccttttgactgagtgggtgcttaaagctgttcctaacgaatggccccatacgtaaatatcgttgtctgttaaagctcggatccattgaaatacctgggatgtatcaccaacaattcctagttctgttggtggtttatctggaccggaatcaccatatcctctgtggtccagtgaaatgaccaaaaagtgcttcctcaaaacctcgtacgtttcttttggctttattctgttacacccaacaccatgcagatatattgcaattggactctttgtatttctaatgatttcactcgctgttttgtcatcctgacctgcgatttttgtagattgtatctgattttcttgtaacaacagccaagctccgatgcttactagagagccgtctatcagatctttggtggttatatagaaatttactaccccggtcatgccatatttttgaggattgttgaattcgggattcttcggatcttgaaaattaaagaatatgaagaacctttgtactgatatggaattcataaatactagaggaaatattacccatattgccaaaaatatgagaagtagaatgatgaataatgctacacccgaaataaacgcaatcttctgccacaacttccaactcttaaaaaactgttttttattcatatcgttttgaccattctctacagatgtataaactgaatccactgaattagaacgaaaacatcggagttttcccatttttctataatatttttatctcggtcaatcaagtaataaaagcaaaaaaatcgtcgtttgtatagggaaatcaatactcggaaaattatctttcttatctttagaataaaagtttggttgcgtgtgtaggtatatcgactggattcacatattagaag

SEQ ID NO: 1699 - DNA, 1840 bp, Diabrotica virgifera
  SmartBlast Evalue=5E-44; Info=Abhydrolase domain-containing protein 12 n=1 Tax=Harpegnathos saltator RepID=E2C8H0_9HYME
aattaataaaatttattcataaaaaaatttaataaataaggtaacaaaatatagacgccggaacagttgcaaacagatgctactggaaactaatacaaaaattgaatacattagaccagcggttctcaatctgtggtacatgtaccactggtggtacatatcattatttgcggtggtacacaaaacgcaaaaacagccaaaatcagcaccactttatagttaattagattacctagctagataggtatttcagttaggtggtaccaaaaataataaaaagttttttgtggtacatggtacatgactcaaaaagattgagaatcactgcattagactatctttttgtattagttccataaatcttcagaccatataagattccaagtttgttgatattcacttttgagcatttttgatataggtactcttcttgacttttagatttgaacacactatgtgatggtttgtgttttggacatcataataacaaaactggaaattaaatttctcgttgaaaattcgatttttaccgttgaaggtgtagatatcaacctcttcttttatgctggtccttgcaaaatccgataaactcgtcaatatattttggtacatttggatcgcttgtaataccaacatgcccatatcccagcctaccaaataggtggaaggtaacgtttccttgatctggaatttttcgttccgtactggcaacatggtacactttttcgccaagggtgtagggaattacgttgtcgtcttgagcgtgcataaccatgatggggcaatcaacatcgaggatatttgttgtagttttaaattggaagccatttttttcaattgggtttagtacagtcgctgtgaaccatggcatccaagaaaatatctttcctaacgacgttgctggaatttcctccctcatggtagtaaacggagattctaaaattagtccggatggtacgatactttgttccttgagccttttgactgagtgggtgcttaaagctgttcctaacgaatggccccatacgtaaatatcgttgtctgttaaagctcggatccattgaaatacctgggatgtatcaccaacaattcctagttctgttggtggtttatctggaccggaatcaccatatcctctgtggtccagtgaaatgaccaaaaagtgcttccttaacacctcgtacgtttctttgggctttattctgttacatccaacaccatgcagatatattgcaattggactcttcgtatttctaatgatttcacttgctgttttgtcatcctgacctgcgatttttgtagattgtatctgattttcttgtaacaacagccaagctccgatgcttactagagagccgtctatcagatctttggtggttatatagaaatttactaccccggtcataccatatttttgaggattgttgaattcgggattcttcggatcttgaaaattaaagaatatgaagaacctttgtactgatatggaattcataaatactagtggaaatattacccatattgccaaaaatatgagaagtagaataatgaataatgctacacccgaaataaacgcaatcttctgccacaacttccaactcttaaaaaactgttttttattcatatcgttttgaccattctctacagatgtataaactgaatccactgaattagaacgaaaacatcgaagcttccccatatttctataatttttgttatctcgctcaatcaagtaataaaagcaaaaaatcgtcgtttgtatagggaaatcaatactcggaaaattatcttcttatctttagaataaacgtttggttgcgtgtatatcgactggattcac

SEQ ID NO: 1700 - DNA, 1861 bp, Diabrotica virgifera
  SmartBlast Evalue=5E-44; Info=Abhydrolase domain-containing protein 12 n=1 Tax=Harpegnathos saltator RepID=E2C8H0_9HYME
aattaataaaatttattcataaaaaaatttaataaataaggtaacaaaatatagacgccggaacagttgcaaacagatgctactggaaactaatacaaaaattgaatacattagaccagcggttctcaatctgtggtacatgtaccactggtggtacatatcattatttgcggtggtacacaaaacgcaaaaacagccaaaatcagcaccactttatagttaattaattagattacccagctagataggtatttcagttaggtggtaccaaaaataataaaaagtattttgtggtacatggtacatgactcaaaaagattgagaatcactgcattagactatctttttgtattagttccataaatcttcagaccatataagattccaggtttgttgatattcacttttgaacatttttgatatacgtactcttcttgacttttagatttgaacacactatgtgatggtttgtgttttggacatcaaaataacaaagctggaaattaaatttctcgttgaaaattcgatttttaccgttgaaggtgtagatatcaacctcttcttttatgctggtccttgcaaaatcctataaactcgtcaatatattttggtacatttggatcgcttgtaataccaacatgcccatatcccagcctaccaaataggtggaaggtaacgtttccttgatctggaatttttcgttccgtactggcaacatggtacactttttcgccaagggtgtagggaattacgttgtcgtcttgagcgtgcataaccatgatggggcaatcaacatcgaggatatttgttgtagttttaaattggaagccatttttttcaattgggtttagtacagtcgctgtgaaccatggcatccaagaaaatatctttcctaacgacgttgctggaatttcctccctcatggtagtaaacggagattctaaaattagtccggatggtacgatactttgttccttgagccttttgactgagtgggtgcttaaagctgttcctaacgaatggccccatacgtaaatatcgttgtctgttaaagctcggatccattgaaatacctgggatgtatcaccaacaattcctagttctgttggtggtttatctggaccggaatcaccatatcctctgtggtccagtgaaatgaccaaaaagtgcttccttaacacctcgtacgtttctttgggctttattctgttacatccaacaccatgcagatatattgcaattggactcttcgtatttctaatgatttcacttgctgttttgtcatcctgacctgcgatttttgtagattgtatctgattttcttgtaacaacagccaagctccgatgcttactagagagccgtctatcagatctttggtggttatatagaaatttactaccccggtcataccatatttttgaggattgttgaattcgggattcttcggatcttgaaaattaaagaatatgaagaacctttgtactgatatggaattcataaatactagtggaaatattacccatattgccaaaaatatgagaagtagaataatgaataatgctacacccgaaataaacgcaatcttctgccacaacttccaactcttaaaaaactgttttttattcatatcgttttgaccattctctacagatgtataaactgaatccactgaattagaacgaaaacatcggagttttcccatttttctataatatttttatctcggtcaatcaagtaataaaagcaaaaaaatcgtcgtttgtatagggaaatcaatactcggaaaattatctttcttatctttagaataaaagtttggttgcgtgtgtaggtatatcgactggattcacatattagaag

SEQ ID NO: 1701 - DNA, 1844 bp, Diabrotica virgifera
  SmartBlast Evalue=5E-44; Info=Abhydrolase domain-containing protein 12 n=1 Tax=Harpegnathos saltator RepID=E2C8H0_9HYME
aattaataaaatttattcataaaaaaatttaataaataaggtaacaaaatatagacgccggaacagttgcaaacagatgctactggaaactaatacaaaaattgaatacattagaccagcggttctcaatctgtggtacatgtaccactggtggtacatatcattatttgcggtggtacacaaaacgcaaaaacagccaaaatcagcaccactttatagttaattaattagattacccagctagataggtatttcagttaggtggtaccaaaaataataaaaagtattttgtggtacatggtacatgactcaaaaagattgagaatcactgcattagactatctttttgtattagttccataaatcttcagaccatataagattccaggtttgttgatattcacttttgaacatttttgatatacgtactcttcttgacttttagatttgaacacactatgtgatggtttgtgttttggacatcaaaataacaaagctggaaattaaatttctcgttgaaaattcgatttttaccgttgaaggtgtagatatcaacctcttcttttatgctggtccttgcaaaatcctataaactcgtcaatatattttggtacatttggatcgcttgtaataccaacatgcccatatcccagcctaccaaataggtggaaggtaacgtttccttgatctggaatttttcgttccgtactggcaacatggtacactttttcgccaagggtgtagggaattacgttgtcgtcttgagcgtgcataaccatgatggggcaatcaacatcgaggatatttgttgtagttttaaattggaagccatttttttcaattgggtttagtacagtcgctgtgaaccatggcatccaagaaaatatctttcctaacgacgttgctggaatttcctccctcatggtagtaaacggagattctaaaattagtccggatggtacgatactttgttccttgagccttttgactgagtgggtgcttaaagctgttcctaacgaatggccccatacgtaaatatcgttgtctgttaaagctcggatccattgaaatacctgggatgtatcaccaacaattcctagttctgttggtggtttatctggaccggaatcaccatatcctctgtggtccagtgaaatgaccaaaaagtgcttcctcaaaacctcgtacgtttcttttggctttattctgttacacccaacaccatgcagatatattgcaattggactctttgtatttctaatgatttcactcgctgttttgtcatcctgacctgcgatttttgtagattgtatctgattttcttgtaacaacagccaagctccgatgcttactagagagccgtctatcagatctttggtggttatatagaaatttactaccccggtcatgccatatttttgaggattgttgaattcgggattcttcggatcttgaaaattaaagaatatgaagaacctttgtactgatatggaattcataaatactagaggaaatattacccatattgccaaaaatatgagaagtagaatgatgaataatgctacacccgaaataaacgcaatcttctgccacaacttccaactcttaaaaaactgttttttattcatatcgttttgaccattctctacagatgtataaactgaatccactgaattagaacgaaaacatcgaagcttccccatatttctataatttttgttatctcgctcaatcaagtaataaaagcaaaaaatcgtcgtttgtatagggaaatcaatactcggaaaattatcttcttatctttagaataaacgtttggttgcgtgtatatcgactggattcac

SEQ ID NO: 1702 - DNA, 1844 bp, Diabrotica virgifera
  SmartBlast Evalue=5E-44; Info=Abhydrolase domain-containing protein 12 n=1 Tax=Harpegnathos saltator RepID=E2C8H0_9HYME
aattaataaaatttattcataaaaaaatttaataaataaggtaacaaaatatagacgccggaacagttgcaaacagatgctactggaaactaatacaaaaattgaatacattagaccagcggttctcaatctgtggtacatgtaccactggtggtacatatcattatttgcggtggtacacaaaacgcaaaaacagccaaaatcagcaccactttatagttaattaattagattacccagctagataggtatttcagttaggtggtaccaaaaataataaaaagtattttgtggtacatggtacatgactcaaaaagattgagaatcactgcattagactatctttttgtattagttccataaatcttcagaccatataagattccaggtttgttgatattcacttttgaacatttttgatatacgtactcttcttgacttttagatttgaacacactatgtgatggtttgtgttttggacatcaaaataacaaagctggaaattaaatttctcgttgaaaattcgatttttaccgttgaaggtgtagatatcaacctcttcttttatgctggtccttgcaaaatcctataaactcgtcaatatattttggtacatttggatcgcttgtaataccaacatgcccatatcccagcctaccaaataggtggaaggtaacgtttccttgatctggaatttttcgttccgtactggcaacatggtacactttttcgccaagggtgtagggaattacgttgtcgtcttgagcgtgcataaccatgatggggcaatcaacatcgaggatatttgttgtagttttaaattggaagccatttttttcaattgggtttagtacagtcgctgtgaaccatggcatccaagaaaatatctttcctaacgacgttgctggaatttcctccctcatggtagtaaacggagattctaaaattagtccggatggtacgatactttgttccttgagccttttgactgagtgggtgcttaaagctgttcctaacgaatggccccatacgtaaatatcgttgtctgttaaagctcggatccattgaaatacctgggatgtatcaccaacaattcctagttctgttggtggtttatctggaccggaatcaccatatcctctgtggtccagtgaaatgaccaaaaagtgcttccttaacacctcgtacgtttctttgggctttattctgttacatccaacaccatgcagatatattgcaattggactcttcgtatttctaatgatttcacttgctgttttgtcatcctgacctgcgatttttgtagattgtatctgattttcttgtaacaacagccaagctccgatgcttactagagagccgtctatcagatctttggtggttatatagaaatttactaccccggtcataccatatttttgaggattgttgaattcgggattcttcggatcttgaaaattaaagaatatgaagaacctttgtactgatatggaattcataaatactagtggaaatattacccatattgccaaaaatatgagaagtagaataatgaataatgctacacccgaaataaacgcaatcttctgccacaacttccaactcttaaaaaactgttttttattcatatcgttttgaccattctctacagatgtataaactgaatccactgaattagaacgaaaacatcgaagcttccccatatttctataatttttgttatctcgctcaatcaagtaataaaagcaaaaaatcgtcgtttgtatagggaaatcaatactcggaaaattatcttcttatctttagaataaacgtttggttgcgtgtatatcgactggattcac

SEQ ID NO: 1703 - DNA, 1811 bp, Diabrotica virgifera
  SmartBlast Evalue=5E-44; Info=Abhydrolase domain-containing protein 12 n=1 Tax=Harpegnathos saltator RepID=E2C8H0_9HYME
aattaataaaatttattcataaaaaaatttaataaataaggtaacaaaatatagacgccggaacagttgcaaacagatgctactggaaactaatacaaaaattgaatacattagaccagcggttctcaatctgtggtacatgtaccactggtggtacatatcattatttgcggtggtacacaaaacgcaaaaacagccaaaatcagcaccactttatagttaattagattacctagctagataggtatttcagttaggtggtaccaaaaataataaaaagttttttgtggtacatggtacatgactcaaaaagattgagaatcactgcattagactatctttttgtattagttccataaatcttcagaccatataagattccaagtttgttgatattcacttttgagcatttttgatataggtactcttcttgacttttagatttgaacacactatgtgatggtttgtgttttggacatcataataacaaaactggaaattaaatttctcgttgaaaattcgatttttaccgttgaaggtgtagatatcaacctcttcttttatgctggtccttgcaaaatccgataaactcgtcaatatattttggtacatttggatcgcttgtaataccaacatgcccatatcccagcctaccaaataggtggaaggtaacgtttccttgatctggaatttttcgttccgtactggcaacatggtacactttttcgccaagggtgtagggaattacgttgtcgtcttgagcgtgcataaccatgatggggcaatcaacatcgaggatatttgttgtagttttaaattggaagccatttttttcaattgggtttagtacagtcgctgtgaaccatggcatccaagaaaatatctttcctaacgacgttgctggaatttcctccctcatggtagtaaacggagattctaaaattagtccggatggtacgatactttgttccttgagccttttgactgagtgggtgcttaaagctgttcctaacgaatggccccatacgtaaatatcgttgtctgttaaagctcggatccattgaaatacctgggatgtatcaccaacaattcctagttctgttggtggtttatctggaccggaatcaccatatcctctgtggtccagtgaaatgaccaaaaagtgcttcctcaaaacctcgtacgtttcttttggctttattctgttacacccaacaccatgcagatatattgcaattggactctttgtatttctaatgatttcactcgctgttttgtcatcctgacctgcgatttttgtagattgtatctgattttcttgtaacaacagccaagctccgatgcttactagagagccgtctatcagatctttggtggttatatagaaatttactaccccggtcatgccatatttttgaggattgttgaattcgggattcttcggatcttgaaaattaaagaatatgaagaacctttgtactgatatggaattcataaatactagaggaaatattacccatattgccaaaaatatgagaagtagaatgatgaataatgctacacccgaaataaacgcaatcttctgccacaacttccaactcttaaaaaactgttttttattcatatcgttttgaccattctctacagatgtataaactgaatccactgaattagaacgccaatcaacaatgtgacaaggtccatcgtcagtcgtctgaagtcacagtgataaattgtcttatgtcttatttacccatcatcttgatataaattacggagaagttgcacaaataccactgtctactttcttg

SEQ ID NO: 1704 - DNA, 736 bp, Diabrotica virgifera
gagactggtgggtttcgaaaccggtggaggtgcctgcggcgctctctgattggactggaatgcgatgcggctgtggtatcgtgttgcaacgaaattgaaaatggttgtttatttttgatttacatgcttactctgattggagtacgaagggaaccattctcgttggaactttaccgcgctgagcagatgggacgtgaattataaattgtaaaattccctcatcttctttagtctcagcatccgttatggcttgcaaattttagaagcctcggaggtgtaaccagagaaggttcccattgttttcaatctggtgggatgtagagtaatatttttagtattattttatgtgctattagattgaaaacttagtcttttgctagcagttgccgctagggcatccctgccatttcgttcgttgcaatccgtgactgcacgccggggtttgtcctagttgggtcagagagagcagcatatgtgcctcctgatgagagactaataagtttcgaaaccggtagaggtgatttctgcactctctgattgaactggaataatgatgcagctgtagtttcgtgttggtacgaaattgaaaatggttattcagttttgaatcacattttttattaatattaaatattctattagttttttttaatttgttgttattctgttaaattaatcgttttctttactttaaaaaatatattctataattatggaaacccaaaaatgttcgatg

SEQ ID NO: 1705 - DNA, 633 bp, Diabrotica virgifera
caaactaggtcaggtgactgaaccatggtgcagaaagtgcgaaatggaagaagagactgccatacaaatactatgctgagcagatgggacgtgaattataaactgtaaaattccctcatcttctttagtctcagcatccgttatggcttgcaaattttagaagcctcggaggtgtaaccagagaaggttcccattgttttcaatctggtgggatgtagagtaatatttttagtattattttatgtgctattagattgaaaacttagtcttttgctagcagttgccgctagggcatccctgccatttcgttcgttgcaatccgtgactgcacgccggggtttgtcctagttgggtcagagagagcagcatatgtgcctcctgatgagagactaataagtttcgaaaccggtagaggtgatttctgcactctctgattgaactggaataatgatgcagctgtagtttcgtgttggtacgaaattgaaaatggttattcagttttgaatcacattttttattaatattaaatattctattagttttttttaatttgttgttattctgttaaattaatcgttttctttactttaaaaaatatattctataattatggaaacccaaaaatgttcgatg

SEQ ID NO: 1706 - DNA, 530 bp, Diabrotica virgifera
gcgcgaaataaaaaaagcatcgaggaaacatcctcaatattttgcctcaacatgaaacaacattttgccagcaactatgcctcgaagaattttgaatgtcactcagtcgtaaacaatcacatttttggatgttgtactatgtgctataagattgaaaacttagtcttttgctagcagttgccgctagggcatccctgccatttcgttcgttgcaatccgtgactgcacgccggggtttgtcctagttgggtcagagagagcagcatatgtgcctcctgatgagagactaataagtttcgaaaccggtagaggtgatttctgcactctctgattgaactggaataatgatgcagctgtagtttcgtgttggtacgaaattgaaaatggttattcagttttgaatcacattttttattaatattaaatattctattagttttttttaatttgttgttattctgttaaattaatcgttttctttactttaaaaaatatattctataattatggaaacccaaaaatgttcgatg

SEQ ID NO: 1707 - DNA, 380 bp, Diabrotica virgifera
tgtccctgtaagttgtatccatatggcaaacttttttattattaattttacgaaaaaaagttattctttataaaaagttctgcatggtccaaaacccaggattcaaccatcagatatcaaattttatgaatgttatacgaggtatgtcaaaaagtttgaatatcactcaagagtaaagtagctttatttttcacaatattgaaaatatctattatgaaaagttgtttggaattaaaaactgctcagcggggtagatgggacgtgaattataaattgtaaaattccctcatcttctttagtctcagcatccgttatggcttacaaattttagaagcctcggaggtgtaaccagagaaggttcccattgttttcaatctggt

SEQ ID NO: 1708 - DNA, 1456 bp, Diabrotica virgifera
tgtccctgtaagttgtatccatatggcaaacttttttattattaattttacgaaaaaaagttattctttataaaaagttctgcatggtccaaaacccaggattcaaccatcagatatcaaattttatgaatgttatacgaggtatgtcaaaaagtttgaatatcactcaagagtaaagtagctttatttttcacaatattgaaaatatctattatgaaaagttgtttggaattaaaaactgctcagcggggtagatgggaccattctcgttggaactttaccgcgctgagcagatgggacgtgaattataaattgtaaaattccctcatcttctttagtctcagcatccgttatggcttgcaaattttagaagcctcggaggtgtaaccagagaaggttcccattgttttcaatctggtgggatgtagagtaatatttttagtattattttatgtgctattagattgaaaacttagtcttttgctagcagttgccgctagggcatccctgccatttcgttcgttgcaatccgtgactgcacgccggggtttgtcctagttgggtcagagagagcagcatatgtgcctcctgatgagagactaataagtttcgaaaccggtagaggtgatttctgcactctctgattgaactagaatatgatgcggctgtagttttgtgttgcaacgaaattgaaaatggttatccattttcaaagtttttttatataaccgtgaaatatatgccttctaggacttatacatcctaacagtaatgaatcagacagagaatatttttatcccaacagtgttttctagaataacagtatctaatgctcaggatgaatcgcgctctcaagcaaaaacaaatggaagatacagccaaaaacttatttgatttggaagagccacaagatcctttttatgacagtgacgacagcgctgattcagactataaatgctctgataccgatttctactcctcatgagaagaacctgaagttgaaaaacttggcgaaccagctgaagggaaagtattaataaaatctaaaagtcgtattgactggtttaaacaaatggcactaagtagtatatttctatgatattattcatattgcttacattaacttttaaataacataatttgaaataagttccgtacgatcaattatgaaagttttgttcagatttgtagttccttttatattcaatgataatagtagacaaagcaataaagcactaaaatcggtcttacctccgcaaaaaaaaaaaggagaagacggatcttaataattcttcttgcattcgactcgtgaatgcgccaggaaactctgtgaaccggagccatgatataatattgaaaaactgcatacaaaaaatgcattcccaaagtgcatctcaaacagacaataaaaaaattcagaactcgtcaattatcggcggaaccgagttcaaccccg

SEQ ID NO: 1709 - DNA, 1434 bp, Diabrotica virgifera
tgtccctgtaagttgtatccatatggcaaacttttttattattaattttacgaaaaaaagttattctttataaaaagttctgcatggtccaaaacccaggattcaaccatcagatatcaaattttatgaatgttatacgaggtatgtcaaaaagtttgaatatcactcaagagtaaagtagctttatttttcacaatattgaaaatatctattatgaaaagttgtttggaattaaaaactgctcagcggggtagatgggaccattctcgttggaactttaccgcgctgagcagatgggacgtgaattataaattgtaaaattccctcatcttctttagtctcagcatccgttatggcttgcaaattttagaagcctcggaggtgtaaccagagaaggttcccattgttttcaatctggtgggatgtagagtaatatttttagtattattttatgtgctattagattgaaaacttagtcttttgctagcagttgccgctagggcatccctgccatttcgttcgttgcaatccgtgactgcacgccggggtttgtcctagttgggtcagagagagcagcatatgtgcctcctgatgagagactaatacgtttcgaaaccgttagaggtgcttggcactctctgattgaactggaataatgatgaggctgtagtttcgtgttgcaacgaaattgaaaatggttattcatttttgatctatttctttactttcgaatattttgaatattattacgtctgaagatgtttttttgttatattaattttgtgtgtctgtaaataaaaataaaagtagtcttaatcttttttttttcattgttcattagatttattactattattttataaaataatttattcacttttaaagtatttagacttatactttgtatcaaataaacctggtttaaaccaaataaacctggtttaaaccaaaaaacttgttttttttttggttttttggaaaaaaaccttaatttttgccaaccctgaccaaaggtaccagtttgcatcaccacaatgtaaagcggatgaataaatcaacataacgttaaaaagtgctaaggaaggacttatctacattcacaaataagaaaagtgtgacagattgtctgtcatttcaaaagagcatggacagcagattaaaaaaatgtgcaaagctcatgctgtgactgttgagaccattaaagaaaatattccaagatttttacgaaatgttagacgatattatatcagatttaagaactttgatttaagaaactatgtggaaagtgggtcaggttgaagaccaacctggttcctatctcttgccaagaaataggaaggaaaaaaggttgtaccgtttaattgccatctacttcacacatagccaggctatgtggtactaaggcactctgtagaagtcaattctataagcttg

SEQ ID NO: 1710 - DNA, 1349 bp, Diabrotica virgifera
gagactggtgggtttcgaaaccggtggaggtgcctgcggcgctctctgattggactggaatgcgatgcggctgtggtatcgtgttgcaacgaaattgaaaatggttgtttatttttgatttacatgcttactctgattggagtacgaagggaaccattctcgttggaactttaccgcgctgagcagatgggacgtgaattataaattgtaaaattccctcatcttctttagtctcagcatccgttatggcttgcaaattttagaagcctcggaggtgtaaccagagaaggttcccattgttttcaatctggtgggatgtagagtaatatttttagtattattttatgtgctattagattgaaaacttagtcttttgctagcagttgccgctagggcatccctgccatttcgttcgttgcaatccgtgactgcacgccggggtttgtcctagttgggtcagagagagcagcatatgtgcctcctgatgagagactaataagtttcgaaaccggtagaggtgatttctgcactctctgattgaactagaatatgatgcggctgtagttttgtgttgcaacgaaattgaaaatggttatccattttcaaagtttttttatataaccgtgaaatatatgccttctaggacttatacatcctaacagtaatgaatcagacagagaatatttttatcccaacagtgttttctagaataacagtatctaatgctcaggatgaatcgcgctctcaagcaaaaacaaatggaagatacagccaaaaacttatttgatttggaagagccacaagatcctttttatgacagtgacgacagcgctgattcagactataaatgctctgataccgatttctactcctcatgagaagaacctgaagttgaaaaacttggcgaaccagctgaagggaaagtattaataaaatctaaaagtcgtattgactggtttaaacaaatggcactaagtagtatatttctatgatattattcatattgcttacattaacttttaaataacataatttgaaataagttccgtacgatcaattatgaaagttttgttcagatttgtagttccttttatattcaatgataatagtagacaaagcaataaagcactaaaatcggtcttacctccgcaaaaaaaaaaaggagaagacggatcttaataattcttcttgcattcgactcgtgaatgcgccaggaaactctgtgaaccggagccatgatataatattgaaaaactgcatacaaaaaatgcattcccaaagtgcatctcaaacagacaataaaaaaattcagaactcgtcaattatcggcggaaccgagttcaaccccg

SEQ ID NO: 1711 - DNA, 1327 bp, Diabrotica virgifera
gagactggtgggtttcgaaaccggtggaggtgcctgcggcgctctctgattggactggaatgcgatgcggctgtggtatcgtgttgcaacgaaattgaaaatggttgtttatttttgatttacatgcttactctgattggagtacgaagggaaccattctcgttggaactttaccgcgctgagcagatgggacgtgaattataaattgtaaaattccctcatcttctttagtctcagcatccgttatggcttgcaaattttagaagcctcggaggtgtaaccagagaaggttcccattgttttcaatctggtgggatgtagagtaatatttttagtattattttatgtgctattagattgaaaacttagtcttttgctagcagttgccgctagggcatccctgccatttcgttcgttgcaatccgtgactgcacgccggggtttgtcctagttgggtcagagagagcagcatatgtgcctcctgatgagagactaatacgtttcgaaaccgttagaggtgcttggcactctctgattgaactggaataatgatgaggctgtagtttcgtgttgcaacgaaattgaaaatggttattcatttttgatctatttctttactttcgaatattttgaatattattacgtctgaagatgtttttttgttatattaattttgtgtgtctgtaaataaaaataaaagtagtcttaatcttttttttttcattgttcattagatttattactattattttataaaataatttattcacttttaaagtatttagacttatactttgtatcaaataaacctggtttaaaccaaataaacctggtttaaaccaaaaaacttgttttttttttggttttttggaaaaaaaccttaatttttgccaaccctgaccaaaggtaccagtttgcatcaccacaatgtaaagcggatgaataaatcaacataacgttaaaaagtgctaaggaaggacttatctacattcacaaataagaaaagtgtgacagattgtctgtcatttcaaaagagcatggacagcagattaaaaaaatgtgcaaagctcatgctgtgactgttgagaccattaaagaaaatattccaagatttttacgaaatgttagacgatattatatcagatttaagaactttgatttaagaaactatgtggaaagtgggtcaggttgaagaccaacctggttcctatctcttgccaagaaataggaaggaaaaaaggttgtaccgtttaattgccatctacttcacacatagccaggctatgtggtactaaggcactctgtagaagtcaattctataagcttg

SEQ ID NO: 1712 - DNA, 1246 bp, Diabrotica virgifera
caaactaggtcaggtgactgaaccatggtgcagaaagtgcgaaatggaagaagagactgccatacaaatactatgctgagcagatgggacgtgaattataaactgtaaaattccctcatcttctttagtctcagcatccgttatggcttgcaaattttagaagcctcggaggtgtaaccagagaaggttcccattgttttcaatctggtgggatgtagagtaatatttttagtattattttatgtgctattagattgaaaacttagtcttttgctagcagttgccgctagggcatccctgccatttcgttcgttgcaatccgtgactgcacgccggggtttgtcctagttgggtcagagagagcagcatatgtgcctcctgatgagagactaataagtttcgaaaccggtagaggtgatttctgcactctctgattgaactagaatatgatgcggctgtagttttgtgttgcaacgaaattgaaaatggttatccattttcaaagtttttttatataaccgtgaaatatatgccttctaggacttatacatcctaacagtaatgaatcagacagagaatatttttatcccaacagtgttttctagaataacagtatctaatgctcaggatgaatcgcgctctcaagcaaaaacaaatggaagatacagccaaaaacttatttgatttggaagagccacaagatcctttttatgacagtgacgacagcgctgattcagactataaatgctctgataccgatttctactcctcatgagaagaacctgaagttgaaaaacttggcgaaccagctgaagggaaagtattaataaaatctaaaagtcgtattgactggtttaaacaaatggcactaagtagtatatttctatgatattattcatattgcttacattaacttttaaataacataatttgaaataagttccgtacgatcaattatgaaagttttgttcagatttgtagttccttttatattcaatgataatagtagacaaagcaataaagcactaaaatcggtcttacctccgcaaaaaaaaaaaggagaagacggatcttaataattcttcttgcattcgactcgtgaatgcgccaggaaactctgtgaaccggagccatgatataatattgaaaaactgcatacaaaaaatgcattcccaaagtgcatctcaaacagacaataaaaaaattcagaactcgtcaattatcggcggaaccgagttcaaccccg

SEQ ID NO: 1713 - DNA, 1224 bp, Diabrotica virgifera
caaactaggtcaggtgactgaaccatggtgcagaaagtgcgaaatggaagaagagactgccatacaaatactatgctgagcagatgggacgtgaattataaactgtaaaattccctcatcttctttagtctcagcatccgttatggcttgcaaattttagaagcctcggaggtgtaaccagagaaggttcccattgttttcaatctggtgggatgtagagtaatatttttagtattattttatgtgctattagattgaaaacttagtcttttgctagcagttgccgctagggcatccctgccatttcgttcgttgcaatccgtgactgcacgccggggtttgtcctagttgggtcagagagagcagcatatgtgcctcctgatgagagactaatacgtttcgaaaccgttagaggtgcttggcactctctgattgaactggaataatgatgaggctgtagtttcgtgttgcaacgaaattgaaaatggttattcatttttgatctatttctttactttcgaatattttgaatattattacgtctgaagatgtttttttgttatattaattttgtgtgtctgtaaataaaaataaaagtagtcttaatcttttttttttcattgttcattagatttattactattattttataaaataatttattcacttttaaagtatttagacttatactttgtatcaaataaacctggtttaaaccaaataaacctggtttaaaccaaaaaacttgttttttttttggttttttggaaaaaaaccttaatttttgccaaccctgaccaaaggtaccagtttgcatcaccacaatgtaaagcggatgaataaatcaacataacgttaaaaagtgctaaggaaggacttatctacattcacaaataagaaaagtgtgacagattgtctgtcatttcaaaagagcatggacagcagattaaaaaaatgtgcaaagctcatgctgtgactgttgagaccattaaagaaaatattccaagatttttacgaaatgttagacgatattatatcagatttaagaactttgatttaagaaactatgtggaaagtgggtcaggttgaagaccaacctggttcctatctcttgccaagaaataggaaggaaaaaaggttgtaccgtttaattgccatctacttcacacatagccaggctatgtggtactaaggcactctgtagaagtcaattctataagcttg

SEQ ID NO: 1714 - DNA, 1143 bp, Diabrotica virgifera
gcgcgaaataaaaaaagcatcgaggaaacatcctcaatattttgcctcaacatgaaacaacattttgccagcaactatgcctcgaagaattttgaatgtcactcagtcgtaaacaatcacatttttggatgttgtactatgtgctataagattgaaaacttagtcttttgctagcagttgccgctagggcatccctgccatttcgttcgttgcaatccgtgactgcacgccggggtttgtcctagttgggtcagagagagcagcatatgtgcctcctgatgagagactaataagtttcgaaaccggtagaggtgatttctgcactctctgattgaactagaatatgatgcggctgtagttttgtgttgcaacgaaattgaaaatggttatccattttcaaagtttttttatataaccgtgaaatatatgccttctaggacttatacatcctaacagtaatgaatcagacagagaatatttttatcccaacagtgttttctagaataacagtatctaatgctcaggatgaatcgcgctctcaagcaaaaacaaatggaagatacagccaaaaacttatttgatttggaagagccacaagatcctttttatgacagtgacgacagcgctgattcagactataaatgctctgataccgatttctactcctcatgagaagaacctgaagttgaaaaacttggcgaaccagctgaagggaaagtattaataaaatctaaaagtcgtattgactggtttaaacaaatggcactaagtagtatatttctatgatattattcatattgcttacattaacttttaaataacataatttgaaataagttccgtacgatcaattatgaaagttttgttcagatttgtagttccttttatattcaatgataatagtagacaaagcaataaagcactaaaatcggtcttacctccgcaaaaaaaaaaaggagaagacggatcttaataattcttcttgcattcgactcgtgaatgcgccaggaaactctgtgaaccggagccatgatataatattgaaaaactgcatacaaaaaatgcattcccaaagtgcatctcaaacagacaataaaaaaattcagaactcgtcaattatcggcggaaccgagttcaaccccg

SEQ ID NO: 1715 - DNA, 1121 bp, Diabrotica virgifera
gcgcgaaataaaaaaagcatcgaggaaacatcctcaatattttgcctcaacatgaaacaacattttgccagcaactatgcctcgaagaattttgaatgtcactcagtcgtaaacaatcacatttttggatgttgtactatgtgctataagattgaaaacttagtcttttgctagcagttgccgctagggcatccctgccatttcgttcgttgcaatccgtgactgcacgccggggtttgtcctagttgggtcagagagagcagcatatgtgcctcctgatgagagactaatacgtttcgaaaccgttagaggtgcttggcactctctgattgaactggaataatgatgaggctgtagtttcgtgttgcaacgaaattgaaaatggttattcatttttgatctatttctttactttcgaatattttgaatattattacgtctgaagatgtttttttgttatattaattttgtgtgtctgtaaataaaaataaaagtagtcttaatcttttttttttcattgttcattagatttattactattattttataaaataatttattcacttttaaagtatttagacttatactttgtatcaaataaacctggtttaaaccaaataaacctggtttaaaccaaaaaacttgttttttttttggttttttggaaaaaaaccttaatttttgccaaccctgaccaaaggtaccagtttgcatcaccacaatgtaaagcggatgaataaatcaacataacgttaaaaagtgctaaggaaggacttatctacattcacaaataagaaaagtgtgacagattgtctgtcatttcaaaagagcatggacagcagattaaaaaaatgtgcaaagctcatgctgtgactgttgagaccattaaagaaaatattccaagatttttacgaaatgttagacgatattatatcagatttaagaactttgatttaagaaactatgtggaaagtgggtcaggttgaagaccaacctggttcctatctcttgccaagaaataggaaggaaaaaaggttgtaccgtttaattgccatctacttcacacatagccaggctatgtggtactaaggcactctgtagaagtcaattctataagcttg

SEQ ID NO: 1716 - DNA, 843 bp, Diabrotica virgifera
tgtccctgtaagttgtatccatatggcaaacttttttattattaattttacgaaaaaaagttattctttataaaaagttctgcatggtccaaaacccaggattcaaccatcagatatcaaattttatgaatgttatacgaggtatgtcaaaaagtttgaatatcactcaagagtaaagtagctttatttttcacaatattgaaaatatctattatgaaaagttgtttggaattaaaaactgctcagcggggtagatgggaccattctcgttggaactttaccgcgctgagcagatgggacgtgaattataaattgtaaaattccctcatcttctttagtctcagcatccgttatggcttgcaaattttagaagcctcggaggtgtaaccagagaaggttcccattgttttcaatctggtgggatgtagagtaatatttttagtattattttatgtgctattagattgaaaacttagtcttttgctagcagttgccgctagggcatccctgccatttcgttcgttgcaatccgtgactgcacgccggggtttgtcctagttgggtcagagagagcagcatatgtgcctcctgatgagagactaataagtttcgaaaccggtagaggtgatttctgcactctctgattgaactggaataatgatgcagctgtagtttcgtgttggtacgaaattgaaaatggttattcagttttgaatcacattttttattaatattaaatattctattagttttttttaatttgttgttattctgttaaattaatcgttttctttactttaaaaaatatattctataattatggaaacccaaaaatgttcgatg

SEQ ID NO: 1717 - DNA, 1449 bp, Diabrotica virgifera
  SmartBlast Evalue=5E-13; Info=Autophagy-related protein 3 n=2 Tax=Formicidae RepID=E2AIM5_9HYME
cgagactgtgatggaaggtggtggagagttaggagtgcatatgtatttaattattttcttaaaattcatgcagtcggttatacctactatcgaatacgattacacgcaaaattttaccatgtaaagctgatatttttatttgacaccgtagtcgaatgctgttgaacgatataaaagatcaaaatcagtattttgctccaatttgaagtgttttgtttttaaaatacttgtttgagtctcattttttattattatggattaatattgttatgttactctggtccatgtgttaaacaaaggtgaatgcagctaaataattgccaatttaattttttttaaatttagtggtccctataatcgacccaactaataagaactcatagaaaaaaaaatcatataaaaatgtaaaactttttatagtactagatcagagccctaaaaatcataatgttcctaaaatccctaaaaatcataccaaaaagctgaattttacggagaatgttaatttcgaaacacatgcatcgttgaagatgcagaaagtttgccactcctaccccgagatgccccctaaaacctcgctcgcaggaggaaacggaaacatggatttaccaaagaatctgaacgccgtagaaaaaaaagaatgtgtgtgtactttgtacgcacgtaagaagttatacttctaatatatgatttcaacgaaatcaatataacagtttatttatgttttatttaaatattaaactaattttaatatgtacttactacttgccaacaattttttattaaaacaataagaaaaattaaaaaaaataaaagaataaaacacacgcaaacacattgaaaaatgaaaccaaagaaattatttctgaacaattgtgagaaaattttaactaaatacgtattttctgaaaaaaaaatgtgtgtgtactttgtacgcacgtaagaagatattcttctattatataataggtaatttaaacgaagtaaatatacttaaaaggttattttttattttatttaaaaatcaaactaactttcttatctaccactttcaaaaaattttattaaaacaaccaaaaataaaaaaaatatgaatcgcccaagaatttggaacccgcaaccttccaatctcattgctaatccattttccactactccagcgaggcgctagaaatagatatgtaagtttcggatataattacacaacacggcgacatatagtgtaaaaatgttatgcttacataatattttattattttactacagactacagggaaacaaaaatccaaaaacacaaaaattataataaataatacatttcctaaaaccactaatatattcttttaatggcttatttgcacggttacaggtacatacatacctatcttgaaagattagcaatgaactgcatactgtcagaactacatactgtcagtgtgcgcaggcgcg

SEQ ID NO: 1718 - DNA, 1445 bp, Diabrotica virgifera
  SmartBlast Evalue=5E-13; Info=Autophagy-related protein 3 n=2 Tax=Formicidae RepID=E2AIM5_9HYME
cgagactgtgatggaaggtggtggagagttaggagtgcatatgtatttaattattttcttaaaattcatgcagtcggttatacctactatcgaatacgattacacgcaaaattttaccatgtaaagctgatatttttatttgacaccgtagtcgaatgctgttgaacgatataaaagatcaaaatcagtattttgctccaatttgaagtgttttgtttttaaaatacttgtttgagtctcattttttattattatggattaatattgttatgttactctggtccatgtgttaaacaaaggtgaatgcagctaaataattgccaatttaattttttttaaatttagtggtccctataatcgacccaactaataagaactcatagaaaaaaaaatcatataaaaatgtaaaactttttatagtactagatcagagccctaaaaatcataatgttcctaaaatccctaaaaatcataccaaaaagctgaattttacggagaatgttaatttcgaaacacatgcatcgttgaagatgcagaaagtttgccactcctaccccgagatgccccctaaaacctcgctcgcaggaggaaacggaaacatggatttaccaaagaatctgaacgccgtagaaaaaaaagaatgtgtgtgtactttgtacgcacgtaagaagttatacttctaatatatgatttcaacgaaatcaatataacagtttatttatgttttatttaaatattaaactaattttaatatgtacttactacttgccaacaattttttattaaaacaataagaaaaattaaaaaaaataaaagaataaaacacacgcaaacacattgaaaaatgaaaccaaagaaattatttctgaacaattgtgagaaaattttaactaaatacgtattttctgaaaaaaaaatgtgtgtgtactttgtacgcacgtaagaagatattcttctattatataataggtaatttaaacgaagtaaatatacttaaaaggttattttttattttatttaaaaatcaaactaactttcttatctaccactttcaaaaatttttattaaaataacgaaaaataaaaaaaaagtatgaatcgtccaggattagaacccgcgaccttccgtgtgcttccgttctctgttccaccgctctgccaactacgccatcgagccacttgaattgacacgtaagtttcggatataattacacaacacggcgacaaactgtaaaaaatgttatgcctacatattttattattttactacagggaaacacaaatccaaaaacacaagaattataataaataatacatttcctaaaaccactaatatattcttttaatgacttatttgcacggttacagatacatacatacctatcttgaaagattagcaatgaactacatactgtcagaactacatactgtcagtgtgcgcaggcg

SEQ ID NO: 1719 - DNA, 1307 bp, Diabrotica virgifera
  SmartBlast Evalue=4E-13; Info=Autophagy-related protein 3 n=2 Tax=Formicidae RepID=E2AIM5_9HYME
cgagactgtgatggaaggtggtggagagttaggagtgcatatgtatttaattattttcttaaaattcatgcagtcggttatacctactatcgaatacgattacacgcaaaattttaccatgtaaagctgatatttttatttgacaccgtagtcgaatgctgttgaacgatataaaagatcaaaatcagtattttgctccaatttgaagtgttttgtttttaaaatacttgtttgagtctcattttttattattatggattaatattgttatgttactctggtccatgtgttaaacaaaggtgaatgcagctaaataattgccaatttaattttttttaaatttagtggtccctataatcgacccaactaataagaactcatagaaaaaaaaatcatataaaaatgtaaaactttttatagtactagatcagagccctaaaaatcataatgttcctaaaatccctaaaaatcataccaaaaagctgaattttacggagaatgttaatttcgaaacacatgcatcgttgaagatgcagaaagtttgccactcctaccccgagatgccccctaaaacctcgctcgcaggaggaaacggaaacatggatttaccaaagaatctgaacgccgtagaaaaaaaagaatgtgtgtgtactttgtacgcacgtaagaagttatacttctaatatatgatttcaacgaaatcaatataacagtttatttatgttttatttaaatattaaactaattttaatatgtacttactacttgccaacaattttttattaaaacaataagaaaaattaaaaaaaataaaagaataaaacacacgcaaacacattgaaaaatgaaaccaaagaaattatttctgaacaattgtgagaaaattttaactaaatacgtattttctgaaaaaaaaatgtgtgtgtactttgtacgcacgtaagaagatattcttctattatataataggtaatttaaacgaagtaaatatacttaaaaggttattttttattttatttaaaaatcaaactaactttcttatctaccactttcaaaaatttttattaaaataacgaaaaataaaaaaaaagtatgaatcgtccaggattggaacccgcgaccggtgcgaccttccaatcactgacccaacgctctaccaactacgccacgagcttctttaagtgacacgtaagtttcggatataattacacaacacggtgacaaatagacatataaaaatgttatacctacataatattttattatcttactacagagaaagacaaatccaaaaattataataaata

SEQ ID NO: 1720 - DNA, 2285 bp, Diabrotica virgifera
ggctgtatggtgcattagacgttctacaatatttagtagaagaatgtaaaatgaaggttaacttttctgataaaaatgggaatttaccggctcatctcgcagctaaaagtaataaagttgagattttaagatagcttaaatcaattggaaatgatttaaatcaattcaatcataaaggagagactcttgtgtacatagcagttgaagctgatgcggttgatgttttaaatttcttagaaatgaatgtaaattttctttaaattaaaacttatgtgattaacctggatatgatgataatgctgctcgtaataatgttagaagttagggtgcattcttttactttctttgcctttagtacgttctttaacggtaaaatattgcaaaacctctaaattttaaagaaccgtttggattggaatgatatttggcatacacatggctaacaagtcaaagaaggagtgatattgtgccggtgtggacttttgtcctgggggtgagtttaccgcctcctcggggatgaaaggatatacttccaaataagtccggaattcgataggctgactgattctaagcatcttttgttctatatagtgtttttaccaagtccatactttcgagttatttgtgagcgactatgttcattttttaacaaaataaccacgtttttagacagtttttcgcaaataactcaaaccgtagatattttggcgaaaaaaaaatattcttagcaaaaggtatagcctgtaaaaagtaaaaaaaaatgtgtaagtattagatatttagacatagtaaaagcagacattacttagctaattaaataggttcatattcgtcaagttccaaatctaatattttaatgttgttctgaagctatttccttgtggcatctttacaattaactatttttcgaaattattattgaaatgttaaataaaattattttttcaaaagtgtttaaaaaagttttatttctgttgaatagaaaaatttctaacataaaagaaaacaagttacgctaaaaatgaagttgggccctttttgttggtaaaaaaatcgggaaaatctccctataattagcatcttaaattaacttattcgttaccatttcacatgttactttactggcatatgtattgtttatacgatctgtaagtttcatcggttcaaagttcttatttttggaagggctctaataaaaggggcttcaacaagtcactaatcacgagtgtatacaaatttagaaacaccaaatcttagccaatatttgtattatagaaaaacaaaaaaaaaaagaatgtgtgtgtactttgtacgcacgtaagaagatattcttctattatataataggtaatttaaacgaagtaaatatacttaaaaggttattttttattttatttaaaaatcaaactaactttcttatctaccactttcaaaaaagaagaatatcttcaaaaattatataataatatacttacaatcataaaatctataaaaaaaaataaaaaaataataacttgcttggggcttgaacccacttcacgtctaccgcgccgtacgaaagttgacgccatttcaaactgcaccaaactctcgtatacgtcatgtgggaatatacacaaactaaacgtttacaccataaatttatatgaatttaataaaattattagtttgatttttgtcgaaataaaatacaacaaaatatagagtaagaaaacgatatatgagatgaagatttgtagaaagtttgttcgtaatcagattatgtaaattaaagcattgcctactaataggtaactacattattttgtttacattttccaaatagataggtattgaaactattaggtatttccaactgaaacatttagaattacgtacctgcggcttttcaaaactatttaaaaagtcactataattataaatttgattttatttctgtccacacatcaataaaaactaatattatacaatatttttgtttaccgataacctccatattgaacaattattgacagatcatttcaaaatttcaacacccaatcagagcccgtataacactaataccatactgtcggtgtgcgcatgcgcgcggatcaatcaaattttaccctcaatcgattcgccgctaaagaagaatatcttcaaaaacgatcgagatgatagaaaacagttccagctagctaattgagctaatagtaactcactggtcaccagccggtggccaatcggttccaacaattgagttggaaccaactggagtcttgcagcgaactaagctaatggac

SEQ ID NO: 1721 - DNA, 2268 bp, Diabrotica virgifera
ggctgtatggtgcattagacgttctacaatatttagtagaagaatgtaaaatgaaggttaacttttctgataaaaatgggaatttaccggctcatctcgcagctaaaagtaataaagttgagattttaagatagcttaaatcaattggaaatgatttaaatcaattcaatcataaaggagagactcttgtgtacatagcagttgaagctgatgcggttgatgttttaaatttcttagaaatgaatgtaaattttctttaaattaaaacttatgtgattaacctggatatgatgataatgctgctcgtaataatgttagaagttagggtgcattcttttactttctttgcctttagtacgttctttaacggtaaaatattgcaaaacctctaaattttaaagaaccgtttggattggaatgatatttggcatacacatggctaacaagtcaaagaaggagtgatattgtgccggtgtggacttttgtcctgggggtgagtttaccgcctcctcggggatgaaaggatatacttccaaataagtccggaattcgataggctgactgattctaagcatcttttgttctatatagtgtttttaccaagtccatactttcgagttatttgtgagcgactatgttcattttttaacaaaataaccacgtttttagacagtttttcgcaaataactcaaaccgtagatattttggcgaaaaaaaaatattcttagcaaaaggtatagcctgtaaaaagtaaaaaaaaatgtgtaagtattagatatttagacatagtaaaagcagacattacttagctaattaaataggttcatattcgtcaagttccaaatctaatattttaatgttgttctgaagctatttccttgtggcatctttacaattaactatttttcgaaattattattgaaatgttaaataaaattattttttcaaaagtgtttaaaaaagttttatttctgttgaatagaaaaatttctaacataaaagaaaacaagttacgctaaaaatgaagttgggccctttttgttggtaaaaaaatcgggaaaatctccctataattagcatcttaaattaacttattcgttaccatttcacatgttactttactggcatatgtattgtttatacgatctgtaagtttcatcggttcaaagttcttatttttggaagggctctaataaaaggggcttcaacaagtcactaatcacgagtgtatacaaatttagaaacaccaaatcttagccaatatttgtattatagaaaaacaaaaaaaaaaagaatgtgtgtgtactttgtacgcacgtaagaagatattcttctattatataataggtaatttaaacgaagtaaatatacttaaaaggttattttttattttatttaaaaatcaaactaactttcttatctaccactttcaaaaaagaagaatatcttcaaaaattatataataatatacttacaatcataaaatctataaaaaaaaataaaaaaataataacttgcttggggcttgaacccacttcacgtctaccgcgccgtacgaaagttgacgccatttcaaactgcaccaaactctcgtatacgtcatgtgggaatatacacaaactaaacgtttacaccataaatttatatgaatttaataaaattattagtttgatttttgtcgaaataaaatacaacaaaatatagagtaagaaaacgatatatgagatgaagatttgtagaaagtttgttcgtaatcagattatgtaaattaaagcattgcctactaataggtaactacattattttgtttacattttccaaatagataggtattgaaactattaggtatttccaactgaaacatttagaattacgtacctgcggcttttcaaaactatttaaaaagtcactataattataaatttgattttatttctgtccacacatcaataaaaactaatattatacaatatttttgtttaccgataacctccatattgaacaattattgacagatcatttcaaaatttcaacacccaatcagagcccgtataacactaataccatactgtcggtgtgcgcatgcgcgcggatcaatcaaattttaccctcaatcgattcgccgctaaagaagaatatcttcaaaaaaatgtgaaactgttgacagtataaacatctagttaaatctgtatctggaatttcaaaatgatttaaactatactgaagaataaaaagataaaaatggtatttctggaataaaataagaag

SEQ ID NO: 1722 - DNA, 2120 bp, Diabrotica virgifera
ggctgtatggtgcattagacgttctacaatatttagtagaagaatgtaaaatgaaggttaacttttctgataaaaatgggaatttaccggctcatctcgcagctaaaagtaataaagttgagattttaagatagcttaaatcaattggaaatgatttaaatcaattcaatcataaaggagagactcttgtgtacatagcagttgaagctgatgcggttgatgttttaaatttcttagaaatgaatgtaaattttctttaaattaaaacttatgtgattaacctggatatgatgataatgctgctcgtaataatgttagaagttagggtgcattcttttactttctttgcctttagtacgttctttaacggtaaaatattgcaaaacctctaaattttaaagaaccgtttggattggaatgatatttggcatacacatggctaacaagtcaaagaaggagtgatattgtgccggtgtggacttttgtcctgggggtgagtttaccgcctcctcggggatgaaaggatatacttccaaataagtccggaattcgataggctgactgattctaagcatcttttgttctatatagtgtttttaccaagtccatactttcgagttatttgtgagcgactatgttcattttttaacaaaataaccacgtttttagacagtttttcgcaaataactcaaaccgtagatattttggcgaaaaaaaaatattcttagcaaaaggtatagcctgtaaaaagtaaaaaaaaatgtgtaagtattagatatttagacatagtaaaagcagacattacttagctaattaaataggttcatattcgtcaagttccaaatctaatattttaatgttgttctgaagctatttccttgtggcatctttacaattaactatttttcgaaattattattgaaatgttaaataaaattattttttcaaaagtgtttaaaaaagttttatttctgttgaatagaaaaatttctaacataaaagaaaacaagttacgctaaaaatgaagttgggccctttttgttggtaaaaaaatcgggaaaatctccctataattagcatcttaaattaacttattcgttaccatttcacatgttactttactggcatatgtattgtttatacgatctgtaagtttcatcggttcaaagttcttatttttggaagggctctaataaaaggggcttcaacaagtcactaatcacgagtgtatacaaatttagaaacaccaaatcttagccaatatttgtattatagaaaaacaaaaaaaaaaagaatgtgtgtgtactttgtacgcacgtaagaagatattcttctattatataataggtaatttaaacgaagtaaatatacttaaaaggttattttttattttatttaaaaatcaaactaactttcttatctaccactttcaaaaaagaagaatatcttcaaaaattatataataatatacttacaatcataaaatctataaaaaaaaataaaaaaataataacttgcttggggcttgaacccacttcacgtctaccgcgccgtacgaaagttgacgccatttcaaactgcaccaaactctcgtatacgtcatgtgggaatatacacaaactaaacgtttacaccataaatttatatgaatttaataaaattattagtttgatttttgtcgaaataaaatacaacaaaatatagagtaagaaaacgatatatgagatgaagatttgtagaaagtttgttcgtaatcagattatgtaaattaaagcattgcctactaataggtaactacattatttttttttacattttccaaatagataggtatgaaggtaattttttattggaatacaactgaaacatttagaattacgtacctgcggcttttcaaaactatttaaaaagtcactataattataaatttgatttatttctgtcctcacaacaataaaaactaatatatacaatattttgtttaccgataacctccatattgaacaattattgacagatcatttcaacacccaatcagagcccgtataacgactaataccatactatcggtgtgcgcatgcgcacagattaatacaatttcaccctcaatgaaatcgcgc

SEQ ID NO: 1723 - DNA, 1907 bp, Diabrotica virgifera
  SmartBlast Evalue=7E-13; Info=Autophagy-related protein 3 n=2 Tax=Formicidae RepID=E2AIM5_9HYME
cgagactgtgatggaaggtggtggagagttaggagtgcatatgtatttaattattttcttaaaattcatgcagtcggttatacctactatcgaatacgattacacgcaaaattttaccatgtaaagctgatatttttatttgacaccgtagtcgaatgctgttgaacgatataaaagatcaaaatcagtattttgctccaatttgaagtgttttgtttttaaaatacttgtttgagtctcattttttattattatggattaatattgttatgttactctggtccatgtgttaaacaaaggtgaatgcagctaaataattgccaatttaattttttttaaatttagtggtccctataatcgacccaactaataagaactcatagaaaaaaaaatcatataaaaatgtaaaactttttatagtactagatcagagccctaaaaatcataatgttcctaaaatccctaaaaatcataccaaaaagctgaattttacggagaatgttaatttcgaaacacatgcatcgttgaagatgcagaaagtttgccactcctaccccgagatgccccctaaaacctcgctcgcaggaggaaacggaaacatggatttaccaaagaatctgaacgccgtagaaaaaaaagaatgtgtgtgtactttgtacgcacgtaagaagttatacttctaatatatgatttcaacgaaatcaatataacagtttatttatgttttatttaaatattaaactaattttaatatgtacttactacttgccaacaattttttattaaaacaataagaaaaattaaaaaaaataaaagaataaaacacacgcaaacacattgaaaaatgaaaccaaagaaattatttctgaacaattgtgagaaaattttaactaaatacgtattttctgaaaaaaaaatgtgtgtgtactttgtacgcacgtaagaagatattcttctattatataataggtaatttaaacgaagtaaatatacttaaaaggttattttttattttatttaaaaatcaaactaactttcttatctaccactttcaaaaaagaagaatatcttcaaaaattatataataatatacttacaatcataaaatctataaaaaaaaataaaaaaataataacttgcttggggcttgaacccacttcacgtctaccgcgccgtacgaaagttgacgccatttcaaactgcaccaaactctcgtatacgtcatgtgggaatatacacaaactaaacgtttacaccataaatttatatgaatttaataaaattattagtttgatttttgtcgaaataaaatacaacaaaatatagagtaagaaaacgatatatgagatgaagatttgtagaaagtttgttcgtaatcagattatgtaaattaaagcattgcctactaataggtaactacattattttgtttacattttccaaatagataggtattgaaactattaggtatttccaactgaaacatttagaattacgtacctgcggcttttcaaaactatttaaaaagtcactataattataaatttgattttatttctgtccacacatcaataaaaactaatattatacaatatttttgtttaccgataacctccatattgaacaattattgacagatcatttcaaaatttcaacacccaatcagagcccgtataacactaataccatactgtcggtgtgcgcatgcgcgcggatcaatcaaattttaccctcaatcgattcgccgctaaagaagaatatcttcaaaaacgatcgagatgatagaaaacagttccagctagctaattgagctaatagtaactcactggtcaccagccggtggccaatcggttccaacaattgagttggaaccaactggagtcttgcagcgaactaagctaatggac

SEQ ID NO: 1724 - DNA, 1890 bp, Diabrotica virgifera
  SmartBlast Evalue=7E-13; Info=Autophagy-related protein 3 n=2 Tax=Formicidae RepID=E2AIM5_9HYME
cgagactgtgatggaaggtggtggagagttaggagtgcatatgtatttaattattttcttaaaattcatgcagtcggttatacctactatcgaatacgattacacgcaaaattttaccatgtaaagctgatatttttatttgacaccgtagtcgaatgctgttgaacgatataaaagatcaaaatcagtattttgctccaatttgaagtgttttgtttttaaaatacttgtttgagtctcattttttattattatggattaatattgttatgttactctggtccatgtgttaaacaaaggtgaatgcagctaaataattgccaatttaattttttttaaatttagtggtccctataatcgacccaactaataagaactcatagaaaaaaaaatcatataaaaatgtaaaactttttatagtactagatcagagccctaaaaatcataatgttcctaaaatccctaaaaatcataccaaaaagctgaattttacggagaatgttaatttcgaaacacatgcatcgttgaagatgcagaaagtttgccactcctaccccgagatgccccctaaaacctcgctcgcaggaggaaacggaaacatggatttaccaaagaatctgaacgccgtagaaaaaaaagaatgtgtgtgtactttgtacgcacgtaagaagttatacttctaatatatgatttcaacgaaatcaatataacagtttatttatgttttatttaaatattaaactaattttaatatgtacttactacttgccaacaattttttattaaaacaataagaaaaattaaaaaaaataaaagaataaaacacacgcaaacacattgaaaaatgaaaccaaagaaattatttctgaacaattgtgagaaaattttaactaaatacgtattttctgaaaaaaaaatgtgtgtgtactttgtacgcacgtaagaagatattcttctattatataataggtaatttaaacgaagtaaatatacttaaaaggttattttttattttatttaaaaatcaaactaactttcttatctaccactttcaaaaaagaagaatatcttcaaaaattatataataatatacttacaatcataaaatctataaaaaaaaataaaaaaataataacttgcttggggcttgaacccacttcacgtctaccgcgccgtacgaaagttgacgccatttcaaactgcaccaaactctcgtatacgtcatgtgggaatatacacaaactaaacgtttacaccataaatttatatgaatttaataaaattattagtttgatttttgtcgaaataaaatacaacaaaatatagagtaagaaaacgatatatgagatgaagatttgtagaaagtttgttcgtaatcagattatgtaaattaaagcattgcctactaataggtaactacattattttgtttacattttccaaatagataggtattgaaactattaggtatttccaactgaaacatttagaattacgtacctgcggcttttcaaaactatttaaaaagtcactataattataaatttgattttatttctgtccacacatcaataaaaactaatattatacaatatttttgtttaccgataacctccatattgaacaattattgacagatcatttcaaaatttcaacacccaatcagagcccgtataacactaataccatactgtcggtgtgcgcatgcgcgcggatcaatcaaattttaccctcaatcgattcgccgctaaagaagaatatcttcaaaaaaatgtgaaactgttgacagtataaacatctagttaaatctgtatctggaatttcaaaatgatttaaactatactgaagaataaaaagataaaaatggtatttctggaataaaataagaag

SEQ ID NO: 1725 - DNA, 1827 bp, Diabrotica virgifera
ggctgtatggtgcattagacgttctacaatatttagtagaagaatgtaaaatgaaggttaacttttctgataaaaatgggaatttaccggctcatctcgcagctaaaagtaataaagttgagattttaagatagcttaaatcaattggaaatgatttaaatcaattcaatcataaaggagagactcttgtgtacatagcagttgaagctgatgcggttgatgttttaaatttcttagaaatgaatgtaaattttctttaaattaaaacttatgtgattaacctggatatgatgataatgctgctcgtaataatgttagaagttagggtgcattcttttactttctttgcctttagtacgttctttaacggtaaaatattgcaaaacctctaaattttaaagaaccgtttggattggaatgatatttggcatacacatggctaacaagtcaaagaaggagtgatattgtgccggtgtggacttttgtcctgggggtgagtttaccgcctcctcggggatgaaaggatatacttccaaataagtccggaattcgataggctgactgattctaagcatcttttgttctatatagtgtttttaccaagtccatactttcgagttatttgtgagcgactatgttcattttttaacaaaataaccacgtttttagacagtttttcgcaaataactcaaaccgtagatattttggcgaaaaaaaaatattcttagcaaaaggtatagcctgtaaaaagtaaaaaaaaatgtgtaagtattagatatttagacatagtaaaagcagacattacttagctaattaaataggttcatattcgtcaagttccaaatctaatattttaatgttgttctgaagctatttccttgtggcatctttacaattaactatttttcgaaattattattgaaatgttaaataaaattattttttcaaaagtgtttaaaaaagttttatttctgttgaatagaaaaatttctaacataaaagaaaacaagttacgctaaaaatgaagttgggccctttttgttggtaaaaaaatcgggaaaatctccctataattagcatcttaaattaacttattcgttaccatttcacatgttactttactggcatatgtattgtttatacgatctgtaagtttcatcggttcaaagttcttatttttggaagggctctaataaaaggggcttcaacaagtcactaatcacgagtgtatacaaatttagaaacaccaaatcttagccaatatttgtattatagaaaaacaaaaaaaaaaagaatgtgtgtgtactttgtacgcacgtaagaagatattcttctattatataataggtaatttaaacgaagtaaatatacttaaaaggttattttttattttatttaaaaatcaaactaactttcttatctaccactttcaaaaaattttattaaaacaaccaaaaataaaaaaaatatgaatcgcccaagaatttggaacccgcaaccttccaatctcattgctaatccattttccactactccagcgaggcgctagaaatagatatgtaagtttcggatataattacacaacacggcgacatatagtgtaaaaatgttatgcttacataatattttattattttactacagactacagggaaacaaaaatccaaaaacacaaaaattataataaataatacatttcctaaaaccactaatatattcttttaatggcttatttgcacggttacaggtacatacatacctatcttgaaagattagcaatgaactgcatactgtcagaactacatactgtcagtgtgcgcaggcgcg

SEQ ID NO: 1726 - DNA, 1823 bp, Diabrotica virgifera
ggctgtatggtgcattagacgttctacaatatttagtagaagaatgtaaaatgaaggttaacttttctgataaaaatgggaatttaccggctcatctcgcagctaaaagtaataaagttgagattttaagatagcttaaatcaattggaaatgatttaaatcaattcaatcataaaggagagactcttgtgtacatagcagttgaagctgatgcggttgatgttttaaatttcttagaaatgaatgtaaattttctttaaattaaaacttatgtgattaacctggatatgatgataatgctgctcgtaataatgttagaagttagggtgcattcttttactttctttgcctttagtacgttctttaacggtaaaatattgcaaaacctctaaattttaaagaaccgtttggattggaatgatatttggcatacacatggctaacaagtcaaagaaggagtgatattgtgccggtgtggacttttgtcctgggggtgagtttaccgcctcctcggggatgaaaggatatacttccaaataagtccggaattcgataggctgactgattctaagcatcttttgttctatatagtgtttttaccaagtccatactttcgagttatttgtgagcgactatgttcattttttaacaaaataaccacgtttttagacagtttttcgcaaataactcaaaccgtagatattttggcgaaaaaaaaatattcttagcaaaaggtatagcctgtaaaaagtaaaaaaaaatgtgtaagtattagatatttagacatagtaaaagcagacattacttagctaattaaataggttcatattcgtcaagttccaaatctaatattttaatgttgttctgaagctatttccttgtggcatctttacaattaactatttttcgaaattattattgaaatgttaaataaaattattttttcaaaagtgtttaaaaaagttttatttctgttgaatagaaaaatttctaacataaaagaaaacaagttacgctaaaaatgaagttgggccctttttgttggtaaaaaaatcgggaaaatctccctataattagcatcttaaattaacttattcgttaccatttcacatgttactttactggcatatgtattgtttatacgatctgtaagtttcatcggttcaaagttcttatttttggaagggctctaataaaaggggcttcaacaagtcactaatcacgagtgtatacaaatttagaaacaccaaatcttagccaatatttgtattatagaaaaacaaaaaaaaaaagaatgtgtgtgtactttgtacgcacgtaagaagatattcttctattatataataggtaatttaaacgaagtaaatatacttaaaaggttattttttattttatttaaaaatcaaactaactttcttatctaccactttcaaaaatttttattaaaataacgaaaaataaaaaaaaagtatgaatcgtccaggattagaacccgcgaccttccgtgtgcttccgttctctgttccaccgctctgccaactacgccatcgagccacttgaattgacacgtaagtttcggatataattacacaacacggcgacaaactgtaaaaaatgttatgcctacatattttattattttactacagggaaacacaaatccaaaaacacaagaattataataaataatacatttcctaaaaccactaatatattcttttaatgacttatttgcacggttacagatacatacatacctatcttgaaagattagcaatgaactacatactgtcagaactacatactgtcagtgtgcgcaggcg

SEQ ID NO: 1727 - DNA, 1742 bp, Diabrotica virgifera
  SmartBlast Evalue=6E-13; Info=Autophagy-related protein 3 n=2 Tax=Formicidae RepID=E2AIM5_9HYME
cgagactgtgatggaaggtggtggagagttaggagtgcatatgtatttaattattttcttaaaattcatgcagtcggttatacctactatcgaatacgattacacgcaaaattttaccatgtaaagctgatatttttatttgacaccgtagtcgaatgctgttgaacgatataaaagatcaaaatcagtattttgctccaatttgaagtgttttgtttttaaaatacttgtttgagtctcattttttattattatggattaatattgttatgttactctggtccatgtgttaaacaaaggtgaatgcagctaaataattgccaatttaattttttttaaatttagtggtccctataatcgacccaactaataagaactcatagaaaaaaaaatcatataaaaatgtaaaactttttatagtactagatcagagccctaaaaatcataatgttcctaaaatccctaaaaatcataccaaaaagctgaattttacggagaatgttaatttcgaaacacatgcatcgttgaagatgcagaaagtttgccactcctaccccgagatgccccctaaaacctcgctcgcaggaggaaacggaaacatggatttaccaaagaatctgaacgccgtagaaaaaaaagaatgtgtgtgtactttgtacgcacgtaagaagttatacttctaatatatgatttcaacgaaatcaatataacagtttatttatgttttatttaaatattaaactaattttaatatgtacttactacttgccaacaattttttattaaaacaataagaaaaattaaaaaaaataaaagaataaaacacacgcaaacacattgaaaaatgaaaccaaagaaattatttctgaacaattgtgagaaaattttaactaaatacgtattttctgaaaaaaaaatgtgtgtgtactttgtacgcacgtaagaagatattcttctattatataataggtaatttaaacgaagtaaatatacttaaaaggttattttttattttatttaaaaatcaaactaactttcttatctaccactttcaaaaaagaagaatatcttcaaaaattatataataatatacttacaatcataaaatctataaaaaaaaataaaaaaataataacttgcttggggcttgaacccacttcacgtctaccgcgccgtacgaaagttgacgccatttcaaactgcaccaaactctcgtatacgtcatgtgggaatatacacaaactaaacgtttacaccataaatttatatgaatttaataaaattattagtttgatttttgtcgaaataaaatacaacaaaatatagagtaagaaaacgatatatgagatgaagatttgtagaaagtttgttcgtaatcagattatgtaaattaaagcattgcctactaataggtaactacattatttttttttacattttccaaatagataggtatgaaggtaattttttattggaatacaactgaaacatttagaattacgtacctgcggcttttcaaaactatttaaaaagtcactataattataaatttgatttatttctgtcctcacaacaataaaaactaatatatacaatattttgtttaccgataacctccatattgaacaattattgacagatcatttcaacacccaatcagagcccgtataacgactaataccatactatcggtgtgcgcatgcgcacagattaatacaatttcaccctcaatgaaatcgcgc

SEQ ID NO: 1728 - DNA, 1685 bp, Diabrotica virgifera
ggctgtatggtgcattagacgttctacaatatttagtagaagaatgtaaaatgaaggttaacttttctgataaaaatgggaatttaccggctcatctcgcagctaaaagtaataaagttgagattttaagatagcttaaatcaattggaaatgatttaaatcaattcaatcataaaggagagactcttgtgtacatagcagttgaagctgatgcggttgatgttttaaatttcttagaaatgaatgtaaattttctttaaattaaaacttatgtgattaacctggatatgatgataatgctgctcgtaataatgttagaagttagggtgcattcttttactttctttgcctttagtacgttctttaacggtaaaatattgcaaaacctctaaattttaaagaaccgtttggattggaatgatatttggcatacacatggctaacaagtcaaagaaggagtgatattgtgccggtgtggacttttgtcctgggggtgagtttaccgcctcctcggggatgaaaggatatacttccaaataagtccggaattcgataggctgactgattctaagcatcttttgttctatatagtgtttttaccaagtccatactttcgagttatttgtgagcgactatgttcattttttaacaaaataaccacgtttttagacagtttttcgcaaataactcaaaccgtagatattttggcgaaaaaaaaatattcttagcaaaaggtatagcctgtaaaaagtaaaaaaaaatgtgtaagtattagatatttagacatagtaaaagcagacattacttagctaattaaataggttcatattcgtcaagttccaaatctaatattttaatgttgttctgaagctatttccttgtggcatctttacaattaactatttttcgaaattattattgaaatgttaaataaaattattttttcaaaagtgtttaaaaaagttttatttctgttgaatagaaaaatttctaacataaaagaaaacaagttacgctaaaaatgaagttgggccctttttgttggtaaaaaaatcgggaaaatctccctataattagcatcttaaattaacttattcgttaccatttcacatgttactttactggcatatgtattgtttatacgatctgtaagtttcatcggttcaaagttcttatttttggaagggctctaataaaaggggcttcaacaagtcactaatcacgagtgtatacaaatttagaaacaccaaatcttagccaatatttgtattatagaaaaacaaaaaaaaaaagaatgtgtgtgtactttgtacgcacgtaagaagatattcttctattatataataggtaatttaaacgaagtaaatatacttaaaaggttattttttattttatttaaaaatcaaactaactttcttatctaccactttcaaaaatttttattaaaataacgaaaaataaaaaaaaagtatgaatcgtccaggattggaacccgcgaccggtgcgaccttccaatcactgacccaacgctctaccaactacgccacgagcttctttaagtgacacgtaagtttcggatataattacacaacacggtgacaaatagacatataaaaatgttatacctacataatattttattatcttactacagagaaagacaaatccaaaaattataataaata

SEQ ID NO: 1729 - DNA, 714 bp, Diabrotica virgifera
aactaccttgtattgatcattggcacggtcatcgctgtcagtgtatgtcacctcaacttctatgtccgattttccgttgttggtaacagtgaatttctgagaattggaaagggttacatcattaggatcatacatcaaagcagggacggatgaacgtgagactaaattgaacctgtccaaacttgttggaataagaggaagagcagtttctgctttctcatcaatatttctaactaaatcctcaagatcttcaataacatctcctccttcagctctaaagactgcatcttcagtctggcttgtgttgataacttccaaaacggtagattggaactgagctgtgagttcaaaagactcagatgtattaggctgaacggttttgcgatggagctctagagtttgaacgggtgaggtacgcttcaactcaatatcgaaagcagcttttccaaggttagttacagtgtactttccaggatgttcattgcttccttcaacattttgactcaaaacagtgacagcagttcttgggcttaaagaaaagttttccaaaacggtcatttcagtttctgtttcatctgagtcaagaagttcttccatgttgttttccaagtcgtcaataacgtgaccacctttagcagaaaatgacacttcctgttcgtaactgttgttgctcactttcaacacgctttgttcaagattgtcctcaatatctat

SEQ ID NO: 1730 - DNA, 1014 bp, Diabrotica virgifera
tgttattgaagatcttgaggatttagttagaaatattgatgaaaaacaagaaactgctcttcctcttattccaacaaatttggagagcttcaatttagcctcacgttcatccgtcactgctttgatgtatgatcctaatgatgttaccctttccaaatctcttaaattcactgttaccaacaacggaaaatctgacatagaagttgaggtgatatacactgacagcgatgaccgtgccaatgatcaatacaaggtagttaaaccaaatgaaactgtagaaattgagcataagaaagacgctggggtaactctgttaaatgtattgaacagagattacacagaagtcgctattatcaccgccaagggtggaagagtagttagagacattgaaagaaaaatcaaacaacttatatctgatgaaaaatcaataatgttggtaaacaattaccatctagcacctgcatcatccgtagttgtcatgcatcaagttggtagatatagccgaagacccatgtacccagctggacatcgcaaactccaacatgttgtagttcgtagacttaaacaccaccctggacatacatcaggacgtcttgcaggtaaaccagcagcaccccgtccttctaaacaatcaggtagcccagcaggttcaggacgtcgtccattccgtcgtccatcttgcaggccaatgatacggccagcccatctttctagtcaaggtggtcaacatccagcacaacaaactcaagaacagcaccgtccagctcaacaacagcaccatcaaggtcctcaagttggacaatgcagaccagcgcgcagaccaagaatcgtcatgcgccctgctgctctacgtaaacccattgctcatgataaatacaccgtcgttaatcatggaactcaagctttgaccgctcagatcgttcacgttaaaggaggaaaccaggaagtggtccgcagtcaagttgtccaacccaacgaaacccaagagcttcttcttcaaggcgtaaatggatc

SEQ ID NO: 1731 - DNA, 767 bp, Diabrotica virgifera
aaaccaaatgaaactgtagaaattgagcataagaaagacgctggagtagctctgttacatatattgaacagagattacacagaagtagctattatcaccgccaagggtggaagagtagtacgagacattgagagaaaaatcaaacaacttatatctgatgaaaaatcagtaatgttggtaaacaattaccatctagcacctgcatcatccgtagttgtcatgcatcaagttggtagatatagccgaagacccatgtacccagctggacatcgcaaactccaacatgttgtagtgcgtagacttaaacaccatcctggacttacatcaggacgtcttgcaggtaaaccagcagtatctcgtccttgtaaacaatcaggtagcccggcaggttcaggacgtcgtccattccgtcgtccagcgtgcaggccaatgatacgaccagcccatctttcaggtcaaggtggtcaacatccagcgcaacaagagcaccaccaagctcaacaacagcagcgtccatctcaacaacagcaccatcaaggtcctcaagctggacaatgcagaccagcgcgcagaccaagaattgtcatgcgccccgctgctctacgtaaacccattgctcatgataaatacaccgtcgttaatcatggaactcatgctttgaccgcccagatcgttcacgttaaaggaggaaaccaggaagtggtccgcagtcaagttgtccaacccaacgaaacccaagagcttcttcttcaaggcgtaaatggatc

SEQ ID NO: 1732 - DNA, 789 bp, Diabrotica virgifera
gtggaggtaatacatctcaaaaaccaagatgatgctccacaatggtttgtagtccagccagaccaaaccactgagatagatattgaggacaatcttgaacaaagcgtgttgaaagtgagcaacaacagttacgaacaggaagtgtcattttctgctaaaggtggtcacgttattgacgacttggaaaacaacatggaagaacttcttgactcagacgaaacagaaactgaaatgaccgttttggaaaacttttctttaagtccaagaactgctgtcactgttttgagtcaaaatgttgaaggaagcaatgaacatcctggaaagtatactgtaactaaccatggcaaagctgctttcgatattgagttgaagcgtacctcacccgttcaaactctagagctccatcgcaaaaccgttcagcctaatacatctgagtcttttgaactcacagctcagttccaatctaccgttttggaagttatcaacacaagccagactgaagatgcagtctttagagctgaaggaggagatgttattgaagatcttgaggatttagttagaaatattgatgagaaagcagaaactggtcttcctcttatttcaacaagtttggacaggttcaatttagtctcacgttcatccgtcactgctttgatgtatgatcctaatgatgttaccctttccaattctcagaaattcactgttaccaacaacggaaaatcggacatagaagttgaggtgacatacactgacagcgatgaccgtgccaatgatcaatacaaggtagtt

SEQ ID NO: 1733 - DNA, 574 bp, Diabrotica virgifera
acaaaaagtatgtcgtcaccaatcacggaaaagctgatctttttgttgaggtaattcatctcaaaaaccaagatgatgctccacaatggtttgtagtccagccagaccaaaccactgagatagatattgaggacaatcttgaacaaagcgtattgaaagtgagcaacaacagttacgaacaggaagtgtcattttctgctaaaggtggtcacgttattgacgatttggaaaacaacatggaagaacttcttgattcagacgaaacagaaactgaaatgaccgttctggaaaacttttccttaagcccaagaactgctgttactgttttgagtcaaaatgttgaaggaaacaatgaacatcctggaaagtacactgtaactaaccttggaaaagttgctttcgatattgagttgaagcgtacctcacccgttcaaactctagagctccatcgcaaaaccgttcagcctaatacatctgagtcttttgaactcacagctcaattccaatctaccgttttggaagttatcaacacaagcaagactgaagatgcagtttttagagctgaaggaggaga

SEQ ID NO: 1734 - DNA, 2495 bp, Diabrotica virgifera
  SmartBlast Evalue=1E-178; Info=Proton-coupled amino acid transporter 4 n=1 Tax=Harpegnathos saltator RepID=E2BJJ1_9HYME
caggcgttgaaaattgtgaaactattcgagcgtgcgcagaaaaacgttaccatccaacagcaagaatcgtagaacacatccccaccatagaacgcgccgaattattctaggtttgaaaccacggcagaaatcgagtcgacagcgccaaccgtcgcattttgaattaagcttttggaggttcaagactgtgtttcagtgtttgtgattttattgccaaaaatgtctaagaaaaacggaaatacttcccttctacaacaaggggctgaaaagcctattatagcccaattagaccagaaaaagggtggtgttaacacagttattatgactaattttaagtgtgaccaaaaccaagttcctacacaatctgcaaatgggtccactgtacctttggtggacaccaggaaggctgatccagaagtcggagactatgatccgtttcaacacagggccaatctgccgcatccaacatcggacttggatacgctcatccatctgcttaaaggatgtttgggaagcggtattttagccatgccattagccttccaccacgccggcttattctttggtctcatatgtatgtttatcattggtataatttgcacctattgcgttcacatcttggtcaaaagtgcgcacgaaatctacaggcggcaaagggtatcagctctcggctttgccgaggtggcagaagctgctttcctcatcggacccaaaggtttccatccctgggctaagttcgccaaagccatgattaacttctttctggtggtagatctcatcggttgctgctgtgtgtatgtattattcgtggcaaagaacctcaagcaagtagtagatggttacaccgaggaagaataccactacgacgtcaggatatacatggcagccttgttaccgttcctaatctgcaccaatctcatcagaaatctcaaatatctcgcaccattgtccatggtcgctaatgttttagtagctgtaggccttggtattactttctattatatcttcaacggtctaccaccgctcagttccagacctcattttgctagtgtgtccactttgcctgccttcttcggcactgccattttcgctttggaaggtattggtgtagttatgcctttagagaataacatgaaaactccaggtcactttattggatgccccggcgtgctcaacatcggcatgtttttcgttgtgattctatacgcatctgttggattctttggatacttacgatatggagatgacgtcaaagttggaagtatcagcttgaatcttcccgacgaaccactggcccaatcagtgaaggtgatgatcgccgtagccatcttctgcacgtacgctctacagttctacgtccccatggagattatctggaaggcggtaaagaataactttaaccgaaaaacattggcagaatacagcatcagagccagtttagtaatcgtaacagtggtcatggcaattttaatccccaacttaggggccttcatctctttagtaggtgctgtatgcctgtccatgttgggccttatttttccaagtatcatcgaattagttactttctacgaagaccccggcttgggtcgtttcaactggcggttatggaaaaacatgtttttgatcatgttcggtctgttgggtttcgtaacgggaacctacgtcagtatacaggaaatcattcagggttgagccattctaccgtttttcagtatttctacagtcgacttcgcagggagtctcacatacaaagttggttttccgatccggctggaacccggttgtttcttcgaccagagattaccatttgcaatgggttcatctctttagatatcaacagaggaaacagtcggtgaagtagaggccgttttagaaataaatgaatggtttttaaactgttaatgagccttagtaaacgtacccatgtagacacagtgttagatacagactgtttagttttgaattagatataatatacccaactaaaagaagcgctaaaatctgcaacgttgtcgtcttactttttttactttttcgtgtctggatccgactacagtttttctgcccagtatcgggctacgtctacaccctttgtatttgcgagccataaatcatccaaggggcactgtgatgggcaaagtctgcatacactcggtggtccacgttttatatttccccacattcacaaagtgtgccgttctctgtcttgatgccccatttaatgaggttctgttttacaggggaaacacctgggcatatgcggttgagtatccgtcaggttctccagttcaggttcattccattaggtcgttttgatcgttttggtcgtttattccatacatgatgggctcgtcgtggctacccatcgggctagccctgaccccccaataccaagccgccaaccacaagcctcaactttcccaaaagaaaggatgtgattgtgtaaccgctggacacccactaaatgaagggacttaagcaaaaaataaataaaa

SEQ ID NO: 1735 - DNA, 10093 bp, Diabrotica virgifera
  SmartBlast Evalue=1E-177; Info=Proton-coupled amino acid transporter 4 n=1 Tax=Harpegnathos saltator RepID=E2BJJ1_9HYME
caggcgttgaaaattgtgaaactattcgagcgtgcgcagaaaaacgttaccatccaacagcaagaatcgtagaacacatccccaccatagaacgcgccgaattattctaggtttgaaaccacggcagaaatcgagtcgacagcgccaaccgtcgcattttgaattaagcttttggaggttcaagactgtgtttcagtgtttgtgattttattgccaaaaatgtctaagaaaaacggaaatacttcccttctacaacaaggggctgaaaagcctattatagcccaattagaccagaaaaagggtggtgttaacacagttattatgactaattttaagtgtgaccaaaaccaagttcctacacaatctgcaaatgggtccactgtacctttggtggacaccaggaaggctgatccagaagtcggagactatgatccgtttcaacacagggccaatctgccgcatccaacatcggacttggatacgctcatccatctgcttaaaggatgtttgggaagcggtattttagccatgccattagccttccaccacgccggcttattctttggtctcatatgtatgtttatcattggtataatttgcacctattgcgttcacatcttggtcaaaagtgcgcacgaaatctacaggcggcaaagggtatcagctctcggctttgccgaggtggcagaagctgctttcctcatcggacccaaaggtttccatccctgggctaagttcgccaaagccatgattaacttctttctggtggtagatctcatcggttgctgctgtgtgtatgtattattcgtggcaaagaacctcaagcaagtagtagatggttacaccgaggaagaataccactacgacgtcaggatatacatggcagccttgttaccgttcctaatctgcaccaatctcatcagaaatctcaaatatctcgcaccattgtccatggtcgctaatgttttagtagctgtaggccttggtattactttctattatatcttcaacggtctaccaccgctcagttccagacctcattttgctagtgtgtccactttgcctgccttcttcggcactgccattttcgctttggaaggtattggtgtagttatgcctttagagaataacatgaaaactccaggtcactttattggatgccccggcgtgctcaacatcggcatgtttttcgttgtgattctatacgcatctgttggattctttggatacttacgatatggagatgacgtcaaagttggaagtatcagcttgaatcttcccgacgaaccactggcccaatcagtgaaggtgatgatcgccgtagccatcttctgcacgtacgctctacagttctacgtccccatggagattatctggaaggcggtaaagaataactttaaccgaaaaacattggcagaatacagcatcagagccagtttagtaatcgtaacagtggtcatggcaattttaatccccaacttaggggccttcatctctttagtaggtgctgtatgcctgtccatgttgggccttatttttccaagtatcatcgaattagttactttctacgaagaccccggcttgggtcgtttcaactggcggttatggaaaaacatgtttttgatcatgttcggtctgttgggtttcgtaacgggaacctacgtcagtatacaggaaatcattcagggttgagccattctaccgtttttcagtatttctacagtcgacttcgcagggagtctcacatacaaagttggttttccgatccggctggaacccggttgtttcttcgaccagagattaccatttgcaatgggttcatctctttagatatcaacagaggaaacagtcggtgaagtagaggccgttttagaaataaatgaatggtttttaaactgttaatgagccttagtaaacgtacccatgtagacacagtgttagatacagactgtttagttttgaattagatataatatacccaactaaaagaagcgctaaaatctgcaacgttgtcgtcttactttttttactttttcgtgtctggatccgactacagtttttctgcccaatatcgggctacatctacaccctttgtatttgcgagccataaattatcgagggtgcactgtgattggcaaagtctgcatacactcggtggtccacgttttatatttccccacattcacaaagtgtgctgttctctatcttgatgccccatttaatgaggttctgttttacaggggaaacacctgggcgtatgcggttaggtaaaatggtaggtatagacacactataggatatacgcctaataccagttttaaagctatttacctgagttgttacgtggccaacagggaggggttgtaacaggacttttcctcaaccgcagatgatggacaagcctaggaaagacacatgacattagtccaagagtacaacaacgaccaaaacaattgattatagtataatcttctaaatactcacgtgtcccaagctgaggttatgtcacagtaactaattaaaacttttcatcagcttacaagatattactagctttaaagccgtcactggtacaagcccttcaaatgacgatgagttttcataaactcagctgaattatcgctgatgaatcggatttgcaaagttctccactttacaatggccgatgtcgtcaagccttaatcaaagagaccggatgtcaaccgcctttccttaatgtcattcgagttcatggcttacaacgaacatctgagcacggaaccacggttgatttagttatgtgacaagaacctatacaagggctgtgaatcagaaaaagatagcggtacacacatttctacgttctcagatattcctaaaacaactcaacaaacccattttgcaaacgaaccccattttgcgaagatgatgagctcgccgtagctacccatcgggctagccctgacctgaccccccaataccaagcccccaaccacaagcctcaactttcccaaaagaaaggatgtgattgtgtaaccgctggacacccactaaatgaagggccttaagcaaaaaataaataaaaaaaactaaaacaaacaactctctcccaggacatagaaggaagacacttaagtgtggtcagtcatcaagcaaccgaagaaatgacaatggaaacccccagactgaattggtacactgattcgaagaatggatagtaaatacaatcaggaagctcaagttgcacctcaggttactgctgccttgaggtctcgtgcaggagctctcaaatcagcctaaaaatctctaaagccacaacatcaacaacccaacaacatgccacaagcggaagtcaactcggcacaaccaaataaaacgtcttcaaccaagaaaaatgaatagacaaacagtgaatgaaattttaaagtaacgaaattgtgtcacgaacattcaacgaaaataaataatagaataatagaaaaaaaataattgaaagggtaaaatagaattaaggctatatactgttatatttttatggaaaatggtggacattttaaacactcatcttcagtcaaatacttccaacgacaagtcctttatatcgatcaaatctccgataaacataccagtttctcgcaagttttcatcaatccttagaaatatctgatggtagagaatcagtaggcatattgccaccaaattttgattcagaagcaaatttctttaattttactgatagatattcattatatatatccggggtgtcatatcggctgacgccgcatccccacacctaaccgccatctatttctatcctgggcatcttcctcttccaaatctcggtgttccatggccttccttatcgtgtcattccaggatagtcttggtcttccccttttcttcctacctgggggtttccatttcaggagtttctttggccatcgttggtcgtccattctaagtaagtgaccgaaccattttaggcttcttctctcgagcctgtctaccgctgtatcgtgtgcctgcatccttcttcttatttcttcgttacgtattctgtccaatcgggagattccagcgcttctacgtatgtagtccatttccacagcattgatccttcttctggactctgctgttaatgtccagcttcgcttccatacatgagtaccgattccacaaatgtcttccctattcttaattttgtagttctggatatatttttatcccaccacacggaattcaagcaacctactaccttcctactttgttcaactcgcctttgaatttctttgttgcctaggccttctctgtttattacagctcccagatatttgaattcttcaacctgtttaattgatgtgttctctgtaattaggatttcaaagtgggcgtcagaattcacgactagatattctgttttttctatatttatatttaatccccattttttgtaggttgaatacaggcgggttaacatgaattccatgtcatacgaatcttgtgccagtactgcttgatcgtcagcaaagtggatgttaaacaggcagtcatctctgatcatgattcccattagtccacaacttcttttccattcttttaaagcgacttccaagtatatgttaaatagcaacggtgataagctacaccctatagatattcattaagttttaaaaatattttttttgtaaaaatacaattttaatacaatataaaaatcaaacattgcatagtagccccatcaaagaaaaatctgaccccaaacaaaataaaggaaggatgaaaatttgggaataggtaattgaaattgtctattattatataagaaggaggtttacaattctacatccccttcattttacaaaaatggaggggagtaccccttctcgggggtgaaaaatatacattcaaaataagtccggaattggataaaaatgactaattctaagcaacttttgttctatagagttttttcaccaagtcaatacttttcgagttatttgcaagtgagtgtgttcatttttaacaggaaaaagacgtgtttttggacggtttttcgcaactggaaactgaaacagaagacctcaaatatgttgatcagcaagaccaaaacaaaaatcactccatccaagtcaagcgttaggattgtaaagcccatagaaaagaaagtagtggtatccaaaactcccaaagctgttacggccgagaagaaaggcttatccagtttgggcttcaaagcaggccctatgggtaataccaatgggtaatgagcaaagcgcagccaaagcggaattctttggaaaatagaagggaggtgatttatcaaaaaataaaagggaccaacgatgttttgaacgtaactcacttacttttaacgttagaagtttttttgaaaaacagaattaaacctttttttaaacactttaaaaaagttataatgagttttcctcgaaaagtgctaattttttggttatttcacgttgaactattcgatttggaatttgacgaataagaacctacttttcattagctacaactctgcttctactgggtctacagacttcatgcatacaccatttttgttactgtcttataagttatatttttgttaagaacatttttttcgataaaataatcctttttgagttatttgcgaaaaaacgtccaaaaacacgttttttttttttgttgggggtgaacatactcgctggcaaataattcgaaaagtattgacttggtgaagggattctgtagaacgaaggagttgcttagaataagtcattttattcagttccggacttatattttttcacccccgagaaaatatttttcactccgtatttcccaatttttggaaaatggagggaatgtagagttgtaaactttttcttataaatataatatcattcctagaaagtctttctggtacagtacacattaggcattagcgagttaggtcacttgtttaagaactgttcatttatttttaaaaacggcctcaactaagagccattgatggcagaatgtatttttacaggtcaattaccaactaatggccaaacatagaaggaaaaccaaaaattattatttatacatctaacatctatctaagcagtagcataaaacaataacaattcctaatattttaattacttttgtaaagaagtaataacgttgtgcttctatagaaaatgagggattatttaaatattggaacgattttgatagacaaaaaacgatagaacaaagtaatagtataatattcaatgagcatgcaatagccattacatgcgagtggaatactatactttttctacgacctttttttctattattagtagaaaaaatattgtattttaaaactcatcgttcgtttattgataaatataactaaactaaagtaattttttactagccgacctattaataagaatatcactttacttaacattttttgtattgcatagtctaagtgagaatccattgttttaagttacctatataaaaatcatatgttatataataattatcaactactcttcattaaaattaaaatttacaaaaacaaataatgttcgccaatagtacgcggctgaatagttggttgcctactattaggaggcgtataatattgccacagtgcaagtgtctcgaccgtgaagattattcttataaagacatccgtgaggatcaaatttaaagaatggaacgtaatagaacgcaagctcatgtaacgtaatgacagtctgtttcaaccttaatatctgtcacataggtcactaggctatatgattgattaaacccgtgagtaatgaaatattcctcacaggtaaagtaattggtgttattatctattcaaaaatagtgaataatgagcatgttattaaatggtcgtagaaaaaaataatataattcaaaacagtcatgacgttcaatcgatttatttgattgattatcgtatgttcgttaaaaatgttcaagttccacatgtttaaataattttctcaaaattctgcaaataaagtaaaatattagatctggatgcacagaaatcagtattaacacaaaaaagtacgtccgttgacgaaaaaaaaaagtattcacctgatccttattaagaaattatttatatatacttaaaaataaaggatctaagaaaacaagagctccctgtctaaggaaacgttaccactaaaatctatgtagacagctcttccaggaataaactattttagaaaaaagatttagtgggacgtttcactaccagtataataaataatctatatataaggactttagaaatgctgtgccgagtatacaaatgtagactgcagttaaaactgtgattttcaaaaaaagttttttacgtagttcttcggtgatttgtttaaaaaaaaactaatttactttcatcatttttccatttcataattttttatagtgagaacgtcatttatttatatattgtgattgtttagttggtaatttaagctcaaattatagtgtcttcgatcagtgttcatttcttctgtttttccataaccacaagttgtgtaatgtagaacttttagttaacatatataatatatacttatatatacttatttatatgagtcattttattgaaaacgtacctttattaaacatacgtgggtgatttcacgttaatctagactaagaaaacggacgattcttcttaatttacttcacttcgtaagccgtccagaaggcatcaaaccacttccttcgtggtctccctcttctttccttctcttattctactgcgtgcgtctcttaggacgtttctttcttttggcattcgtaaaacatctctcaaccatctagcagtctgtgccctgatatttgtgttactttgggtcgtttatatatccattagctcctggtttgtttttctgcgccattccccgtcagccttcattattcaaacaaaaactttagatctgcagaatctgacaatcccatctgcttcaagtgccaattgagcttacagtgccctgttaacagcccttctgtggctttgactgttttcttgtctttgcttattaggtctgccatatattttggtgaatgttctgtaatgaactgttccacctgtctttgtcctggtgaattcctccaccattccaaagatttgtaagctacctaccctcttgtagacgttcttactcgttcaacgaatgacattgacgagtcatgtttggtcatttggccatttttccattccaaaaacagcgtacctcgcgtttctggacaatcgagtggtatttgccttcttcaatggacttttgcatctttttcttcactgctttgactgttcattggacaggtatcatcgcacaaaatcttttgaattgcgttttaacgttgtaaaaaaattctccgaatccaacgctcttgtttgtttttggttgagagtgatcaaactcggctcaatttccttgaacagttcttatatgcttatcaatatgtttagagcctcttaacgattttgattctttgatctgatgtgatcacatcttggactctgggtcgtgacagtttgtgagactcttaaatctatcatcagacgacaacgaaaaaattctgttttccaaaatttcactattggttatgacggtgctctccgtaagtagtttagattaatgtcaattcaccctcacagattgatatattaaattttggctcgggataataataattaaattttgtgtgataaaatttatttttataaaaaataatataatacttaagcaatatactctaacagaatacctgattgttgtgattcatataaaaagtattttgttgtagcaaataggtgtattctggccaataaatctttagaatatatgaagttgttgcacataaagtaaaattgctagttttctaaaaatcataatattctaaaagatctattcaacttgaaatttaaaacttagacatacaaggaaatattttatagcagtattaaatttttttctcaaatactttgagaaaggagttattctaagtattaaaattttttctcgaatattttgagaaaggaattattctaggctaatatatttttgattttcaaaacaatactaccgaaaaatatctataagttctgtattaacagtctaaaagaataccacacatttcattcaatttttttttaaataaatgtgtgttactttagtttcttccattaaagacaaactggtatagttacaacacccagtgatttattttatatttttgacattgacatttgacattgatatttaacattgacatttgacatttataaaatgacaggaactgtttagttctacaactttgtgaacaggtatagtgatgattcggtagtattctttgttttaaatgtatctttatatttcagtagaaggtttgaacactaaacaagtgaacacagtaagaaaaacagtatttatagttccaaaggaactgtgtgacttggtgccttaatacctgaatctgggcttttctccagacgatggaaaagaagttgaaaacagggtttggtaacaaaaatctaaaggaagaatagttcatttgttccttaaaacacacagaatgcgtagattccaaaaaattcacaaattaacagctattttgatcttgattcacattcaattgacaatgttaagttttcttttaattagttcctagaaattgttaatcaaaatttacatttttttaataataacgtatctgtgtgtgacagtttagtttgaatggtttagatttttgaacaaatgttatttgcgtagttgccttttactatgaactcaaaatgcgacaaaatacgtcacttctaaagtaccaacttactgacaatccaccatgtatgtggaaagtgctaattatgaaaccaaatagctttgttcaaaaatatatactgtctgaatgtgatgaacgatggaaaattcatgtgccaagtgatttagagaattaaatagacaaccttagttttaattttttttagtattatttcgtaacttgtgcatggatttgaaatctgtccagaagtcagtagttcccaaaagaattttgttatggatattttatttgaatcgtttaaaagaaaata

SEQ ID NO: 1736 - DNA, 10067 bp, Diabrotica virgifera
  SmartBlast Evalue=1E-177; Info=Proton-coupled amino acid transporter 4 n=1 Tax=Harpegnathos saltator RepID=E2BJJ1_9HYME
caggcgttgaaaattgtgaaactattcgagcgtgcgcagaaaaacgttaccatccaacagcaagaatcgtagaacacatccccaccatagaacgcgccgaattattctaggtttgaaaccacggcagaaatcgagtcgacagcgccaaccgtcgcattttgaattaagcttttggaggttcaagactgtgtttcagtgtttgtgattttattgccaaaaatgtctaagaaaaacggaaatacttcccttctacaacaaggggctgaaaagcctattatagcccaattagaccagaaaaagggtggtgttaacacagttattatgactaattttaagtgtgaccaaaaccaagttcctacacaatctgcaaatgggtccactgtacctttggtggacaccaggaaggctgatccagaagtcggagactatgatccgtttcaacacagggccaatctgccgcatccaacatcggacttggatacgctcatccatctgcttaaaggatgtttgggaagcggtattttagccatgccattagccttccaccacgccggcttattctttggtctcatatgtatgtttatcattggtataatttgcacctattgcgttcacatcttggtcaaaagtgcgcacgaaatctacaggcggcaaagggtatcagctctcggctttgccgaggtggcagaagctgctttcctcatcggacccaaaggtttccatccctgggctaagttcgccaaagccatgattaacttctttctggtggtagatctcatcggttgctgctgtgtgtatgtattattcgtggcaaagaacctcaagcaagtagtagatggttacaccgaggaagaataccactacgacgtcaggatatacatggcagccttgttaccgttcctaatctgcaccaatctcatcagaaatctcaaatatctcgcaccattgtccatggtcgctaatgttttagtagctgtaggccttggtattactttctattatatcttcaacggtctaccaccgctcagttccagacctcattttgctagtgtgtccactttgcctgccttcttcggcactgccattttcgctttggaaggtattggtgtagttatgcctttagagaataacatgaaaactccaggtcactttattggatgccccggcgtgctcaacatcggcatgtttttcgttgtgattctatacgcatctgttggattctttggatacttacgatatggagatgacgtcaaagttggaagtatcagcttgaatcttcccgacgaaccactggcccaatcagtgaaggtgatgatcgccgtagccatcttctgcacgtacgctctacagttctacgtccccatggagattatctggaaggcggtaaagaataactttaaccgaaaaacattggcagaatacagcatcagagccagtttagtaatcgtaacagtggtcatggcaattttaatccccaacttaggggccttcatctctttagtaggtgctgtatgcctgtccatgttgggccttatttttccaagtatcatcgaattagttactttctacgaagaccccggcttgggtcgtttcaactggcggttatggaaaaacatgtttttgatcatgttcggtctgttgggtttcgtaacgggaacctacgtcagtatacaggaaatcattcagggttgagccattctaccgtttttcagtatttctacagtcgacttcgcagggagtctcacatacaaagttggttttccgatccggctggaacccggttgtttcttcgaccagagattaccatttgcaatgggttcatctctttagatatcaacagaggaaacagtcggtgaagtagaggccgttttagaaataaatgaatggtttttaaactgttaatgagccttagtaaacgtacccatgtagacacagtgttagatacagactgtttagttttgaattagatataatatacccaactaaaagaagcgctaaaatctgcaacgttgtcgtcttactttttttactttttcgtgtctggatccgactacagtttttctgcccaatatcgggctacatctacaccctttgtatttgcgagccataaattatcgagggtgcactgtgattggcaaagtctgcatacactcggtggtccacgttttatatttccccacattcacaaagtgtgctgttctctatcttgatgccccatttaatgaggttctgttttacaggggaaacacctgggcgtatgcggttaggtaaaatggtaggtatagacacactataggatatacgcctaataccagttttaaagctatttacctgagttgttacgtggccaacagggaggggttgtaacaggacttttcctcaaccgcagatgatggacaagcctaggaaagacacatgacattagtccaagagtacaacaacgaccaaaacaattgattatagtataatcttctaaatactcacgtgtcccaagctgaggttatgtcacagtaactaattaaaacttttcatcagcttacaagatattactagctttaaagccgtcactggtacaagcccttcaaatgacgatgagttttcataaactcagctgaattatcgctgatgaatcggatttgcaaagttctccactttacaatggccgatgtcgtcaagccttaatcaaagagaccggatgtcaaccgcctttccttaatgtcattcgagttcatggcttacaacgaacatctgagcacggaaccacggttgatttagttatgtgacaagaacctatacaagggctgtgaatcagaaaaagatagcggtacacacatttctacgttctcagatattcctaaaacaactcaacaaacccattttgcaaacgaaccccattttgcgaagatgatgagctcgccgtagctacccatcgggctagccctgacctgaccccccaataccaagcccccaaccacaagcctcaactttcccaaaagaaaggatgtgattgtgtaaccgctggacacccactaaatgaagggccttaagcaaaaaataaataaaaaaaactaaaacaaacaactctctcccaggacatagaaggaagacacttaagtgtggtcagtcatcaagcaaccgaagaaatgacaatggaaacccccagactgaattggtacactgattcgaagaatggatagtaaatacaatcaggaagctcaagttgcacctcaggttactgctgccttgaggtctcgtgcaggagctctcaaatcagcctaaaaatctctaaagccacaacatcaacaacccaacaacatgccacaagcggaagtcaactcggcacaaccaaataaaacgtcttcaaccaagaaaaatgaatagacaaacagtgaatgaaattttaaagtaacgaaattgtgtcacgaacattcaacgaaaataaataatagaataatagaaaaaaaataattgaaagggtaaaatagaattaaggctatatactgttatatttttatggaaaatggtggacattttaaacactcatcttcagtcaaatacttccaacgacaagtcctttatatcgatcaaatctccgataaacataccagtttctcgcaagttttcatcaatccttagaaatatctgatggtagagaatcagtaggcatattgccaccaaattttgattcagaagcaaatttctttaattttactgatagatattcattatatatatccggggtgtcatatcggctgacgccgcatccccacacctaaccgccatctatttctatcctgggcatcttcctcttccaaatctcggtgttccatggccttccttatcgtgtcattccaggatagtcttggtcttccccttttcttcctacctgggggtttccatttcaggagtttctttggccatcgttggtcgtccattctaagtaagtgaccgaaccattttaggcttcttctctcgagcctgtctaccgctgtatcgtgtgcctgcatccttcttcttatttcttcgttacgtattctgtccaatcgggagattccagcgcttctacgtatgtagtccatttccacagcattgatccttcttctggactctgctgttaatgtccagcttcgcttccatacatgagtaccgattccacaaatgtcttccctattcttaattttgtagttctggatatatttttatcccaccacacggaattcaagcaacctactaccttcctactttgttcaactcgcctttgaatttctttgttgcctaggccttctctgtttattacagctcccagatatttgaattcttcaacctgtttaattgatgtgttctctgtaattaggatttcaaagtgggcgtcagaattcacgactagatattctgttttttctatatttatatttaatccccattttttgtaggttgaatacaggcgggttaacatgaattccatgtcatacgaatcttgtgccagtactgcttgatcgtcagcaaagtggatgttaaacaggcagtcatctctgatcatgattcccattagtccacaacttcttttccattcttttaaagcgacttccaagtatatgttaaatagcaacggtgataagctacaccctatagatattcattaagttttaaaaatattttttttgtaaaaatacaattttaatacaatataaaaatcaaacattgcatagtagccccatcaaagaaaaatctgaccccaaacaaaataaaggaaggatgaaaatttgggaataggtaattgaaattgtctattattatataagaaggaggtttacaattctacatccccttcattttacaaaaatggaggggagtaccccttctcgggggtgaaaaatatacattcaaaataagtccggaattggataaaaatgactaattctaagcaacttttgttctatagagttttttcaccaagtcaatacttttcgagttatttgcaagtgagtgtgttcatttttaacaggaaaaagacgtgtttttggacggtttttcgcaactggaaactgaaacagaagacctcaaatatgttgatcagcaagaccaaaacaaaaatcactccatccaagtcaagcgttaggattgtaaagcccatagaaaagaaagtagtggtatccaaaactcccaaagctgttacggccgagaagaaaggcttatccagtttgggcttcaaagcaggccctatgggtaataccaatgggtaatgagcaaagcgcagccaaagcggaattctttggaaaatagaagggaggtgatttatcaaaaaataaaagggaccaacgatgttttgaacgtaactcacttacttttaacgttagaagtttttttgaaaaacagaattaaacctttttttaaacactttaaaaaagttataatgagttttcctcgaaaagtgctaattttttggttatttcacgttgaactattcgatttggaatttgacgaataagaacctacttttcattagctacaactctgcttctactgggtctacagacttcatgcatacaccatttttgttactgtcttataagttatatttttgttaagaacatttttttcgataaaataatcctttttgagttatttgcgaaaaaacgtccaaaaacacgttttttttttttgttgggggtgaacatactcgctggcaaataattcgaaaagtattgacttggtgaagggattctgtagaacgaaggagttgcttagaataagtcattttattcagttccggacttatattttttcacccccgagaaaatatttttcactccgtatttcccaatttttggaaaatggagggaatgtagagttgtaaactttttcttataaatataatatcattcctagaaagtctttctggtacagtacacattaggcattagcgagttaggtcacttgtttaagaactgttcatttatttttaaaaacggcctcaactaagagccattgatggcagaatgtatttttacaggtcaattaccaactaatggccaaacatagaaggaaaaccaaaaattattatttatacatctaacatctatctaagcagtagcataaaacaataacaattcctaatattttaattacttttgtaaagaagtaataacgttgtgcttctatagaaaatgagggattatttaaatattggaacgattttgatagacaaaaaacgatagaacaaagtaatagtataatattcaatgagcatgcaatagccattacatgcgagtggaatactatactttttctacgacctttttttctattattagtagaaaaaatattgtattttaaaactcatcgttcgtttattgataaatataactaaactaaagtaattttttactagccgacctattaataagaatatcactttacttaacattttttgtattgcatagtctaagtgagaatccattgttttaagttacctatataaaaatcatatgttatataataattatcaactactcttcattaaaattaaaatttacaaaaacaaataatgttcgccaatagtacgcggctgaatagttggttgcctactattaggaggcgtcgaccgtgaagattattcttataaagacatccgtgaggatcaaatttaaagaatggaacgtaatagaacgcaagctcatgtaacgtaatgacagtctgtttcaaccttaatatctgtcacataggtcactaggctatatgattgattaaacccgtgagtaatgaaatattcctcacaggtaaagtaattggtgttattatctattcaaaaatagtgaataatgagcatgttattaaatggtcgtagaaaaaaataatataattcaaaacagtcatgacgttcaatcgatttatttgattgattatcgtatgttcgttaaaaatgttcaagttccacatgtttaaataattttctcaaaattctgcaaataaagtaaaatattagatctggatgcacagaaatcagtattaacacaaaaaagtacgtccgttgacgaaaaaaaaaagtattcacctgatccttattaagaaattatttatatatacttaaaaataaaggatctaagaaaacaagagctccctgtctaaggaaacgttaccactaaaatctatgtagacagctcttccaggaataaactattttagaaaaaagatttagtgggacgtttcactaccagtataataaataatctatatataaggactttagaaatgctgtgccgagtatacaaatgtagactgcagttaaaactgtgattttcaaaaaaagttttttacgtagttcttcggtgatttgtttaaaaaaaaactaatttactttcatcatttttccatttcataattttttatagtgagaacgtcatttatttatatattgtgattgtttagttggtaatttaagctcaaattatagtgtcttcgatcagtgttcatttcttctgtttttccataaccacaagttgtgtaatgtagaacttttagttaacatatataatatatacttatatatacttatttatatgagtcattttattgaaaacgtacctttattaaacatacgtgggtgatttcacgttaatctagactaagaaaacggacgattcttcttaatttacttcacttcgtaagccgtccagaaggcatcaaaccacttccttcgtggtctccctcttctttccttctcttattctactgcgtgcgtctcttaggacgtttctttcttttggcattcgtaaaacatctctcaaccatctagcagtctgtgccctgatatttgtgttactttgggtcgtttatatatccattagctcctggtttgtttttctgcgccattccccgtcagccttcattattcaaacaaaaactttagatctgcagaatctgacaatcccatctgcttcaagtgccaattgagcttacagtgccctgttaacagcccttctgtggctttgactgttttcttgtctttgcttattaggtctgccatatattttggtgaatgttctgtaatgaactgttccacctgtctttgtcctggtgaattcctccaccattccaaagatttgtaagctacctaccctcttgtagacgttcttactcgttcaacgaatgacattgacgagtcatgtttggtcatttggccatttttccattccaaaaacagcgtacctcgcgtttctggacaatcgagtggtatttgccttcttcaatggacttttgcatctttttcttcactgctttgactgttcattggacaggtatcatcgcacaaaatcttttgaattgcgttttaacgttgtaaaaaaattctccgaatccaacgctcttgtttgtttttggttgagagtgatcaaactcggctcaatttccttgaacagttcttatatgcttatcaatatgtttagagcctcttaacgattttgattctttgatctgatgtgatcacatcttggactctgggtcgtgacagtttgtgagactcttaaatctatcatcagacgacaacgaaaaaattctgttttccaaaatttcactattggttatgacggtgctctccgtaagtagtttagattaatgtcaattcaccctcacagattgatatattaaattttggctcgggataataataattaaattttgtgtgataaaatttatttttataaaaaataatataatacttaagcaatatactctaacagaatacctgattgttgtgattcatataaaaagtattttgttgtagcaaataggtgtattctggccaataaatctttagaatatatgaagttgttgcacataaagtaaaattgctagttttctaaaaatcataatattctaaaagatctattcaacttgaaatttaaaacttagacatacaaggaaatattttatagcagtattaaatttttttctcaaatactttgagaaaggagttattctaagtattaaaattttttctcgaatattttgagaaaggaattattctaggctaatatatttttgattttcaaaacaatactaccgaaaaatatctataagttctgtattaacagtctaaaagaataccacacatttcattcaatttttttttaaataaatgtgtgttactttagtttcttccattaaagacaaactggtatagttacaacacccagtgatttattttatatttttgacattgacatttgacattgatatttaacattgacatttgacatttataaaatgacaggaactgtttagttctacaactttgtgaacaggtatagtgatgattcggtagtattctttgttttaaatgtatctttatatttcagtagaaggtttgaacactaaacaagtgaacacagtaagaaaaacagtatttatagttccaaaggaactgtgtgacttggtgccttaatacctgaatctgggcttttctccagacgatggaaaagaagttgaaaacagggtttggtaacaaaaatctaaaggaagaatagttcatttgttccttaaaacacacagaatgcgtagattccaaaaaattcacaaattaacagctattttgatcttgattcacattcaattgacaatgttaagttttcttttaattagttcctagaaattgttaatcaaaatttacatttttttaataataacgtatctgtgtgtgacagtttagtttgaatggtttagatttttgaacaaatgttatttgcgtagttgccttttactatgaactcaaaatgcgacaaaatacgtcacttctaaagtaccaacttactgacaatccaccatgtatgtggaaagtgctaattatgaaaccaaatagctttgttcaaaaatatatactgtctgaatgtgatgaacgatggaaaattcatgtgccaagtgatttagagaattaaatagacaaccttagttttaattttttttagtattatttcgtaacttgtgcatggatttgaaatctgtccagaagtcagtagttcccaaaagaattttgttatggatattttatttgaatcgtttaaaagaaaata

SEQ ID NO: 1737 - DNA, 9179 bp, Diabrotica virgifera
  SmartBlast Evalue=1E-177; Info=Proton-coupled amino acid transporter 4 n=1 Tax=Harpegnathos saltator RepID=E2BJJ1_9HYME
caggcgttgaaaattgtgaaactattcgagcgtgcgcagaaaaacgttaccatccaacagcaagaatcgtagaacacatccccaccatagaacgcgccgaattattctaggtttgaaaccacggcagaaatcgagtcgacagcgccaaccgtcgcattttgaattaagcttttggaggttcaagactgtgtttcagtgtttgtgattttattgccaaaaatgtctaagaaaaacggaaatacttcccttctacaacaaggggctgaaaagcctattatagcccaattagaccagaaaaagggtggtgttaacacagttattatgactaattttaagtgtgaccaaaaccaagttcctacacaatctgcaaatgggtccactgtacctttggtggacaccaggaaggctgatccagaagtcggagactatgatccgtttcaacacagggccaatctgccgcatccaacatcggacttggatacgctcatccatctgcttaaaggatgtttgggaagcggtattttagccatgccattagccttccaccacgccggcttattctttggtctcatatgtatgtttatcattggtataatttgcacctattgcgttcacatcttggtcaaaagtgcgcacgaaatctacaggcggcaaagggtatcagctctcggctttgccgaggtggcagaagctgctttcctcatcggacccaaaggtttccatccctgggctaagttcgccaaagccatgattaacttctttctggtggtagatctcatcggttgctgctgtgtgtatgtattattcgtggcaaagaacctcaagcaagtagtagatggttacaccgaggaagaataccactacgacgtcaggatatacatggcagccttgttaccgttcctaatctgcaccaatctcatcagaaatctcaaatatctcgcaccattgtccatggtcgctaatgttttagtagctgtaggccttggtattactttctattatatcttcaacggtctaccaccgctcagttccagacctcattttgctagtgtgtccactttgcctgccttcttcggcactgccattttcgctttggaaggtattggtgtagttatgcctttagagaataacatgaaaactccaggtcactttattggatgccccggcgtgctcaacatcggcatgtttttcgttgtgattctatacgcatctgttggattctttggatacttacgatatggagatgacgtcaaagttggaagtatcagcttgaatcttcccgacgaaccactggcccaatcagtgaaggtgatgatcgccgtagccatcttctgcacgtacgctctacagttctacgtccccatggagattatctggaaggcggtaaagaataactttaaccgaaaaacattggcagaatacagcatcagagccagtttagtaatcgtaacagtggtcatggcaattttaatccccaacttaggggccttcatctctttagtaggtgctgtatgcctgtccatgttgggccttatttttccaagtatcatcgaattagttactttctacgaagaccccggcttgggtcgtttcaactggcggttatggaaaaacatgtttttgatcatgttcggtctgttgggtttcgtaacgggaacctacgtcagtatacaggaaatcattcagggttgagccattctaccgtttttcagtatttctacagtcgacttcgcagggagtctcacatacaaagttggttttccgatccggctggaacccggttgtttcttcgaccagagattaccatttgcaatgggttcatctctttagatatcaacagaggaaacagtcggtgaagtagaggccgttttagaaataaatgaatggtttttaaactgttaatgagccttagtaaacgtacccatgtagacacagtgttagatacagactgtttagttttgaattagatataatatacccaactaaaagaagcgctaaaatctgcaacgttgtcgtcttactttttttactttttcgtgtctggatccgactacagtttttctgcccaatatcgggctacatctacaccctttgtatttgcgagccataaattatcgagggtgcactgtgattggcaaagtctgcatacactcggtggtccacgttttatatttccccacattcacaaagtgtgctgttctctatcttgatgccccatttaatgaggttctgttttacaggggaaacacctgggcgtatgcggttaggtaaaatggtaggtatagacacactataggatatacgcctaataccagttttaaagctatttacctgagttgttacgtggccaacagggaggggttgtaacaggacttttcctcaaccgcagatgatggacaagcctaggaaagacacatgacattagtccaagagtacaacaacgaccaaaacaattgattatagtataatcttctaaatactcacgtgtcccaagctgaggttatgtcacagtaactaattaaaacttttcatcagcttacaagatattactagctttaaagccgtcactggtacaagcccttcaaatgacgatgagttttcataaactcagctgaattatcgctgatgaatcggatttgcaaagttctccactttacaatggccgatgtcgtcaagccttaatcaaagagaccggatgtcaaccgcctttccttaatgtcattcgagttcatggcttacaacgaacatctgagcacggaaccacggttgatttagttatgtgacaagaacctatacaagggctgtgaatcagaaaaagatagcggtacacacatttctacgttctcagatattcctaaaacaactcaacaaacccattttgcaaacgaaccccattttgcgaagatgatgagctcgccgtagctacccatcgggctagccctgacctgaccccccaataccaagcccccaaccacaagcctcaactttcccaaaagaaaggatgtgattgtgtaaccgctggacacccactaaatgaagggccttaagcaaaaaataaataaaaaaaactaaaacaaacaactctctcccaggacatagaaggaagacacttaagtgtggtcagtcatcaagcaaccgaagaaatgacaatggaaacccccagactgaattggtacactgattcgaagaatggatagtaaatacaatcaggaagctcaagttgcacctcaggttactgctgccttgaggtctcgtgcaggagctctcaaatcagcctaaaaatctctaaagccacaacatcaacaacccaacaacatgccacaagcggaagtcaactcggcacaaccaaataaaacgtcttcaaccaagaaaaatgaatagacaaacagtgaatgaaattttaaagtaacgaaattgtgtcacgaacattcaacgaaaataaataatagaataatagaaaaaaaataattgaaagggtaaaatagaattaaggctatatactgttatatttttatggaaaatggtggacattttaaacactcatcttcagtcaaatacttccaacgacaagtcctttatatcgatcaaatctccgataaacataccagtttctcgcaagttttcatcaatccttagaaatatctgatggtagagaatcagtaggcatattgccaccaaattttgattcagaagcaaatttctttaattttactgatagatattcattaagttttaaaaatattttttttgtaaaaatacaattttaatacaatataaaaatcaaacattgcatagtagccccatcaaagaaaaatctgaccccaaacaaaataaaggaaggatgaaaatttgggaataggtaattgaaattgtctattattatataagaaggaggtttacaattctacatccccttcattttacaaaaatggaggggagtaccccttctcgggggtgaaaaatatacattcaaaataagtccggaattggataaaaatgactaattctaagcaacttttgttctatagagttttttcaccaagtcaatacttttcgagttatttgcaagtgagtgtgttcatttttaacaggaaaaagacgtgtttttggacggtttttcgcaactggaaactgaaacagaagacctcaaatatgttgatcagcaagaccaaaacaaaaatcactccatccaagtcaagcgttaggattgtaaagcccatagaaaagaaagtagtggtatccaaaactcccaaagctgttacggccgagaagaaaggcttatccagtttgggcttcaaagcaggccctatgggtaataccaatgggtaatgagcaaagcgcagccaaagcggaattctttggaaaatagaagggaggtgatttatcaaaaaataaaagggaccaacgatgttttgaacgtaactcacttacttttaacgttagaagtttttttgaaaaacagaattaaacctttttttaaacactttaaaaaagttataatgagttttcctcgaaaagtgctaattttttggttatttcacgttgaactattcgatttggaatttgacgaataagaacctacttttcattagctacaactctgcttctactgggtctacagacttcatgcatacaccatttttgttactgtcttataagttatatttttgttaagaacatttttttcgataaaataatcctttttgagttatttgcgaaaaaacgtccaaaaacacgttttttttttttgttgggggtgaacatactcgctggcaaataattcgaaaagtattgacttggtgaagggattctgtagaacgaaggagttgcttagaataagtcattttattcagttccggacttatattttttcacccccgagaaaatatttttcactccgtatttcccaatttttggaaaatggagggaatgtagagttgtaaactttttcttataaatataatatcattcctagaaagtctttctggtacagtacacattaggcattagcgagttaggtcacttgtttaagaactgttcatttatttttaaaaacggcctcaactaagagccattgatggcagaatgtatttttacaggtcaattaccaactaatggccaaacatagaaggaaaaccaaaaattattatttatacatctaacatctatctaagcagtagcataaaacaataacaattcctaatattttaattacttttgtaaagaagtaataacgttgtgcttctatagaaaatgagggattatttaaatattggaacgattttgatagacaaaaaacgatagaacaaagtaatagtataatattcaatgagcatgcaatagccattacatgcgagtggaatactatactttttctacgacctttttttctattattagtagaaaaaatattgtattttaaaactcatcgttcgtttattgataaatataactaaactaaagtaattttttactagccgacctattaataagaatatcactttacttaacattttttgtattgcatagtctaagtgagaatccattgttttaagttacctatataaaaatcatatgttatataataattatcaactactcttcattaaaattaaaatttacaaaaacaaataatgttcgccaatagtacgcggctgaatagttggttgcctactattaggaggcgtataatattgccacagtgcaagtgtctcgaccgtgaagattattcttataaagacatccgtgaggatcaaatttaaagaatggaacgtaatagaacgcaagctcatgtaacgtaatgacagtctgtttcaaccttaatatctgtcacataggtcactaggctatatgattgattaaacccgtgagtaatgaaatattcctcacaggtaaagtaattggtgttattatctattcaaaaatagtgaataatgagcatgttattaaatggtcgtagaaaaaaataatataattcaaaacagtcatgacgttcaatcgatttatttgattgattatcgtatgttcgttaaaaatgttcaagttccacatgtttaaataattttctcaaaattctgcaaataaagtaaaatattagatctggatgcacagaaatcagtattaacacaaaaaagtacgtccgttgacgaaaaaaaaaagtattcacctgatccttattaagaaattatttatatatacttaaaaataaaggatctaagaaaacaagagctccctgtctaaggaaacgttaccactaaaatctatgtagacagctcttccaggaataaactattttagaaaaaagatttagtgggacgtttcactaccagtataataaataatctatatataaggactttagaaatgctgtgccgagtatacaaatgtagactgcagttaaaactgtgattttcaaaaaaagttttttacgtagttcttcggtgatttgtttaaaaaaaaactaatttactttcatcatttttccatttcataattttttatagtgagaacgtcatttatttatatattgtgattgtttagttggtaatttaagctcaaattatagtgtcttcgatcagtgttcatttcttctgtttttccataaccacaagttgtgtaatgtagaacttttagttaacatatataatatatacttatatatacttatttatatgagtcattttattgaaaacgtacctttattaaacatacgtgggtgatttcacgttaatctagactaagaaaacggacgattcttcttaatttacttcacttcgtaagccgtccagaaggcatcaaaccacttccttcgtggtctccctcttctttccttctcttattctactgcgtgcgtctcttaggacgtttctttcttttggcattcgtaaaacatctctcaaccatctagcagtctgtgccctgatatttgtgttactttgggtcgtttatatatccattagctcctggtttgtttttctgcgccattccccgtcagccttcattattcaaacaaaaactttagatctgcagaatctgacaatcccatctgcttcaagtgccaattgagcttacagtgccctgttaacagcccttctgtggctttgactgttttcttgtctttgcttattaggtctgccatatattttggtgaatgttctgtaatgaactgttccacctgtctttgtcctggtgaattcctccaccattccaaagatttgtaagctacctaccctcttgtagacgttcttactcgttcaacgaatgacattgacgagtcatgtttggtcatttggccatttttccattccaaaaacagcgtacctcgcgtttctggacaatcgagtggtatttgccttcttcaatggacttttgcatctttttcttcactgctttgactgttcattggacaggtatcatcgcacaaaatcttttgaattgcgttttaacgttgtaaaaaaattctccgaatccaacgctcttgtttgtttttggttgagagtgatcaaactcggctcaatttccttgaacagttcttatatgcttatcaatatgtttagagcctcttaacgattttgattctttgatctgatgtgatcacatcttggactctgggtcgtgacagtttgtgagactcttaaatctatcatcagacgacaacgaaaaaattctgttttccaaaatttcactattggttatgacggtgctctccgtaagtagtttagattaatgtcaattcaccctcacagattgatatattaaattttggctcgggataataataattaaattttgtgtgataaaatttatttttataaaaaataatataatacttaagcaatatactctaacagaatacctgattgttgtgattcatataaaaagtattttgttgtagcaaataggtgtattctggccaataaatctttagaatatatgaagttgttgcacataaagtaaaattgctagttttctaaaaatcataatattctaaaagatctattcaacttgaaatttaaaacttagacatacaaggaaatattttatagcagtattaaatttttttctcaaatactttgagaaaggagttattctaagtattaaaattttttctcgaatattttgagaaaggaattattctaggctaatatatttttgattttcaaaacaatactaccgaaaaatatctataagttctgtattaacagtctaaaagaataccacacatttcattcaatttttttttaaataaatgtgtgttactttagtttcttccattaaagacaaactggtatagttacaacacccagtgatttattttatatttttgacattgacatttgacattgatatttaacattgacatttgacatttataaaatgacaggaactgtttagttctacaactttgtgaacaggtatagtgatgattcggtagtattctttgttttaaatgtatctttatatttcagtagaaggtttgaacactaaacaagtgaacacagtaagaaaaacagtatttatagttccaaaggaactgtgtgacttggtgccttaatacctgaatctgggcttttctccagacgatggaaaagaagttgaaaacagggtttggtaacaaaaatctaaaggaagaatagttcatttgttccttaaaacacacagaatgcgtagattccaaaaaattcacaaattaacagctattttgatcttgattcacattcaattgacaatgttaagttttcttttaattagttcctagaaattgttaatcaaaatttacatttttttaataataacgtatctgtgtgtgacagtttagtttgaatggtttagatttttgaacaaatgttatttgcgtagttgccttttactatgaactcaaaatgcgacaaaatacgtcacttctaaagtaccaacttactgacaatccaccatgtatgtggaaagtgctaattatgaaaccaaatagctttgttcaaaaatatatactgtctgaatgtgatgaacgatggaaaattcatgtgccaagtgatttagagaattaaatagacaaccttagttttaattttttttagtattatttcgtaacttgtgcatggatttgaaatctgtccagaagtcagtagttcccaaaagaattttgttatggatattttatttgaatcgtttaaaagaaaata

SEQ ID NO: 1738 - DNA, 9153 bp, Diabrotica virgifera
  SmartBlast Evalue=1E-177; Info=Proton-coupled amino acid transporter 4 n=1 Tax=Harpegnathos saltator RepID=E2BJJ1_9HYME
caggcgttgaaaattgtgaaactattcgagcgtgcgcagaaaaacgttaccatccaacagcaagaatcgtagaacacatccccaccatagaacgcgccgaattattctaggtttgaaaccacggcagaaatcgagtcgacagcgccaaccgtcgcattttgaattaagcttttggaggttcaagactgtgtttcagtgtttgtgattttattgccaaaaatgtctaagaaaaacggaaatacttcccttctacaacaaggggctgaaaagcctattatagcccaattagaccagaaaaagggtggtgttaacacagttattatgactaattttaagtgtgaccaaaaccaagttcctacacaatctgcaaatgggtccactgtacctttggtggacaccaggaaggctgatccagaagtcggagactatgatccgtttcaacacagggccaatctgccgcatccaacatcggacttggatacgctcatccatctgcttaaaggatgtttgggaagcggtattttagccatgccattagccttccaccacgccggcttattctttggtctcatatgtatgtttatcattggtataatttgcacctattgcgttcacatcttggtcaaaagtgcgcacgaaatctacaggcggcaaagggtatcagctctcggctttgccgaggtggcagaagctgctttcctcatcggacccaaaggtttccatccctgggctaagttcgccaaagccatgattaacttctttctggtggtagatctcatcggttgctgctgtgtgtatgtattattcgtggcaaagaacctcaagcaagtagtagatggttacaccgaggaagaataccactacgacgtcaggatatacatggcagccttgttaccgttcctaatctgcaccaatctcatcagaaatctcaaatatctcgcaccattgtccatggtcgctaatgttttagtagctgtaggccttggtattactttctattatatcttcaacggtctaccaccgctcagttccagacctcattttgctagtgtgtccactttgcctgccttcttcggcactgccattttcgctttggaaggtattggtgtagttatgcctttagagaataacatgaaaactccaggtcactttattggatgccccggcgtgctcaacatcggcatgtttttcgttgtgattctatacgcatctgttggattctttggatacttacgatatggagatgacgtcaaagttggaagtatcagcttgaatcttcccgacgaaccactggcccaatcagtgaaggtgatgatcgccgtagccatcttctgcacgtacgctctacagttctacgtccccatggagattatctggaaggcggtaaagaataactttaaccgaaaaacattggcagaatacagcatcagagccagtttagtaatcgtaacagtggtcatggcaattttaatccccaacttaggggccttcatctctttagtaggtgctgtatgcctgtccatgttgggccttatttttccaagtatcatcgaattagttactttctacgaagaccccggcttgggtcgtttcaactggcggttatggaaaaacatgtttttgatcatgttcggtctgttgggtttcgtaacgggaacctacgtcagtatacaggaaatcattcagggttgagccattctaccgtttttcagtatttctacagtcgacttcgcagggagtctcacatacaaagttggttttccgatccggctggaacccggttgtttcttcgaccagagattaccatttgcaatgggttcatctctttagatatcaacagaggaaacagtcggtgaagtagaggccgttttagaaataaatgaatggtttttaaactgttaatgagccttagtaaacgtacccatgtagacacagtgttagatacagactgtttagttttgaattagatataatatacccaactaaaagaagcgctaaaatctgcaacgttgtcgtcttactttttttactttttcgtgtctggatccgactacagtttttctgcccaatatcgggctacatctacaccctttgtatttgcgagccataaattatcgagggtgcactgtgattggcaaagtctgcatacactcggtggtccacgttttatatttccccacattcacaaagtgtgctgttctctatcttgatgccccatttaatgaggttctgttttacaggggaaacacctgggcgtatgcggttaggtaaaatggtaggtatagacacactataggatatacgcctaataccagttttaaagctatttacctgagttgttacgtggccaacagggaggggttgtaacaggacttttcctcaaccgcagatgatggacaagcctaggaaagacacatgacattagtccaagagtacaacaacgaccaaaacaattgattatagtataatcttctaaatactcacgtgtcccaagctgaggttatgtcacagtaactaattaaaacttttcatcagcttacaagatattactagctttaaagccgtcactggtacaagcccttcaaatgacgatgagttttcataaactcagctgaattatcgctgatgaatcggatttgcaaagttctccactttacaatggccgatgtcgtcaagccttaatcaaagagaccggatgtcaaccgcctttccttaatgtcattcgagttcatggcttacaacgaacatctgagcacggaaccacggttgatttagttatgtgacaagaacctatacaagggctgtgaatcagaaaaagatagcggtacacacatttctacgttctcagatattcctaaaacaactcaacaaacccattttgcaaacgaaccccattttgcgaagatgatgagctcgccgtagctacccatcgggctagccctgacctgaccccccaataccaagcccccaaccacaagcctcaactttcccaaaagaaaggatgtgattgtgtaaccgctggacacccactaaatgaagggccttaagcaaaaaataaataaaaaaaactaaaacaaacaactctctcccaggacatagaaggaagacacttaagtgtggtcagtcatcaagcaaccgaagaaatgacaatggaaacccccagactgaattggtacactgattcgaagaatggatagtaaatacaatcaggaagctcaagttgcacctcaggttactgctgccttgaggtctcgtgcaggagctctcaaatcagcctaaaaatctctaaagccacaacatcaacaacccaacaacatgccacaagcggaagtcaactcggcacaaccaaataaaacgtcttcaaccaagaaaaatgaatagacaaacagtgaatgaaattttaaagtaacgaaattgtgtcacgaacattcaacgaaaataaataatagaataatagaaaaaaaataattgaaagggtaaaatagaattaaggctatatactgttatatttttatggaaaatggtggacattttaaacactcatcttcagtcaaatacttccaacgacaagtcctttatatcgatcaaatctccgataaacataccagtttctcgcaagttttcatcaatccttagaaatatctgatggtagagaatcagtaggcatattgccaccaaattttgattcagaagcaaatttctttaattttactgatagatattcattaagttttaaaaatattttttttgtaaaaatacaattttaatacaatataaaaatcaaacattgcatagtagccccatcaaagaaaaatctgaccccaaacaaaataaaggaaggatgaaaatttgggaataggtaattgaaattgtctattattatataagaaggaggtttacaattctacatccccttcattttacaaaaatggaggggagtaccccttctcgggggtgaaaaatatacattcaaaataagtccggaattggataaaaatgactaattctaagcaacttttgttctatagagttttttcaccaagtcaatacttttcgagttatttgcaagtgagtgtgttcatttttaacaggaaaaagacgtgtttttggacggtttttcgcaactggaaactgaaacagaagacctcaaatatgttgatcagcaagaccaaaacaaaaatcactccatccaagtcaagcgttaggattgtaaagcccatagaaaagaaagtagtggtatccaaaactcccaaagctgttacggccgagaagaaaggcttatccagtttgggcttcaaagcaggccctatgggtaataccaatgggtaatgagcaaagcgcagccaaagcggaattctttggaaaatagaagggaggtgatttatcaaaaaataaaagggaccaacgatgttttgaacgtaactcacttacttttaacgttagaagtttttttgaaaaacagaattaaacctttttttaaacactttaaaaaagttataatgagttttcctcgaaaagtgctaattttttggttatttcacgttgaactattcgatttggaatttgacgaataagaacctacttttcattagctacaactctgcttctactgggtctacagacttcatgcatacaccatttttgttactgtcttataagttatatttttgttaagaacatttttttcgataaaataatcctttttgagttatttgcgaaaaaacgtccaaaaacacgttttttttttttgttgggggtgaacatactcgctggcaaataattcgaaaagtattgacttggtgaagggattctgtagaacgaaggagttgcttagaataagtcattttattcagttccggacttatattttttcacccccgagaaaatatttttcactccgtatttcccaatttttggaaaatggagggaatgtagagttgtaaactttttcttataaatataatatcattcctagaaagtctttctggtacagtacacattaggcattagcgagttaggtcacttgtttaagaactgttcatttatttttaaaaacggcctcaactaagagccattgatggcagaatgtatttttacaggtcaattaccaactaatggccaaacatagaaggaaaaccaaaaattattatttatacatctaacatctatctaagcagtagcataaaacaataacaattcctaatattttaattacttttgtaaagaagtaataacgttgtgcttctatagaaaatgagggattatttaaatattggaacgattttgatagacaaaaaacgatagaacaaagtaatagtataatattcaatgagcatgcaatagccattacatgcgagtggaatactatactttttctacgacctttttttctattattagtagaaaaaatattgtattttaaaactcatcgttcgtttattgataaatataactaaactaaagtaattttttactagccgacctattaataagaatatcactttacttaacattttttgtattgcatagtctaagtgagaatccattgttttaagttacctatataaaaatcatatgttatataataattatcaactactcttcattaaaattaaaatttacaaaaacaaataatgttcgccaatagtacgcggctgaatagttggttgcctactattaggaggcgtcgaccgtgaagattattcttataaagacatccgtgaggatcaaatttaaagaatggaacgtaatagaacgcaagctcatgtaacgtaatgacagtctgtttcaaccttaatatctgtcacataggtcactaggctatatgattgattaaacccgtgagtaatgaaatattcctcacaggtaaagtaattggtgttattatctattcaaaaatagtgaataatgagcatgttattaaatggtcgtagaaaaaaataatataattcaaaacagtcatgacgttcaatcgatttatttgattgattatcgtatgttcgttaaaaatgttcaagttccacatgtttaaataattttctcaaaattctgcaaataaagtaaaatattagatctggatgcacagaaatcagtattaacacaaaaaagtacgtccgttgacgaaaaaaaaaagtattcacctgatccttattaagaaattatttatatatacttaaaaataaaggatctaagaaaacaagagctccctgtctaaggaaacgttaccactaaaatctatgtagacagctcttccaggaataaactattttagaaaaaagatttagtgggacgtttcactaccagtataataaataatctatatataaggactttagaaatgctgtgccgagtatacaaatgtagactgcagttaaaactgtgattttcaaaaaaagttttttacgtagttcttcggtgatttgtttaaaaaaaaactaatttactttcatcatttttccatttcataattttttatagtgagaacgtcatttatttatatattgtgattgtttagttggtaatttaagctcaaattatagtgtcttcgatcagtgttcatttcttctgtttttccataaccacaagttgtgtaatgtagaacttttagttaacatatataatatatacttatatatacttatttatatgagtcattttattgaaaacgtacctttattaaacatacgtgggtgatttcacgttaatctagactaagaaaacggacgattcttcttaatttacttcacttcgtaagccgtccagaaggcatcaaaccacttccttcgtggtctccctcttctttccttctcttattctactgcgtgcgtctcttaggacgtttctttcttttggcattcgtaaaacatctctcaaccatctagcagtctgtgccctgatatttgtgttactttgggtcgtttatatatccattagctcctggtttgtttttctgcgccattccccgtcagccttcattattcaaacaaaaactttagatctgcagaatctgacaatcccatctgcttcaagtgccaattgagcttacagtgccctgttaacagcccttctgtggctttgactgttttcttgtctttgcttattaggtctgccatatattttggtgaatgttctgtaatgaactgttccacctgtctttgtcctggtgaattcctccaccattccaaagatttgtaagctacctaccctcttgtagacgttcttactcgttcaacgaatgacattgacgagtcatgtttggtcatttggccatttttccattccaaaaacagcgtacctcgcgtttctggacaatcgagtggtatttgccttcttcaatggacttttgcatctttttcttcactgctttgactgttcattggacaggtatcatcgcacaaaatcttttgaattgcgttttaacgttgtaaaaaaattctccgaatccaacgctcttgtttgtttttggttgagagtgatcaaactcggctcaatttccttgaacagttcttatatgcttatcaatatgtttagagcctcttaacgattttgattctttgatctgatgtgatcacatcttggactctgggtcgtgacagtttgtgagactcttaaatctatcatcagacgacaacgaaaaaattctgttttccaaaatttcactattggttatgacggtgctctccgtaagtagtttagattaatgtcaattcaccctcacagattgatatattaaattttggctcgggataataataattaaattttgtgtgataaaatttatttttataaaaaataatataatacttaagcaatatactctaacagaatacctgattgttgtgattcatataaaaagtattttgttgtagcaaataggtgtattctggccaataaatctttagaatatatgaagttgttgcacataaagtaaaattgctagttttctaaaaatcataatattctaaaagatctattcaacttgaaatttaaaacttagacatacaaggaaatattttatagcagtattaaatttttttctcaaatactttgagaaaggagttattctaagtattaaaattttttctcgaatattttgagaaaggaattattctaggctaatatatttttgattttcaaaacaatactaccgaaaaatatctataagttctgtattaacagtctaaaagaataccacacatttcattcaatttttttttaaataaatgtgtgttactttagtttcttccattaaagacaaactggtatagttacaacacccagtgatttattttatatttttgacattgacatttgacattgatatttaacattgacatttgacatttataaaatgacaggaactgtttagttctacaactttgtgaacaggtatagtgatgattcggtagtattctttgttttaaatgtatctttatatttcagtagaaggtttgaacactaaacaagtgaacacagtaagaaaaacagtatttatagttccaaaggaactgtgtgacttggtgccttaatacctgaatctgggcttttctccagacgatggaaaagaagttgaaaacagggtttggtaacaaaaatctaaaggaagaatagttcatttgttccttaaaacacacagaatgcgtagattccaaaaaattcacaaattaacagctattttgatcttgattcacattcaattgacaatgttaagttttcttttaattagttcctagaaattgttaatcaaaatttacatttttttaataataacgtatctgtgtgtgacagtttagtttgaatggtttagatttttgaacaaatgttatttgcgtagttgccttttactatgaactcaaaatgcgacaaaatacgtcacttctaaagtaccaacttactgacaatccaccatgtatgtggaaagtgctaattatgaaaccaaatagctttgttcaaaaatatatactgtctgaatgtgatgaacgatggaaaattcatgtgccaagtgatttagagaattaaatagacaaccttagttttaattttttttagtattatttcgtaacttgtgcatggatttgaaatctgtccagaagtcagtagttcccaaaagaattttgttatggatattttatttgaatcgtttaaaagaaaata

SEQ ID NO: 1739 - DNA, 5901 bp, Diabrotica virgifera
  SmartBlast Evalue=1E-178; Info=Proton-coupled amino acid transporter 4 n=1 Tax=Harpegnathos saltator RepID=E2BJJ1_9HYME
caggcgttgaaaattgtgaaactattcgagcgtgcgcagaaaaacgttaccatccaacagcaagaatcgtagaacacatccccaccatagaacgcgccgaattattctaggtttgaaaccacggcagaaatcgagtcgacagcgccaaccgtcgcattttgaattaagcttttggaggttcaagactgtgtttcagtgtttgtgattttattgccaaaaatgtctaagaaaaacggaaatacttcccttctacaacaaggggctgaaaagcctattatagcccaattagaccagaaaaagggtggtgttaacacagttattatgactaattttaagtgtgaccaaaaccaagttcctacacaatctgcaaatgggtccactgtacctttggtggacaccaggaaggctgatccagaagtcggagactatgatccgtttcaacacagggccaatctgccgcatccaacatcggacttggatacgctcatccatctgcttaaaggatgtttgggaagcggtattttagccatgccattagccttccaccacgccggcttattctttggtctcatatgtatgtttatcattggtataatttgcacctattgcgttcacatcttggtcaaaagtgcgcacgaaatctacaggcggcaaagggtatcagctctcggctttgccgaggtggcagaagctgctttcctcatcggacccaaaggtttccatccctgggctaagttcgccaaagccatgattaacttctttctggtggtagatctcatcggttgctgctgtgtgtatgtattattcgtggcaaagaacctcaagcaagtagtagatggttacaccgaggaagaataccactacgacgtcaggatatacatggcagccttgttaccgttcctaatctgcaccaatctcatcagaaatctcaaatatctcgcaccattgtccatggtcgctaatgttttagtagctgtaggccttggtattactttctattatatcttcaacggtctaccaccgctcagttccagacctcattttgctagtgtgtccactttgcctgccttcttcggcactgccattttcgctttggaaggtattggtgtagttatgcctttagagaataacatgaaaactccaggtcactttattggatgccccggcgtgctcaacatcggcatgtttttcgttgtgattctatacgcatctgttggattctttggatacttacgatatggagatgacgtcaaagttggaagtatcagcttgaatcttcccgacgaaccactggcccaatcagtgaaggtgatgatcgccgtagccatcttctgcacgtacgctctacagttctacgtccccatggagattatctggaaggcggtaaagaataactttaaccgaaaaacattggcagaatacagcatcagagccagtttagtaatcgtaacagtggtcatggcaattttaatccccaacttaggggccttcatctctttagtaggtgctgtatgcctgtccatgttgggccttatttttccaagtatcatcgaattagttactttctacgaagaccccggcttgggtcgtttcaactggcggttatggaaaaacatgtttttgatcatgttcggtctgttgggtttcgtaacgggaacctacgtcagtatacaggaaatcattcagggttgagccattctaccgtttttcagtatttctacagtcgacttcgcagggagtctcacatacaaagttggttttccgatccggctggaacccggttgtttcttcgaccagagattaccatttgcaatgggttcatctctttagatatcaacagaggaaacagtcggtgaagtagaggccgttttagaaataaatgaatggtttttaaactgttaatgagccttagtaaacgtacccatgtagacacagtgttagatacagactgtttagttttgaattagatataatatacccaactaaaagaagcgctaaaatctgcaacgttgtcgtcttactttttttactttttcgtgtctggatccgactacagtttttctgcccaatatcgggctacatctacaccctttgtatttgcgagccataaattatcgagggtgcactgtgattggcaaagtctgcatacactcggtggtccacgttttatatttccccacattcacaaagtgtgctgttctctatcttgatgccccatttaatgaggttctgttttacaggggaaacacctgggcgtatgcggttaggtaaaatggtaggtatagacacactataggatatacgcctaataccagttttaaagctatttacctgagttgttacgtggccaacagggaggggttgtaacaggacttttcctcaaccgcagatgatggacaagcctaggaaagacacatgacattagtccaagagtacaacaacgaccaaaacaattgattatagtataatcttctaaatactcacgtgtcccaagctgaggttatgtcacagtaactaattaaaacttttcatcagcttacaagatattactagctttaaagccgtcactggtacaagcccttcaaatgacgatgagttttcataaactcagctgaattatcgctgatgaatcggatttgcaaagttctccactttacaatggccgatgtcgtcaagccttaatcaaagagaccggatgtcaaccgcctttccttaatgtcattcgagttcatggcttacaacgaacatctgagcacggaaccacggttgatttagttatgtgacaagaacctatacaagggctgtgaatcagaaaaagatagcggtacacacatttctacgttctcagatattcctaaaacaactcaacaaacccattttgcaaacgaaccccattttgcgaagatgatgagctcgccgtagctacccatcgggctagccctgacctgaccccccaataccaagcccccaaccacaagcctcaactttcccaaaagaaaggatgtgattgtgtaaccgctggacacccactaaatgaagggccttaagcaaaaaataaataaaaaaaactaaaacaaacaactctctcccaggacatagaaggaagacacttaagtgtggtcagtcatcaagcaaccgaagaaatgacaatggaaacccccagactgaattggtacactgattcgaagaatggatagtaaatacaatcaggaagctcaagttgcacctcaggttactgctgccttgaggtctcgtgcaggagctctcaaatcagcctaaaaatctctaaagccacaacatcaacaacccaacaacatgccacaagcggaagtcaactcggcacaaccaaataaaacgtcttcaaccaagaaaaatgaatagacaaacagtgaatgaaattttaaagtaacgaaattgtgtcacgaacattcaacgaaaataaataatagaataatagaaaaaaaataattgaaagggtaaaatagaattaaggctatatactgttatatttttatggaaaatggtggacattttaaacactcatcttcagtcaaatacttccaacgacaagtcctttatatcgatcaaatctccgataaacataccagtttctcgcaagttttcatcaatccttagaaatatctgatggtagagaatcagtaggcatattgccaccaaattttgattcagaagcaaatttctttaattttactgatagatattcattatatatatccggggtgtcatatcggctgacgccgcatccccacacctaaccgccatctatttctatcctgggcatcttcctcttccaaatctcggtgttccatggccttccttatcgtgtcattccaggatagtcttggtcttccccttttcttcctacctgggggtttccatttcaggagtttctttggccatcgttggtcgtccattctaagtaagtgaccgaaccattttaggcttcttctctcgagcctgtctaccgctgtatcgtgtgcctgcatccttcttcttatttcttcgttacgtattctgtccaatcgggagattccagcgcttctacgtatgtagtccatttccacagcattgatccttcttctggactctgctgttaatgtccagcttcgcttccatacatgagtaccgattccacaaatgtcttccctattcttaattttgtagttctggatatatttttatcccaccacacggaattcaagcaacctactaccttcctactttgttcaactcgcctttgaatttctttgttgcctaggccttctctgtttattacagctcccagatatttgaattcttcaacctgtttaattgatgtgttctctgtaattaggatttcaaagtgggcgtcagaattcacgactagatattctgttttttctatatttatatttaatccccattttttgtaggttgaatacaggcgggttaacatgaattccatgtcatacgaatcttgtgccagtactgcttgatcgtcagcaaagtggatgttaaacaggcagtcatctctgatcatgattcccattagtccacaacttcttttccattcttttaaagcgacttccaagtatatgttaaatagcaacggtgataagctacaccctatagatattcattaagttttaaaaatattttttttgtaaaaatacaattttaatacaatataaaaatcaaacattgcatagtagccccatcaaagaaaaatctgaccccaaacaaaataaaggaaggatgaaaatttgggaataggtaattgaaattgtctattattatataagaaggaggtttacaattctacatccccttcattttacaaaaatggaggggagtaccccttctcgggggtgaaaaatatacattcaaaataagtccggaattggataaaaatgactaattctaagcaacttttgttctatagagttttttcaccaagtcaatacttttcgagttatttgcaagtgagtgtgttcatttttaacaggaaaaagacgtgtttttggacggtttttcgcaactggaaactgaaacagaagacctcaaatatgttgatcagcaagaccaaaacaaaaatcactccatccaagtcaagcgttaggattgtaaagcccatagaaaagaaagtagtggtatccaaaactcccaaagctgttacggccgagaagaaaggcttatccagtttgggcttcaaagcaggccctatgggtaataccaatgggtaatgagcaaagcgcagccaaagcggaattctttggaaaatagaagggaggtgatttatcaaaaaataaaagggaccaacgatgttttgaacgtaactcacttacttttaacgttagaagtttttttgaaaaacagaattaaacctttttttaaacactttaaaaaagttataatgagttttcctcgaaaagtgctaattttttggttatttcacgttgaactattcgatttggaatttgacgaataagaacctacttttcattagctacaactctgcttctactgggtctacagacttcatgcatacaccatttttgttactgtcttataagttatatttttgttaagaacatttttttcgataaaataatcctttttgagttatttgcgaaaaaacgtccaaaaacacgttttttttttttgttgggggtgaacatactcgctggcaaataattcgaaaagtattgacttggtgaagggattctgtagaacgaaggagttgcttagaataagtcattttattcagttccggacttttttgaatgtatattttttcacctccgagaaaatattttcactccgtatttcccaatttttggaaaatggagggaatgtagaattgtaaactttttcttataaatataatatcattcctagaaa

SEQ ID NO: 1740 - DNA, 4987 bp, Diabrotica virgifera
  SmartBlast Evalue=1E-178; Info=Proton-coupled amino acid transporter 4 n=1 Tax=Harpegnathos saltator RepID=E2BJJ1_9HYME
caggcgttgaaaattgtgaaactattcgagcgtgcgcagaaaaacgttaccatccaacagcaagaatcgtagaacacatccccaccatagaacgcgccgaattattctaggtttgaaaccacggcagaaatcgagtcgacagcgccaaccgtcgcattttgaattaagcttttggaggttcaagactgtgtttcagtgtttgtgattttattgccaaaaatgtctaagaaaaacggaaatacttcccttctacaacaaggggctgaaaagcctattatagcccaattagaccagaaaaagggtggtgttaacacagttattatgactaattttaagtgtgaccaaaaccaagttcctacacaatctgcaaatgggtccactgtacctttggtggacaccaggaaggctgatccagaagtcggagactatgatccgtttcaacacagggccaatctgccgcatccaacatcggacttggatacgctcatccatctgcttaaaggatgtttgggaagcggtattttagccatgccattagccttccaccacgccggcttattctttggtctcatatgtatgtttatcattggtataatttgcacctattgcgttcacatcttggtcaaaagtgcgcacgaaatctacaggcggcaaagggtatcagctctcggctttgccgaggtggcagaagctgctttcctcatcggacccaaaggtttccatccctgggctaagttcgccaaagccatgattaacttctttctggtggtagatctcatcggttgctgctgtgtgtatgtattattcgtggcaaagaacctcaagcaagtagtagatggttacaccgaggaagaataccactacgacgtcaggatatacatggcagccttgttaccgttcctaatctgcaccaatctcatcagaaatctcaaatatctcgcaccattgtccatggtcgctaatgttttagtagctgtaggccttggtattactttctattatatcttcaacggtctaccaccgctcagttccagacctcattttgctagtgtgtccactttgcctgccttcttcggcactgccattttcgctttggaaggtattggtgtagttatgcctttagagaataacatgaaaactccaggtcactttattggatgccccggcgtgctcaacatcggcatgtttttcgttgtgattctatacgcatctgttggattctttggatacttacgatatggagatgacgtcaaagttggaagtatcagcttgaatcttcccgacgaaccactggcccaatcagtgaaggtgatgatcgccgtagccatcttctgcacgtacgctctacagttctacgtccccatggagattatctggaaggcggtaaagaataactttaaccgaaaaacattggcagaatacagcatcagagccagtttagtaatcgtaacagtggtcatggcaattttaatccccaacttaggggccttcatctctttagtaggtgctgtatgcctgtccatgttgggccttatttttccaagtatcatcgaattagttactttctacgaagaccccggcttgggtcgtttcaactggcggttatggaaaaacatgtttttgatcatgttcggtctgttgggtttcgtaacgggaacctacgtcagtatacaggaaatcattcagggttgagccattctaccgtttttcagtatttctacagtcgacttcgcagggagtctcacatacaaagttggttttccgatccggctggaacccggttgtttcttcgaccagagattaccatttgcaatgggttcatctctttagatatcaacagaggaaacagtcggtgaagtagaggccgttttagaaataaatgaatggtttttaaactgttaatgagccttagtaaacgtacccatgtagacacagtgttagatacagactgtttagttttgaattagatataatatacccaactaaaagaagcgctaaaatctgcaacgttgtcgtcttactttttttactttttcgtgtctggatccgactacagtttttctgcccaatatcgggctacatctacaccctttgtatttgcgagccataaattatcgagggtgcactgtgattggcaaagtctgcatacactcggtggtccacgttttatatttccccacattcacaaagtgtgctgttctctatcttgatgccccatttaatgaggttctgttttacaggggaaacacctgggcgtatgcggttaggtaaaatggtaggtatagacacactataggatatacgcctaataccagttttaaagctatttacctgagttgttacgtggccaacagggaggggttgtaacaggacttttcctcaaccgcagatgatggacaagcctaggaaagacacatgacattagtccaagagtacaacaacgaccaaaacaattgattatagtataatcttctaaatactcacgtgtcccaagctgaggttatgtcacagtaactaattaaaacttttcatcagcttacaagatattactagctttaaagccgtcactggtacaagcccttcaaatgacgatgagttttcataaactcagctgaattatcgctgatgaatcggatttgcaaagttctccactttacaatggccgatgtcgtcaagccttaatcaaagagaccggatgtcaaccgcctttccttaatgtcattcgagttcatggcttacaacgaacatctgagcacggaaccacggttgatttagttatgtgacaagaacctatacaagggctgtgaatcagaaaaagatagcggtacacacatttctacgttctcagatattcctaaaacaactcaacaaacccattttgcaaacgaaccccattttgcgaagatgatgagctcgccgtagctacccatcgggctagccctgacctgaccccccaataccaagcccccaaccacaagcctcaactttcccaaaagaaaggatgtgattgtgtaaccgctggacacccactaaatgaagggccttaagcaaaaaataaataaaaaaaactaaaacaaacaactctctcccaggacatagaaggaagacacttaagtgtggtcagtcatcaagcaaccgaagaaatgacaatggaaacccccagactgaattggtacactgattcgaagaatggatagtaaatacaatcaggaagctcaagttgcacctcaggttactgctgccttgaggtctcgtgcaggagctctcaaatcagcctaaaaatctctaaagccacaacatcaacaacccaacaacatgccacaagcggaagtcaactcggcacaaccaaataaaacgtcttcaaccaagaaaaatgaatagacaaacagtgaatgaaattttaaagtaacgaaattgtgtcacgaacattcaacgaaaataaataatagaataatagaaaaaaaataattgaaagggtaaaatagaattaaggctatatactgttatatttttatggaaaatggtggacattttaaacactcatcttcagtcaaatacttccaacgacaagtcctttatatcgatcaaatctccgataaacataccagtttctcgcaagttttcatcaatccttagaaatatctgatggtagagaatcagtaggcatattgccaccaaattttgattcagaagcaaatttctttaattttactgatagatattcattaagttttaaaaatattttttttgtaaaaatacaattttaatacaatataaaaatcaaacattgcatagtagccccatcaaagaaaaatctgaccccaaacaaaataaaggaaggatgaaaatttgggaataggtaattgaaattgtctattattatataagaaggaggtttacaattctacatccccttcattttacaaaaatggaggggagtaccccttctcgggggtgaaaaatatacattcaaaataagtccggaattggataaaaatgactaattctaagcaacttttgttctatagagttttttcaccaagtcaatacttttcgagttatttgcaagtgagtgtgttcatttttaacaggaaaaagacgtgtttttggacggtttttcgcaactggaaactgaaacagaagacctcaaatatgttgatcagcaagaccaaaacaaaaatcactccatccaagtcaagcgttaggattgtaaagcccatagaaaagaaagtagtggtatccaaaactcccaaagctgttacggccgagaagaaaggcttatccagtttgggcttcaaagcaggccctatgggtaataccaatgggtaatgagcaaagcgcagccaaagcggaattctttggaaaatagaagggaggtgatttatcaaaaaataaaagggaccaacgatgttttgaacgtaactcacttacttttaacgttagaagtttttttgaaaaacagaattaaacctttttttaaacactttaaaaaagttataatgagttttcctcgaaaagtgctaattttttggttatttcacgttgaactattcgatttggaatttgacgaataagaacctacttttcattagctacaactctgcttctactgggtctacagacttcatgcatacaccatttttgttactgtcttataagttatatttttgttaagaacatttttttcgataaaataatcctttttgagttatttgcgaaaaaacgtccaaaaacacgttttttttttttgttgggggtgaacatactcgctggcaaataattcgaaaagtattgacttggtgaagggattctgtagaacgaaggagttgcttagaataagtcattttattcagttccggacttttttgaatgtatattttttcacctccgagaaaatattttcactccgtatttcccaatttttggaaaatggagggaatgtagaattgtaaactttttcttataaatataatatcattcctagaaa

SEQ ID NO: 1741 - DNA, 4760 bp, Diabrotica virgifera
  SmartBlast Evalue=1E-178; Info=Proton-coupled amino acid transporter 4 n=1 Tax=Harpegnathos saltator RepID=E2BJJ1_9HYME
caggcgttgaaaattgtgaaactattcgagcgtgcgcagaaaaacgttaccatccaacagcaagaatcgtagaacacatccccaccatagaacgcgccgaattattctaggtttgaaaccacggcagaaatcgagtcgacagcgccaaccgtcgcattttgaattaagcttttggaggttcaagactgtgtttcagtgtttgtgattttattgccaaaaatgtctaagaaaaacggaaatacttcccttctacaacaaggggctgaaaagcctattatagcccaattagaccagaaaaagggtggtgttaacacagttattatgactaattttaagtgtgaccaaaaccaagttcctacacaatctgcaaatgggtccactgtacctttggtggacaccaggaaggctgatccagaagtcggagactatgatccgtttcaacacagggccaatctgccgcatccaacatcggacttggatacgctcatccatctgcttaaaggatgtttgggaagcggtattttagccatgccattagccttccaccacgccggcttattctttggtctcatatgtatgtttatcattggtataatttgcacctattgcgttcacatcttggtcaaaagtgcgcacgaaatctacaggcggcaaagggtatcagctctcggctttgccgaggtggcagaagctgctttcctcatcggacccaaaggtttccatccctgggctaagttcgccaaagccatgattaacttctttctggtggtagatctcatcggttgctgctgtgtgtatgtattattcgtggcaaagaacctcaagcaagtagtagatggttacaccgaggaagaataccactacgacgtcaggatatacatggcagccttgttaccgttcctaatctgcaccaatctcatcagaaatctcaaatatctcgcaccattgtccatggtcgctaatgttttagtagctgtaggccttggtattactttctattatatcttcaacggtctaccaccgctcagttccagacctcattttgctagtgtgtccactttgcctgccttcttcggcactgccattttcgctttggaaggtattggtgtagttatgcctttagagaataacatgaaaactccaggtcactttattggatgccccggcgtgctcaacatcggcatgtttttcgttgtgattctatacgcatctgttggattctttggatacttacgatatggagatgacgtcaaagttggaagtatcagcttgaatcttcccgacgaaccactggcccaatcagtgaaggtgatgatcgccgtagccatcttctgcacgtacgctctacagttctacgtccccatggagattatctggaaggcggtaaagaataactttaaccgaaaaacattggcagaatacagcatcagagccagtttagtaatcgtaacagtggtcatggcaattttaatccccaacttaggggccttcatctctttagtaggtgctgtatgcctgtccatgttgggccttatttttccaagtatcatcgaattagttactttctacgaagaccccggcttgggtcgtttcaactggcggttatggaaaaacatgtttttgatcatgttcggtctgttgggtttcgtaacgggaacctacgtcagtatacaggaaatcattcagggttgagccattctaccgtttttcagtatttctacagtcgacttcgcagggagtctcacatacaaagttggttttccgatccggctggaacccggttgtttcttcgaccagagattaccatttgcaatgggttcatctctttagatatcaacagaggaaacagtcggtgaagtagaggccgttttagaaataaatgaatggtttttaaactgttaatgagccttagtaaacgtacccatgtagacacagtgttagatacagactgtttagttttgaattagatataatatacccaactaaaagaagcgctaaaatctgcaacgttgtcgtcttactttttttactttttcgtgtctggatccgactacagtttttctgcccaatatcgggctacatctacaccctttgtatttgcgagccataaattatcgagggtgcactgtgattggcaaagtctgcatacactcggtggtccacgttttatatttccccacattcacaaagtgtgctgttctctatcttgatgccccatttaatgaggttctgttttacaggggaaacacctgggcgtatgcggttaggtaaaatggtaggtatagacacactataggatatacgcctaataccagttttaaagctatttacctgagttgttacgtggccaacagggaggggttgtaacaggacttttcctcaaccgcagatgatggacaagcctaggaaagacacatgacattagtccaagagtacaacaacgaccaaaacaattgattatagtataatcttctaaatactcacgtgtcccaagctgaggttatgtcacagtaactaattaaaacttttcatcagcttacaagatattactagctttaaagccgtcactggtacaagcccttcaaatgacgatgagttttcataaactcagctgaattatcgctgatgaatcggatttgcaaagttctccactttacaatggccgatgtcgtcaagccttaatcaaagagaccggatgtcaaccgcctttccttaatgtcattcgagttcatggcttacaacgaacatctgagcacggaaccacggttgatttagttatgtgacaagaacctatacaagggctgtgaatcagaaaaagatagcggtacacacatttctacgttctcagatattcctaaaacaactcaacaaacccattttgcaaacgaaccccattttgcgaagatgatgagctcgccgtagctacccatcgggctagccctgacctgaccccccaataccaagcccccaaccacaagcctcaactttcccaaaagaaaggatgtgattgtgtaaccgctggacacccactaaatgaagggccttaagcaaaaaataaataaaaaaaactaaaacaaacaactctctcccaggacatagaaggaagacacttaagtgtggtcagtcatcaagcaaccgaagaaatgacaatggaaacccccagactgaattggtacactgattcgaagaatggatagtaaatacaatcaggaagctcaagttgcacctcaggttactgctgccttgaggtctcgtgcaggagctctcaaatcagcctaaaaatctctaaagccacaacatcaacaacccaacaacatgccacaagcggaagtcaactcggcacaaccaaataaaacgtcttcaaccaagaaaaatgaatagacaaacagtgaatgaaattttaaagtaacgaaattgtgtcacgaacattcaacgaaaataaataatagaataatagaaaaaaaataattgaaagggtaaaatagaattaaggctatatactgttatatttttatggaaaatggtggacattttaaacactcatcttcagtcaaatacttccaacgacaagtcctttatatcgatcaaatctccgataaacataccagtttctcgcaagttttcatcaatccttagaaatatctgatggtagagaatcagtaggcatattgccaccaaattttgattcagaagcaaatttctttaattttactgatagatattcattatatatatccggggtgtcatatcggctgacgccgcatccccacacctaaccgccatctatttctatcctgggcatcttcctcttccaaatctcggtgttccatggccttccttatcgtgtcattccaggatagtcttggtcttccccttttcttcctacctgggggtttccatttcaggagtttctttggccatcgttggtcgtccattctaagtaagtgaccgaaccattttaggcttcttctctcgagcctgtctaccgctgtatcgtgtgcctgcatccttcttcttatttcttcgttacgtattctgtccaatcgggagattccagcgcttctacgtatgtagtccatttccacagcattgatccttcttctggactctgctgttaatgtccagcttcgcttccatacatgagtaccgattccacaaatgtcttccctattcttaattttgtagttctggatatatttttatcccaccacacggaattcaagcaacctactaccttcctactttgttcaactcgcctttgaatttctttgttgcctaggccttctctgtttattacagctcccagatatttgaattcttcaacctgtttaattgatgtgttctctgtaattaggatttcaaagtgggcgtcagaattcacgactagatattctgttttttctatatttatatttaatccccattttttgtaggttgaatacaggcgggttaacatgaattccatgtcatacgaatcttgtgccagtactgcttgatcgtcagcaaagtggatgttaaacaggcagtcatctctgatcatgattcccattagtccacaacttcttttccattcttttaaagcgacttccaagtatatgttaaatagcaacggtgataagctacacccttgcttcagtcctttttctatttttattccttcagatagttgtgtgccaatcttgacatatcccacattatcgctgtacaatgatttgataatatgtataatagccggactaactttcatttcaacaagggca

SEQ ID NO: 1742 - DNA, 4420 bp, Diabrotica virgifera
acttgcaagtggttcgaaaggtgttggctttgtgaagggattctatagagcgggagttgcttggaattggtcattttgttcaattccggacttgttttgagtgtatattttttcacccccgagaaaatatttttcactccgtatttcccaatttttggaaaatggagggaatgtagagttgtaaactttttcttataaatataatatcattcctagaaagtctttctggtacagtacacattaggcattagcgagttaggtcacttgtttaagaactgttcatttatttttaaaaacggcctcaactaagagccattgatggcagaatgtatttttacaggtcaattaccaactaatggccaaacatagaaggaaaaccaaaaattattatttatacatctaacatctatctaagcagtagcataaaacaataacaattcctaatattttaattacttttgtaaagaagtaataacgttgtgcttctatagaaaatgagggattatttaaatattggaacgattttgatagacaaaaaacgatagaacaaagtaatagtataatattcaatgagcatgcaatagccattacatgcgagtggaatactatactttttctacgacctttttttctattattagtagaaaaaatattgtattttaaaactcatcgttcgtttattgataaatataactaaactaaagtaattttttactagccgacctattaataagaatatcactttacttaacattttttgtattgcatagtctaagtgagaatccattgttttaagttacctatataaaaatcatatgttatataataattatcaactactcttcattaaaattaaaatttacaaaaacaaataatgttcgccaatagtacgcggctgaatagttggttgcctactattaggaggcgtataatattgccacagtgcaagtgtctcgaccgtgaagattattcttataaagacatccgtgaggatcaaatttaaagaatggaacgtaatagaacgcaagctcatgtaacgtaatgacagtctgtttcaaccttaatatctgtcacataggtcactaggctatatgattgattaaacccgtgagtaatgaaatattcctcacaggtaaagtaattggtgttattatctattcaaaaatagtgaataatgagcatgttattaaatggtcgtagaaaaaaataatataattcaaaacagtcatgacgttcaatcgatttatttgattgattatcgtatgttcgttaaaaatgttcaagttccacatgtttaaataattttctcaaaattctgcaaataaagtaaaatattagatctggatgcacagaaatcagtattaacacaaaaaagtacgtccgttgacgaaaaaaaaaagtattcacctgatccttattaagaaattatttatatatacttaaaaataaaggatctaagaaaacaagagctccctgtctaaggaaacgttaccactaaaatctatgtagacagctcttccaggaataaactattttagaaaaaagatttagtgggacgtttcactaccagtataataaataatctatatataaggactttagaaatgctgtgccgagtatacaaatgtagactgcagttaaaactgtgattttcaaaaaaagttttttacgtagttcttcggtgatttgtttaaaaaaaaactaatttactttcatcatttttccatttcataattttttatagtgagaacgtcatttatttatatattgtgattgtttagttggtaatttaagctcaaattatagtgtcttcgatcagtgttcatttcttctgtttttccataaccacaagttgtgtaatgtagaacttttagttaacatatataatatatacttatatatacttatttatatgagtcattttattgaaaacgtacctttattaaacatacgtgggtgatttcacgttaatctagactaagaaaacggacgattcttcttaatttacttcacttcgtaagccgtccagaaggcatcaaaccacttccttcgtggtctccctcttctttccttctcttattctactgcgtgcgtctcttaggacgtttctttcttttggcattcgtaaaacatctctcaaccatctagcagtctgtgccctgatatttgtgttactttgggtcgtttatatatccattagctcctggtttgtttttctgcgccattccccgtcagccttcattattcaaacaaaaactttagatctgcagaatctgacaatcccatctgcttcaagtgccaattgagcttacagtgccctgttaacagcccttctgtggctttgactgttttcttgtctttgcttattaggtctgccatatattttggtgaatgttctgtaatgaactgttccacctgtctttgtcctggtgaattcctccaccattccaaagatttgtaagctacctaccctcttgtagacgttcttactcgttcaacgaatgacattgacgagtcatgtttggtcatttggccatttttccattccaaaaacagcgtacctcgcgtttctggacaatcgagtggtatttgccttcttcaatggacttttgcatctttttcttcactgctttgactgttcattggacaggtatcatcgcacaaaatcttttgaattgcgttttaacgttgtaaaaaaattctccgaatccaacgctcttgtttgtttttggttgagagtgatcaaactcggctcaatttccttgaacagttcttatatgcttatcaatatgtttagagcctcttaacgattttgattctttgatctgatgtgatcacatcttggactctgggtcgtgacagtttgtgagactcttaaatctatcatcagacgacaacgaaaaaattctgttttccaaaatttcactattggttatgacggtgctctccgtaagtagtttagattaatgtcaattcaccctcacagattgatatattaaattttggctcgggataataataattaaattttgtgtgataaaatttatttttataaaaaataatataatacttaagcaatatactctaacagaatacctgattgttgtgattcatataaaaagtattttgttgtagcaaataggtgtattctggccaataaatctttagaatatatgaagttgttgcacataaagtaaaattgctagttttctaaaaatcataatattctaaaagatctattcaacttgaaatttaaaacttagacatacaaggaaatattttatagcagtattaaatttttttctcaaatactttgagaaaggagttattctaagtattaaaattttttctcgaatattttgagaaaggaattattctaggctaatatatttttgattttcaaaacaatactaccgaaaaatatctataagttctgtattaacagtctaaaagaataccacacatttcattcaatttttttttaaataaatgtgtgttactttagtttcttccattaaagacaaactggtatagttacaacacccagtgatttattttatatttttgacattgacatttgacattgatatttaacattgacatttgacatttataaaatgacaggaactgtttagttctacaactttgtgaacaggtatagtgatgattcggtagtattctttgttttaaatgtatctttatatttcagtagaaggtttgaacactaaacaagtgaacacagtaagaaaaacagtatttatagttccaaaggaactgtgtgacttggtgccttaatacctgaatctgggcttttctccagacgatggaaaagaagttgaaaacagggtttggtaacaaaaatctaaaggaagaatagttcatttgttccttaaaacacacagaatgcgtagattccaaaaaattcacaaattaacagctattttgatcttgattcacattcaattgacaatgttaagttttcttttaattagttcctagaaattgttaatcaaaatttacatttttttaataataacgtatctgtgtgtgacagtttagtttgaatggtttagatttttgaacaaatgttatttgcgtagttgccttttactatgaactcaaaatgcgacaaaatacgtcacttctaaagtaccaacttactgacaatccaccatgtatgtggaaagtgctaattatgaaaccaaatagctttgttcaaaaatatatactgtctgaatgtgatgaacgatggaaaattcatgtgccaagtgatttagagaattaaatagacaaccttagttttaattttttttagtattatttcgtaacttgtgcatggatttgaaatctgtccagaagtcagtagttcccaaaagaattttgttatggatattttatttgaatcgtttaaaagaaaata

SEQ ID NO: 1743 - DNA, 4394 bp, Diabrotica virgifera
acttgcaagtggttcgaaaggtgttggctttgtgaagggattctatagagcgggagttgcttggaattggtcattttgttcaattccggacttgttttgagtgtatattttttcacccccgagaaaatatttttcactccgtatttcccaatttttggaaaatggagggaatgtagagttgtaaactttttcttataaatataatatcattcctagaaagtctttctggtacagtacacattaggcattagcgagttaggtcacttgtttaagaactgttcatttatttttaaaaacggcctcaactaagagccattgatggcagaatgtatttttacaggtcaattaccaactaatggccaaacatagaaggaaaaccaaaaattattatttatacatctaacatctatctaagcagtagcataaaacaataacaattcctaatattttaattacttttgtaaagaagtaataacgttgtgcttctatagaaaatgagggattatttaaatattggaacgattttgatagacaaaaaacgatagaacaaagtaatagtataatattcaatgagcatgcaatagccattacatgcgagtggaatactatactttttctacgacctttttttctattattagtagaaaaaatattgtattttaaaactcatcgttcgtttattgataaatataactaaactaaagtaattttttactagccgacctattaataagaatatcactttacttaacattttttgtattgcatagtctaagtgagaatccattgttttaagttacctatataaaaatcatatgttatataataattatcaactactcttcattaaaattaaaatttacaaaaacaaataatgttcgccaatagtacgcggctgaatagttggttgcctactattaggaggcgtcgaccgtgaagattattcttataaagacatccgtgaggatcaaatttaaagaatggaacgtaatagaacgcaagctcatgtaacgtaatgacagtctgtttcaaccttaatatctgtcacataggtcactaggctatatgattgattaaacccgtgagtaatgaaatattcctcacaggtaaagtaattggtgttattatctattcaaaaatagtgaataatgagcatgttattaaatggtcgtagaaaaaaataatataattcaaaacagtcatgacgttcaatcgatttatttgattgattatcgtatgttcgttaaaaatgttcaagttccacatgtttaaataattttctcaaaattctgcaaataaagtaaaatattagatctggatgcacagaaatcagtattaacacaaaaaagtacgtccgttgacgaaaaaaaaaagtattcacctgatccttattaagaaattatttatatatacttaaaaataaaggatctaagaaaacaagagctccctgtctaaggaaacgttaccactaaaatctatgtagacagctcttccaggaataaactattttagaaaaaagatttagtgggacgtttcactaccagtataataaataatctatatataaggactttagaaatgctgtgccgagtatacaaatgtagactgcagttaaaactgtgattttcaaaaaaagttttttacgtagttcttcggtgatttgtttaaaaaaaaactaatttactttcatcatttttccatttcataattttttatagtgagaacgtcatttatttatatattgtgattgtttagttggtaatttaagctcaaattatagtgtcttcgatcagtgttcatttcttctgtttttccataaccacaagttgtgtaatgtagaacttttagttaacatatataatatatacttatatatacttatttatatgagtcattttattgaaaacgtacctttattaaacatacgtgggtgatttcacgttaatctagactaagaaaacggacgattcttcttaatttacttcacttcgtaagccgtccagaaggcatcaaaccacttccttcgtggtctccctcttctttccttctcttattctactgcgtgcgtctcttaggacgtttctttcttttggcattcgtaaaacatctctcaaccatctagcagtctgtgccctgatatttgtgttactttgggtcgtttatatatccattagctcctggtttgtttttctgcgccattccccgtcagccttcattattcaaacaaaaactttagatctgcagaatctgacaatcccatctgcttcaagtgccaattgagcttacagtgccctgttaacagcccttctgtggctttgactgttttcttgtctttgcttattaggtctgccatatattttggtgaatgttctgtaatgaactgttccacctgtctttgtcctggtgaattcctccaccattccaaagatttgtaagctacctaccctcttgtagacgttcttactcgttcaacgaatgacattgacgagtcatgtttggtcatttggccatttttccattccaaaaacagcgtacctcgcgtttctggacaatcgagtggtatttgccttcttcaatggacttttgcatctttttcttcactgctttgactgttcattggacaggtatcatcgcacaaaatcttttgaattgcgttttaacgttgtaaaaaaattctccgaatccaacgctcttgtttgtttttggttgagagtgatcaaactcggctcaatttccttgaacagttcttatatgcttatcaatatgtttagagcctcttaacgattttgattctttgatctgatgtgatcacatcttggactctgggtcgtgacagtttgtgagactcttaaatctatcatcagacgacaacgaaaaaattctgttttccaaaatttcactattggttatgacggtgctctccgtaagtagtttagattaatgtcaattcaccctcacagattgatatattaaattttggctcgggataataataattaaattttgtgtgataaaatttatttttataaaaaataatataatacttaagcaatatactctaacagaatacctgattgttgtgattcatataaaaagtattttgttgtagcaaataggtgtattctggccaataaatctttagaatatatgaagttgttgcacataaagtaaaattgctagttttctaaaaatcataatattctaaaagatctattcaacttgaaatttaaaacttagacatacaaggaaatattttatagcagtattaaatttttttctcaaatactttgagaaaggagttattctaagtattaaaattttttctcgaatattttgagaaaggaattattctaggctaatatatttttgattttcaaaacaatactaccgaaaaatatctataagttctgtattaacagtctaaaagaataccacacatttcattcaatttttttttaaataaatgtgtgttactttagtttcttccattaaagacaaactggtatagttacaacacccagtgatttattttatatttttgacattgacatttgacattgatatttaacattgacatttgacatttataaaatgacaggaactgtttagttctacaactttgtgaacaggtatagtgatgattcggtagtattctttgttttaaatgtatctttatatttcagtagaaggtttgaacactaaacaagtgaacacagtaagaaaaacagtatttatagttccaaaggaactgtgtgacttggtgccttaatacctgaatctgggcttttctccagacgatggaaaagaagttgaaaacagggtttggtaacaaaaatctaaaggaagaatagttcatttgttccttaaaacacacagaatgcgtagattccaaaaaattcacaaattaacagctattttgatcttgattcacattcaattgacaatgttaagttttcttttaattagttcctagaaattgttaatcaaaatttacatttttttaataataacgtatctgtgtgtgacagtttagtttgaatggtttagatttttgaacaaatgttatttgcgtagttgccttttactatgaactcaaaatgcgacaaaatacgtcacttctaaagtaccaacttactgacaatccaccatgtatgtggaaagtgctaattatgaaaccaaatagctttgttcaaaaatatatactgtctgaatgtgatgaacgatggaaaattcatgtgccaagtgatttagagaattaaatagacaaccttagttttaattttttttagtattatttcgtaacttgtgcatggatttgaaatctgtccagaagtcagtagttcccaaaagaattttgttatggatattttatttgaatcgtttaaaagaaaata

SEQ ID NO: 1744 - DNA, 6083 bp, Diabrotica virgifera
  SmartBlast Evalue=0; Info=Heat shock 70 kDa protein cognate 4 n= 18 Tax=Endopterygota RepID=HSP7D_MANSE
agtaaatattggatacatatgttccactagttacattagtatacgaccaactctaaccatttagttagtggtgtcggcaccagaagaagatcaacacaatgtttgaatcatttttatcaaatattggcaaaaaatttagaaataagcaaaattcaagttcaggacatctcaatcgtcagatggcccccgcaattggtattgatttaggaacaacatactcctgtgtaggagttttccagcatggcaaagttgaaattattgtcaacgatcatggtaacagaaccacaccatcatatatcgccttcacagacacagaatgtctcattggagattctgccaaagacaaggtagacataaaccccagtaacacaatttttggtgctaaacgtctaattggacgtcgctttgatgacggtgctgtacagtctgacatgaaacattggccttttgaagtagtaaatcatgccggtaaccaaaattaaagttacccacaagggcaaagagaaatccttctctccagaagaagtcagttccatggtccttacaaaaatgaaagaaatagcagaagcatacctagggaagaacgtcacaaatgctgtcatcacagtacctgtttatttcaatgagtcacaacgtcaagctactaaatatgctggacaccttgctggacttcaggttttacgtcttattagtgggcccgtttgtgctgccattgcctatggtttagtcataaagggacaaggtgaaagaaatgtcctcattttcgatctgggtggcggtacctctaatgtatcaatcttaaccattgaggatggtatttttgaagtcaaatcagttgctggagacaatcatttgggaggtgaagacttcgacaacagaatggtcaatcattttgttggagaatttaagaggaaatacaaaaagaaccttaccagaaacaaacgtgcccttcgtcgtttgagagcaagctgtataagagctaagcacactctttcctcatcgacccaagctagcattgaaattgattctctctttgagggtattgacttctacacctcaatcaccagggctagatttgaagaactcaacgatgatttgttcagatctatcatagaacctgtagaaaaggccatcaaggacgccgagatggacaaatttcaagtgcacgagattgtattggttggtggatctacccgtattccaaaggtacaaaaactgttgcaagatttcttcaatggcaaaaaattgaacaagtcgattaatcccgatgaagctgtggcttatggtgcagccgtccaagctgctatattacacggagataagtctgaggaagtacaagacttactgttgctcgatgtcactccactttcattaggtatcgaaactgctggaggtgttatgaatgccatcatcaaacgtaactctttcattcccaacaaacaaactcagacatttactaccgactctgacaaccaacccggagtacttattcaaatatatgaaggtgatcgtgccatgaccaaggacaataatttcttgggtaatttccaacttaccgatatccctccagcgccccgaggtgtccctcagatcgaagtaaccttcgaaattgatggaaatggtattgtcaacgtcacagctattgaaaaatccaccaacaaagaaaacaagataaccatcaatagatgttgtcttcttagcaaagaagacaaagaaaacaacaaaattatcgacatggagaaatgtaatatggttattgtttgttgtgatactaacgaattagctgacaaggaaaaatacgaacacaaagaaaagagttcgaaaatacctgcaaccccatcatcgtcaagtcgtaccaaggtgccggacccacaatagggatgttcactaatttttaaatatagttaaattcaatagattacaaggtatataaaaacgtaacaatcataaaactgtttaaaaatgtatattttttaagataaatgagttcataatgttgattttcttggaggctagaaaaacggtaccctgcagcgaggctacggtctgtgacgtcagcagtcgtaacgtctttgatcgacgactagttttgtatacttatttactcagtgtatttgaatgtgcgcagttttttacgtatttaattattaaaaataaagccaaataagtggtgttttgttcctgggtgtgtaaatacatcaaaaaacagttctgacaagatttttattaccgttcagccaatttaaaacagaaaaagaaatggtttgttgcagctagaacttaaaataactaacttaaagaactaacttaataaaataaacattatagaagttttccagagactttcggcccttggtaataatgtaattgttctttctgcatttacatttttcaaaaatacttattagttttctcaggattcgaaaaaaatgaatgaatttaaatagcattggaccaagattttgcacctacccccttaaagagtaaatgaaaaagtttcgggacctcaaatttgtattccttaaactgggatattcctaaaaacgggattctaataatacatacagtaaaagtaaaccttgaaataactacatgtggatgtaggtatgactttatattatattaaaatcattaataatttagtgaaaagattggttgaaatgaaaatgtataatacccaagttcaaaaatattttttaccttggaacagttgtcaactcgaaatacgaaacaaccgaaataagatctagagttgaaaaggacatagcaacatttaacaacatgcatgagaaatattttcacccattgcgacataatatctctcccactaaaaatgcggctgctaaaatgttattatttccggtcttgctatatggcgcagaggcctggacaataatggaaacattaatgaaaaagctagaggcattcgagatgtgggtgtacccacgtatcctcaaaatatcctgggcgacccacaccaacgtacaggtattgcgtcgaatgggaaaacaaaaagaaatctcttttacaattaagaaacgaaatcttaaatatttcggtcatatcatgaggcatgataaatatcgtatactccaactgataacgcaaggtaaaatagagagcaaacgcggacccggaagaaaagacactcatgacttaaaaacttacgccaatgatttggacaaaaatcgatcgagttattcagaaacgcctcaaatgaaattaaaattgccatgatgatagccaacgtccacaacggacaaggcacatgaagaagaataaaaatatttttaatacacctaaccaaggtaaagtaataaccagccaatgtatgtatacaatatgcatgcgtacaatgcatgcatacaactttctctattttttttttgtggagtattaagcatttatttttttagcttaaagaagacatggaaaattatatggaatatacactcagtaaagctgtggtagatttatttttttacaagatgccaataaatcatacaccattgttacatctacactacagtcggtagtttatacgaatcggctttctgaaaaccttcttccgttttatttgtttatttttgtaaaactcaaaatatgtccttacaaacagtctatccactttaaactaaacaaattcaccataaaactccactttaaccctgataaaacaagaagagaacaaaataaaatgacctgaacgtcaaacaggtaaacagtaacactatgagaatggcgcgcgcttggggtatgcaactagtgacgtcaggccaatagagaagcgttcttgaaatttaaaataatgctagatttctaataaagattttttatagaaaggctttttcaattttgttgaaattttggacaattattcctagggtgtttcttaatcgttttacatgtttgaaatgactttttaattttttgtgaacatccctattgaaggattaggtatgcagtgccaggaggctgatctattccatcaaaaacgcagcatttagcactatataccatattcccaattgaaaaattaatgcactgtatataatagaatagaagatttaagataaaattaaagaagataaaagattttaaagtgcactggcgatatcacaatctaatttaatcatgagcaaagtaatatgttaattgatcgaattgagtagtttgtataacaattctctaaaaattacctacaataacgtaaaaattacatccttaagtagaattgggtacacaatatacctatatatcactatttttttatattccgacaattttccacgtttaattaataaaagatgatatagtacacgaatttttctctcaagtacagccttatattctgatatcccaaaagtcaatagccagaaatatttaacggtttcgattcagaagacataaagtggtgaaccaacgcaatcatcgatatagaatatctttgtttatacaaaaatctgtaaaataaatagctaactttccgtaccgccccagtattgctatcatttgaattgtttgattcattagcattaaaattaaattatgaattccaaataactgtttataaaattgtatcccacctctaacctatacttctttttaggacacgatgttgccattttaagagagaaaaattcttgtaccgtatatttatcaaacaacattaactgaagcattataaaccatgtaaaaatgaaaaaggattatcaaaaattacaaagtaacagtttgcaggtctcctattattattatttacacgtaatctatataaaactaaaataaatcccctatgatgattgttacgaatattgcttgcacagagtgatagtctgttaggatcattccatcgactccgcagaactggttcactgggaagtttcgcaattggtgattcgcttcagcggagtcatagtctcaagaaccattgcagaaaacgtagttaaatttagtagttcaattatatactgaagtttgaatgtgtattaatcgaccattatagatttgaatcacttaaataaaataacttaaataacacaggccggcaaacatgagactcacacaaaacagagtatgtgtacttttccgaaggtttttggcgcgcttgttacgttttaaaaattcaatcatctatatattattttattaataaaattattccactctttcatatcgtttcccacatttctcctattgtcttaaataaataatcgaatagatagcagactttgaatttggcaagagttgtcatggatacgttacggtacgtccgtcaccttgacagtcgtcgaattctaaaattgaggtgctacccacataacaatgatgttcgtatcatgttctaagcatatactaccaacattcgtcggagtatattctttttagtgtatgcgtagtacaagcatagcaagtaccttaaaaaacattctaaatttcatgttctttgcatatactttaaagtatattctcgtaccgaatatactgagtacactcgtgtacgtagtaactcggaatattcgtaaaagtttattcttagaatatacttttatcgaatatgcttagcacatacttataagtacattcttaacacatacttataagtagatacttttaaaatatcttaaaaataatatgtatgtataggaagtataatattagccttatagattatcaacttcgttatattttagaataattaataaaatttatgtatgtaggtagtattggacgaatttcatttcaaaattgttgtatggtaaaaaagtttaaacattaattgtattaacgtttattattaaaaattcgttttcataattgaaataactttaccatttcgagtttatccgagtatttttacatcgttggaatttgaatttaggtacattcaattcaatacgggaggctgtgatacgggccattccagaaccaatgcatgccaaaacgtgccaaaacccacaaccaaaggctttggtgttgccaagcatcgagtaagctttttccgtcaaacttaaaaattcccacttttataaaaaaattccctcctgtttacaaaatctgaaaagatatgtttaataattttc

SEQ ID NO: 1745 - DNA, 5587 bp, Diabrotica virgifera
  SmartBlast Evalue=1E-145; Info=Heat shock 70 kDa protein cognate 4 n=18 Tax=Endopterygota RepID=HSP7D_MANSE
agtaaatattggatacatatgttccactagttacattagtatacgaccaactctaaccatttagttagtggtgtcggcaccagaagaagatcaacacaatgtttgaatcatttttatcaaatattggcaaaaaatttagaaataagcaaaattcaagttcaggacatctcaatcgtcaggttttacgtcttattagtgggcccgtttgtgctgccattgcctatggtttagtcataaagggacaaggtgaaagaaatgtcctcattttcgatctgggtggcggtacctctaatgtatcaatcttaaccattgaggatggtatttttgaagtcaaatcagttgctggagacaatcatttgggaggtgaagacttcgacaacagaatggtcaatcattttgttggagaatttaagaggaaatacaaaaagaaccttaccagaaacaaacgtgcccttcgtcgtttgagagcaagctgtataagagctaagcacactctttcctcatcgacccaagctagcattgaaattgattctctctttgagggtattgacttctacacctcaatcaccagggctagatttgaagaactcaacgatgatttgttcagatctatcatagaacctgtagaaaaggccatcaaggacgccgagatggacaaatttcaagtgcacgagattgtattggttggtggatctacccgtattccaaaggtacaaaaactgttgcaagatttcttcaatggcaaaaaattgaacaagtcgattaatcccgatgaagctgtggcttatggtgcagccgtccaagctgctatattacacggagataagtctgaggaagtacaagacttactgttgctcgatgtcactccactttcattaggtatcgaaactgctggaggtgttatgaatgccatcatcaaacgtaactctttcattcccaacaaacaaactcagacatttactaccgactctgacaaccaacccggagtacttattcaaatatatgaaggtgatcgtgccatgaccaaggacaataatttcttgggtaatttccaacttaccgatatccctccagcgccccgaggtgtccctcagatcgaagtaaccttcgaaattgatggaaatggtattgtcaacgtcacagctattgaaaaatccaccaacaaagaaaacaagataaccatcaatagatgttgtcttcttagcaaagaagacaaagaaaacaacaaaattatcgacatggagaaatgtaatatggttattgtttgttgtgatactaacgaattagctgacaaggaaaaatacgaacacaaagaaaagagttcgaaaatacctgcaaccccatcatcgtcaagtcgtaccaaggtgccggacccacaatagggatgttcactaatttttaaatatagttaaattcaatagattacaaggtatataaaaacgtaacaatcataaaactgtttaaaaatgtatattttttaagataaatgagttcataatgttgattttcttggaggctagaaaaacggtaccctgcagcgaggctacggtctgtgacgtcagcagtcgtaacgtctttgatcgacgactagttttgtatacttatttactcagtgtatttgaatgtgcgcagttttttacgtatttaattattaaaaataaagccaaataagtggtgttttgttcctgggtgtgtaaatacatcaaaaaacagttctgacaagatttttattaccgttcagccaatttaaaacagaaaaagaaatggtttgttgcagctagaacttaaaataactaacttaaagaactaacttaataaaataaacattatagaagttttccagagactttcggcccttggtaataatgtaattgttctttctgcatttacatttttcaaaaatacttattagttttctcaggattcgaaaaaaatgaatgaatttaaatagcattggaccaagattttgcacctacccccttaaagagtaaatgaaaaagtttcgggacctcaaatttgtattccttaaactgggatattcctaaaaacgggattctaataatacatacagtaaaagtaaaccttgaaataactacatgtggatgtaggtatgactttatattatattaaaatcattaataatttagtgaaaagattggttgaaatgaaaatgtataatacccaagttcaaaaatattttttaccttggaacagttgtcaactcgaaatacgaaacaaccgaaataagatctagagttgaaaaggacatagcaacatttaacaacatgcatgagaaatattttcacccattgcgacataatatctctcccactaaaaatgcggctgctaaaatgttattatttccggtcttgctatatggcgcagaggcctggacaataatggaaacattaatgaaaaagctagaggcattcgagatgtgggtgtacccacgtatcctcaaaatatcctgggcgacccacaccaacgtacaggtattgcgtcgaatgggaaaacaaaaagaaatctcttttacaattaagaaacgaaatcttaaatatttcggtcatatcatgaggcatgataaatatcgtatactccaactgataacgcaaggtaaaatagagagcaaacgcggacccggaagaaaagacactcatgacttaaaaacttacgccaatgatttggacaaaaatcgatcgagttattcagaaacgcctcaaatgaaattaaaattgccatgatgatagccaacgtccacaacggacaaggcacatgaagaagaataaaaatatttttaatacacctaaccaaggtaaagtaataaccagccaatgtatgtatacaatatgcatgcgtacaatgcatgcatacaactttctctattttttttttgtggagtattaagcatttatttttttagcttaaagaagacatggaaaattatatggaatatacactcagtaaagctgtggtagatttatttttttacaagatgccaataaatcatacaccattgttacatctacactacagtcggtagtttatacgaatcggctttctgaaaaccttcttccgttttatttgtttatttttgtaaaactcaaaatatgtccttacaaacagtctatccactttaaactaaacaaattcaccataaaactccactttaaccctgataaaacaagaagagaacaaaataaaatgacctgaacgtcaaacaggtaaacagtaacactatgagaatggcgcgcgcttggggtatgcaactagtgacgtcaggccaatagagaagcgttcttgaaatttaaaataatgctagatttctaataaagattttttatagaaaggctttttcaattttgttgaaattttggacaattattcctagggtgtttcttaatcgttttacatgtttgaaatgactttttaattttttgtgaacatccctattgaaggattaggtatgcagtgccaggaggctgatctattccatcaaaaacgcagcatttagcactatataccatattcccaattgaaaaattaatgcactgtatataatagaatagaagatttaagataaaattaaagaagataaaagattttaaagtgcactggcgatatcacaatctaatttaatcatgagcaaagtaatatgttaattgatcgaattgagtagtttgtataacaattctctaaaaattacctacaataacgtaaaaattacatccttaagtagaattgggtacacaatatacctatatatcactatttttttatattccgacaattttccacgtttaattaataaaagatgatatagtacacgaatttttctctcaagtacagccttatattctgatatcccaaaagtcaatagccagaaatatttaacggtttcgattcagaagacataaagtggtgaaccaacgcaatcatcgatatagaatatctttgtttatacaaaaatctgtaaaataaatagctaactttccgtaccgccccagtattgctatcatttgaattgtttgattcattagcattaaaattaaattatgaattccaaataactgtttataaaattgtatcccacctctaacctatacttctttttaggacacgatgttgccattttaagagagaaaaattcttgtaccgtatatttatcaaacaacattaactgaagcattataaaccatgtaaaaatgaaaaaggattatcaaaaattacaaagtaacagtttgcaggtctcctattattattatttacacgtaatctatataaaactaaaataaatcccctatgatgattgttacgaatattgcttgcacagagtgatagtctgttaggatcattccatcgactccgcagaactggttcactgggaagtttcgcaattggtgattcgcttcagcggagtcatagtctcaagaaccattgcagaaaacgtagttaaatttagtagttcaattatatactgaagtttgaatgtgtattaatcgaccattatagatttgaatcacttaaataaaataacttaaataacacaggccggcaaacatgagactcacacaaaacagagtatgtgtacttttccgaaggtttttggcgcgcttgttacgttttaaaaattcaatcatctatatattattttattaataaaattattccactctttcatatcgtttcccacatttctcctattgtcttaaataaataatcgaatagatagcagactttgaatttggcaagagttgtcatggatacgttacggtacgtccgtcaccttgacagtcgtcgaattctaaaattgaggtgctacccacataacaatgatgttcgtatcatgttctaagcatatactaccaacattcgtcggagtatattctttttagtgtatgcgtagtacaagcatagcaagtaccttaaaaaacattctaaatttcatgttctttgcatatactttaaagtatattctcgtaccgaatatactgagtacactcgtgtacgtagtaactcggaatattcgtaaaagtttattcttagaatatacttttatcgaatatgcttagcacatacttataagtacattcttaacacatacttataagtagatacttttaaaatatcttaaaaataatatgtatgtataggaagtataatattagccttatagattatcaacttcgttatattttagaataattaataaaatttatgtatgtaggtagtattggacgaatttcatttcaaaattgttgtatggtaaaaaagtttaaacattaattgtattaacgtttattattaaaaattcgttttcataattgaaataactttaccatttcgagtttatccgagtatttttacatcgttggaatttgaatttaggtacattcaattcaatacgggaggctgtgatacgggccattccagaaccaatgcatgccaaaacgtgccaaaacccacaaccaaaggctttggtgttgccaagcatcgagtaagctttttccgtcaaacttaaaaattcccacttttataaaaaaattccctcctgtttacaaaatctgaaaagatatgtttaataattttc

SEQ ID NO: 1746 - DNA, 4546 bp, Diabrotica virgifera
  SmartBlast Evalue=0; Info=Heat shock 70 kDa protein cognate 4 n= 18 Tax=Endopterygota RepID=HSP7D_MANSE
agtaaatattggatacatatgttccactagttacattagtatacgaccaactctaaccatttagttagtggtgtcggcaccagaagaagatcaacacaatgtttgaatcatttttatcaaatattggcaaaaaatttagaaataagcaaaattcaagttcaggacatctcaatcgtcagatggcccccgcaattggtattgatttaggaacaacatactcctgtgtaggagttttccagcatggcaaagttgaaattattgtcaacgatcatggtaacagaaccacaccatcatatatcgccttcacagacacagaatgtctcattggagattctgccaaagacaaggtagacataaaccccagtaacacaatttttggtgctaaacgtctaattggacgtcgctttgatgacggtgctgtacagtctgacatgaaacattggccttttgaagtagtaaatcatgccggtaaccaaaattaaagttacccacaagggcaaagagaaatccttctctccagaagaagtcagttccatggtccttacaaaaatgaaagaaatagcagaagcatacctagggaagaacgtcacaaatgctgtcatcacagtacctgtttatttcaatgagtcacaacgtcaagctactaaatatgctggacaccttgctggacttcaggttttacgtcttattagtgggcccgtttgtgctgccattgcctatggtttagtcataaagggacaaggtgaaagaaatgtcctcattttcgatctgggtggcggtacctctaatgtatcaatcttaaccattgaggatggtatttttgaagtcaaatcagttgctggagacaatcatttgggaggtgaagacttcgacaacagaatggtcaatcattttgttggagaatttaagaggaaatacaaaaagaaccttaccagaaacaaacgtgcccttcgtcgtttgagagcaagctgtataagagctaagcacactctttcctcatcgacccaagctagcattgaaattgattctctctttgagggtattgacttctacacctcaatcaccagggctagatttgaagaactcaacgatgatttgttcagatctatcatagaacctgtagaaaaggccatcaaggacgccgagatggacaaatttcaagtgcacgagattgtattggttggtggatctacccgtattccaaaggtacaaaaactgttgcaagatttcttcaatggcaaaaaattgaacaagtcgattaatcccgatgaagctgtggcttatggtgcagccgtccaagctgctatattacacggagataagtctgaggaagtacaagacttactgttgctcgatgtcactccactttcattaggtatcgaaactgctggaggtgttatgaatgccatcatcaaacgtaactctttcattcccaacaaacaaactcagacatttactaccgactctgacaaccaacccggagtacttattcaaatatatgaaggtgatcgtgccatgaccaaggacaataatttcttgggtaatttccaacttaccgatatccctccagcgccccgaggtgtccctcagatcgaagtaaccttcgaaattgatggaaatggtattgtcaacgtcacagctattgaaaaatccaccaacaaagaaaacaagataaccatcaatagatgttgtcttcttagcaaagaagacaaagaaaacaacaaaattatcgacatggagaaatgtaatatggttattgtttgttgtgatactaacgaattagctgacaaggaaaaatacgaacacaaagaaaagagttcgaaaatacctgcaaccccatcatcgtcaagtcgtaccaaggtgccggacccacaatagggatgttcactaatttttaaatatagttaaattcaatagattacaaggtatataaaaacgtaacaatcataaaactgtttaaaaatgtatattttttaagataaatgagttcataatgttgattttcttggaggctagaaaaacggtaccctgcagcgaggctacggtctgtgacgtcagcagtcgtaacgtctttgatcgacgactagttttgtatacttatttactcagtgtatttgaatgtgcgcagttttttacgtatttaattattaaaaataaagccaaataagtggtgttttgttcctgggtgtgtaaatacatcaaaaaacagttctgacaagatttttattaccgttcagccaatttaaaacagaaaaagaaatggtttgttgcagctagaacttaaaataactaacttaaagaactaacttaataaaataaacattatagaagttttccagagactttcggcccttggtaataatgtaattgttctttctgcatttacatttttcaaaaatacttattagttttctcaggattcgaaaaaaatgaatgaatttaaatagcattggaccaagattttgcacctacccccttaaagagtaaatgaaaaagtttcgggacctcaaatttgtattccttaaactgggatattcctaaaaacgggattctaataatacatacagtaaaagtaaaccttgaaataactacatgtggatgtaggtatgactttatattatattaaaatcattaataatttagtgaaaagattggttgaaatgaaaatgtataatacccaagttcaaaaatattttttaccttggaacagttgtcaactcgaaatacgaaacaaccgaaataagatctagagttgaaaaggacatagcaacatttaacaacatgcatgagaaatattttcacccattgcgacataatatctctcccactaaaaatgcggctgctaaaatgttattatttccggtcttgctatatggcgcagaggcctggacaataatggaaacattaatgaaaaagctagaggcattcgagatgtgggtgtacccacgtatcctcaaaatatcctgggcgacccacaccaacgtacaggtattgcgtcgaatgggaaaacaaaaagaaatctcttttacaattaagaaacgaaatcttaaatatttcggtcatatcatgaggcatgataaatatcgtatactccaactgataacgcaaggtaaaatagagagcaaacgcggacccggaagaaaagacactcatgacttaaaaacttacgccaatgatttggacaaaaatcgatcgagttattcagaaacgcctcaaatgaaattaaaattgccatgatgatagccaacgtccacaacggacaaggcacatgaagaagaataaaaatatttttaatacacctaaccaaggtaaagtaataaccagccaatgtatgtatacaatatgcatgcgtacaatgcatgcatacaactttctctattttttttttgtggagtattaagcatttatttttttagcttaaagaagacatggaaaattatatggaatatacactcagtaaagctgtggtagatttatttttttacaagatgccaataaatcatacaccattgttacatctacactacagtcggtagtttatacgaatcggctttctgaaaaccttcttccgttttatttgtttatttttgtaaaactcaaaatatgtccttacaaacagtctatccactttaaactaaacaaattcaccataaaactccactttaaccctgataaaacaagaagagaacaaaataaaatgacctgaacgtcaaacaggtaaacagtaacactatgagaatggcgcgcgcttggggtatgcaactagtgacgtcaggccaatagagaagcgttcttgaaatttaaaataatgctagatttctaataaagattttttatagaaaggctttttcaattttgttgaaattttggacaattattcctagggtgtttcttaatcgttttacatgtttgaaatgactttttaattttttgtgaacatccctattgaagtagtcggatgcgtcgtggccttctgcaactgttccggaaagaaaacctggttctggggctattaaaaaacatcatctaagactgacactatcatcagggctgtagtaatgtttaacccttccataactgccaccgaatccaaaaataaatatctttataaagtattaatttataaaattaaaataacaattatcctgatttatgcgtttaaaagtaaaagacgcaggagaacatgctgccaaattaaaatggagcttcgcaggacacaatgcccgactgaaggataaaagatggaatcacgaaatacaacaatggagaccgtggttaggaagagaagcagaaggaaggcccaaatgagatgggctgatggcattaagaagattggagggcacaagaaacaagtggcgcaaaatagaaaacactggattgaattgggggaggcctatgtccaaaattggattacttaaggctgaagaagaacaacaacaaatgagggcacggaaaaaaatagataagcctaaatatcattttaccacaaaactgattcggatgatttatcaccaacaaaaatgtatctgaagttgattatggtttg

SEQ ID NO: 1747 - DNA, 4124 bp, Diabrotica virgifera
  SmartBlast Evalue=0; Info=Heat shock 70 kDa protein cognate 4 n= 18 Tax=Endopterygota RepID=HSP7D_MANSE
agtaaatattggatacatatgttccactagttacattagtatacgaccaactctaaccatttagttagtggtgtcggcaccagaagaagatcaacacaatgtttgaatcatttttatcaaatattggcaaaaaatttagaaataagcaaaattcaagttcaggacatctcaatcgtcagatggcccccgcaattggtattgatttaggaacaacatactcctgtgtaggagttttccagcatggcaaagttgaaattattgtcaacgatcatggtaacagaaccacaccatcatatatcgccttcacagacacagaatgtctcattggagattctgccaaagacaaggtagacataaaccccagtaacacaatttttggtgctaaacgtctaattggacgtcgctttgatgacggtgctgtacagtctgacatgaaacattggccttttgaagtagtaaatcatgccggtaaccaaaattaaagttacccacaagggcaaagagaaatccttctctccagaagaagtcagttccatggtccttacaaaaatgaaagaaatagcagaagcatacctagggaagaacgtcacaaatgctgtcatcacagtacctgtttatttcaatgagtcacaacgtcaagctactaaatatgctggacaccttgctggacttcaggttttacgtcttattagtgggcccgtttgtgctgccattgcctatggtttagtcataaagggacaaggtgaaagaaatgtcctcattttcgatctgggtggcggtacctctaatgtatcaatcttaaccattgaggatggtatttttgaagtcaaatcagttgctggagacaatcatttgggaggtgaagacttcgacaacagaatggtcaatcattttgttggagaatttaagaggaaatacaaaaagaaccttaccagaaacaaacgtgcccttcgtcgtttgagagcaagctgtataagagctaagcacactctttcctcatcgacccaagctagcattgaaattgattctctctttgagggtattgacttctacacctcaatcaccagggctagatttgaagaactcaacgatgatttgttcagatctatcatagaacctgtagaaaaggccatcaaggacgccgagatggacaaatttcaagtgcacgagattgtattggttggtggatctacccgtattccaaaggtacaaaaactgttgcaagatttcttcaatggcaaaaaattgaacaagtcgattaatcccgatgaagctgtggcttatggtgcagccgtccaagctgctatattacacggagataagtctgaggaagtacaagacttactgttgctcgatgtcactccactttcattaggtatcgaaactgctggaggtgttatgaatgccatcatcaaacgtaactctttcattcccaacaaacaaactcagacatttactaccgactctgacaaccaacccggagtacttattcaaatatatgaaggtgatcgtgccatgaccaaggacaataatttcttgggtaatttccaacttaccgatatccctccagcgccccgaggtgtccctcagatcgaagtaaccttcgaaattgatggaaatggtattgtcaacgtcacagctattgaaaaatccaccaacaaagaaaacaagataaccatcaatagatgttgtcttcttagcaaagaagacaaagaaaacaacaaaattatcgacatggagaaatgtaatatggttattgtttgttgtgatactaacgaattagctgacaaggaaaaatacgaacacaaagaaaagagttcgaaaatacctgcaaccccatcatcgtcaagtcgtaccaaggtgccggacccacaatagggatgttcactaatttttaaatatagttaaattcaatagattacaaggtatataaaaacgtaacaatcataaaactgtttaaaaatgtatattttttaagataaatgagttcataatgttgattttcttggaggctagaaaaacggtaccctgcagcgaggctacggtctgtgacgtcagcagtcgtaacgtctttgatcgacgactagttttgtatacttatttactcagtgtatttgaatgtgcgcagttttttacgtatttaattattaaaaataaagccaaataagtggtgttttgttcctgggtgtgtaaatacatcaaaaaacagttctgacaagatttttattaccgttcagccaatttaaaacagaaaaagaaatggtttgttgcagctagaacttaaaataactaacttaaagaactaacttaataaaataaacattatagaagttttccagagactttcggcccttggtaataatgtaattgttctttctgcatttacatttttcaaaaatacttattagttttctcaggattcgaaaaaaatgaatgaatttaaatagcattggaccaagattttgcacctacccccttaaagagtaaatgaaaaagtttcgggacctcaaatttgtattccttaaactgggatattcctaaaaacgggattctaataatacatacagtaaaagtaaaccttgaaataactacatgtggatgtaggtatgactttatattatattaaaatcattaataatttagtgaaaagattggttgaaatgaaaatgtataatacccaagttcaaaaatattttttaccttggaacagttgtcaactcgaaatacgaaacaaccgaaataagatctagagttgaaaaggacatagcaacatttaacaacatgcatgagaaatattttcacccattgcgacataatatctctcccactaaaaatgcggctgctaaaatgttattatttccggtcttgctatatggcgcagaggcctggacaataatggaaacattaatgaaaaagctagaggcattcgagatgtgggtgtacccacgtatcctcaaaatatcctgggcgacccacaccaacgtacaggtattgcgtcgaatgggaaaacaaaaagaaatctcttttacaattaagaaacgaaatcttaaatatttcggtcatatcatgaggcatgataaatatcgtatactccaactgataacgcaaggtaaaatagagagcaaacgcggacccggaagaaaagacactcatgacttaaaaacttacgccaatgatttggacaaaaatcgatcgagttattcagaaacgcctcaaatgaaattaaaattgccatgatgatagccaacgtccacaacggacaaggcacatgaagaagaataaaaatatttttaatacacctaaccaaggtaaagtaataaccagccaatgtatgtatacaatatgcatgcgtacaatgcatgcatacaactttctctattttttttttgtggagtattaagcatttatttttttagcttaaagaagacatggaaaattatatggaatatacactcagtaaagctgtggtagatttatttttttacaagatgccaataaatcatacaccattgttacatctacactacagtcggtagtttatacgaatcggctttctgaaaaccttcttccgttttatttgtttatttttgtaaaactcaaaatatgtccttacaaacagtctatccactttaaactaaacaaattcaccataaaactccactttaaccctgataaaacaagaagagaacaaaataaaatgacctgaacgtcaaacaggtaaacagtaacactatgagaatggcgcgcgcttggggtatgcaactagtgacgtcaggccaatagagaagcgttcttgaaatttaaaataatgctagatttctaataaagattttttatagaaaggctttttcaattttgttgaaattttggacaattattcctagggtgtttcttaatcgttttacatgtttgaaatgactttttaattttttgtgaacatccctattgcaaaaaggaaacgtattcaggatagcggtggtaaacagacaccatcctgatactcaactagacaaggtccaagcagacctgatcatcaacaaactggaacgagcagtgaataaggctcttattggaagtcagaatcaacttctgcagttccataaaatatcctttagctcagggac

SEQ ID NO: 1748 - DNA, 4050 bp, Diabrotica virgifera
  SmartBlast Evalue=1E-145; Info=Heat shock 70 kDa protein cognate 4 n=18 Tax=Endopterygota RepID=HSP7D_MANSE
agtaaatattggatacatatgttccactagttacattagtatacgaccaactctaaccatttagttagtggtgtcggcaccagaagaagatcaacacaatgtttgaatcatttttatcaaatattggcaaaaaatttagaaataagcaaaattcaagttcaggacatctcaatcgtcaggttttacgtcttattagtgggcccgtttgtgctgccattgcctatggtttagtcataaagggacaaggtgaaagaaatgtcctcattttcgatctgggtggcggtacctctaatgtatcaatcttaaccattgaggatggtatttttgaagtcaaatcagttgctggagacaatcatttgggaggtgaagacttcgacaacagaatggtcaatcattttgttggagaatttaagaggaaatacaaaaagaaccttaccagaaacaaacgtgcccttcgtcgtttgagagcaagctgtataagagctaagcacactctttcctcatcgacccaagctagcattgaaattgattctctctttgagggtattgacttctacacctcaatcaccagggctagatttgaagaactcaacgatgatttgttcagatctatcatagaacctgtagaaaaggccatcaaggacgccgagatggacaaatttcaagtgcacgagattgtattggttggtggatctacccgtattccaaaggtacaaaaactgttgcaagatttcttcaatggcaaaaaattgaacaagtcgattaatcccgatgaagctgtggcttatggtgcagccgtccaagctgctatattacacggagataagtctgaggaagtacaagacttactgttgctcgatgtcactccactttcattaggtatcgaaactgctggaggtgttatgaatgccatcatcaaacgtaactctttcattcccaacaaacaaactcagacatttactaccgactctgacaaccaacccggagtacttattcaaatatatgaaggtgatcgtgccatgaccaaggacaataatttcttgggtaatttccaacttaccgatatccctccagcgccccgaggtgtccctcagatcgaagtaaccttcgaaattgatggaaatggtattgtcaacgtcacagctattgaaaaatccaccaacaaagaaaacaagataaccatcaatagatgttgtcttcttagcaaagaagacaaagaaaacaacaaaattatcgacatggagaaatgtaatatggttattgtttgttgtgatactaacgaattagctgacaaggaaaaatacgaacacaaagaaaagagttcgaaaatacctgcaaccccatcatcgtcaagtcgtaccaaggtgccggacccacaatagggatgttcactaatttttaaatatagttaaattcaatagattacaaggtatataaaaacgtaacaatcataaaactgtttaaaaatgtatattttttaagataaatgagttcataatgttgattttcttggaggctagaaaaacggtaccctgcagcgaggctacggtctgtgacgtcagcagtcgtaacgtctttgatcgacgactagttttgtatacttatttactcagtgtatttgaatgtgcgcagttttttacgtatttaattattaaaaataaagccaaataagtggtgttttgttcctgggtgtgtaaatacatcaaaaaacagttctgacaagatttttattaccgttcagccaatttaaaacagaaaaagaaatggtttgttgcagctagaacttaaaataactaacttaaagaactaacttaataaaataaacattatagaagttttccagagactttcggcccttggtaataatgtaattgttctttctgcatttacatttttcaaaaatacttattagttttctcaggattcgaaaaaaatgaatgaatttaaatagcattggaccaagattttgcacctacccccttaaagagtaaatgaaaaagtttcgggacctcaaatttgtattccttaaactgggatattcctaaaaacgggattctaataatacatacagtaaaagtaaaccttgaaataactacatgtggatgtaggtatgactttatattatattaaaatcattaataatttagtgaaaagattggttgaaatgaaaatgtataatacccaagttcaaaaatattttttaccttggaacagttgtcaactcgaaatacgaaacaaccgaaataagatctagagttgaaaaggacatagcaacatttaacaacatgcatgagaaatattttcacccattgcgacataatatctctcccactaaaaatgcggctgctaaaatgttattatttccggtcttgctatatggcgcagaggcctggacaataatggaaacattaatgaaaaagctagaggcattcgagatgtgggtgtacccacgtatcctcaaaatatcctgggcgacccacaccaacgtacaggtattgcgtcgaatgggaaaacaaaaagaaatctcttttacaattaagaaacgaaatcttaaatatttcggtcatatcatgaggcatgataaatatcgtatactccaactgataacgcaaggtaaaatagagagcaaacgcggacccggaagaaaagacactcatgacttaaaaacttacgccaatgatttggacaaaaatcgatcgagttattcagaaacgcctcaaatgaaattaaaattgccatgatgatagccaacgtccacaacggacaaggcacatgaagaagaataaaaatatttttaatacacctaaccaaggtaaagtaataaccagccaatgtatgtatacaatatgcatgcgtacaatgcatgcatacaactttctctattttttttttgtggagtattaagcatttatttttttagcttaaagaagacatggaaaattatatggaatatacactcagtaaagctgtggtagatttatttttttacaagatgccaataaatcatacaccattgttacatctacactacagtcggtagtttatacgaatcggctttctgaaaaccttcttccgttttatttgtttatttttgtaaaactcaaaatatgtccttacaaacagtctatccactttaaactaaacaaattcaccataaaactccactttaaccctgataaaacaagaagagaacaaaataaaatgacctgaacgtcaaacaggtaaacagtaacactatgagaatggcgcgcgcttggggtatgcaactagtgacgtcaggccaatagagaagcgttcttgaaatttaaaataatgctagatttctaataaagattttttatagaaaggctttttcaattttgttgaaattttggacaattattcctagggtgtttcttaatcgttttacatgtttgaaatgactttttaattttttgtgaacatccctattgaagtagtcggatgcgtcgtggccttctgcaactgttccggaaagaaaacctggttctggggctattaaaaaacatcatctaagactgacactatcatcagggctgtagtaatgtttaacccttccataactgccaccgaatccaaaaataaatatctttataaagtattaatttataaaattaaaataacaattatcctgatttatgcgtttaaaagtaaaagacgcaggagaacatgctgccaaattaaaatggagcttcgcaggacacaatgcccgactgaaggataaaagatggaatcacgaaatacaacaatggagaccgtggttaggaagagaagcagaaggaaggcccaaatgagatgggctgatggcattaagaagattggagggcacaagaaacaagtggcgcaaaatagaaaacactggattgaattgggggaggcctatgtccaaaattggattacttaaggctgaagaagaacaacaacaaatgagggcacggaaaaaaatagataagcctaaatatcattttaccacaaaactgattcggatgatttatcaccaacaaaaatgtatctgaagttgattatggtttg

SEQ ID NO: 1749 - DNA, 3628 bp, Diabrotica virgifera
  SmartBlast Evalue=1E-145; Info=Heat shock 70 kDa protein cognate 4 n=18 Tax=Endopterygota RepID=HSP7D_MANSE
agtaaatattggatacatatgttccactagttacattagtatacgaccaactctaaccatttagttagtggtgtcggcaccagaagaagatcaacacaatgtttgaatcatttttatcaaatattggcaaaaaatttagaaataagcaaaattcaagttcaggacatctcaatcgtcaggttttacgtcttattagtgggcccgtttgtgctgccattgcctatggtttagtcataaagggacaaggtgaaagaaatgtcctcattttcgatctgggtggcggtacctctaatgtatcaatcttaaccattgaggatggtatttttgaagtcaaatcagttgctggagacaatcatttgggaggtgaagacttcgacaacagaatggtcaatcattttgttggagaatttaagaggaaatacaaaaagaaccttaccagaaacaaacgtgcccttcgtcgtttgagagcaagctgtataagagctaagcacactctttcctcatcgacccaagctagcattgaaattgattctctctttgagggtattgacttctacacctcaatcaccagggctagatttgaagaactcaacgatgatttgttcagatctatcatagaacctgtagaaaaggccatcaaggacgccgagatggacaaatttcaagtgcacgagattgtattggttggtggatctacccgtattccaaaggtacaaaaactgttgcaagatttcttcaatggcaaaaaattgaacaagtcgattaatcccgatgaagctgtggcttatggtgcagccgtccaagctgctatattacacggagataagtctgaggaagtacaagacttactgttgctcgatgtcactccactttcattaggtatcgaaactgctggaggtgttatgaatgccatcatcaaacgtaactctttcattcccaacaaacaaactcagacatttactaccgactctgacaaccaacccggagtacttattcaaatatatgaaggtgatcgtgccatgaccaaggacaataatttcttgggtaatttccaacttaccgatatccctccagcgccccgaggtgtccctcagatcgaagtaaccttcgaaattgatggaaatggtattgtcaacgtcacagctattgaaaaatccaccaacaaagaaaacaagataaccatcaatagatgttgtcttcttagcaaagaagacaaagaaaacaacaaaattatcgacatggagaaatgtaatatggttattgtttgttgtgatactaacgaattagctgacaaggaaaaatacgaacacaaagaaaagagttcgaaaatacctgcaaccccatcatcgtcaagtcgtaccaaggtgccggacccacaatagggatgttcactaatttttaaatatagttaaattcaatagattacaaggtatataaaaacgtaacaatcataaaactgtttaaaaatgtatattttttaagataaatgagttcataatgttgattttcttggaggctagaaaaacggtaccctgcagcgaggctacggtctgtgacgtcagcagtcgtaacgtctttgatcgacgactagttttgtatacttatttactcagtgtatttgaatgtgcgcagttttttacgtatttaattattaaaaataaagccaaataagtggtgttttgttcctgggtgtgtaaatacatcaaaaaacagttctgacaagatttttattaccgttcagccaatttaaaacagaaaaagaaatggtttgttgcagctagaacttaaaataactaacttaaagaactaacttaataaaataaacattatagaagttttccagagactttcggcccttggtaataatgtaattgttctttctgcatttacatttttcaaaaatacttattagttttctcaggattcgaaaaaaatgaatgaatttaaatagcattggaccaagattttgcacctacccccttaaagagtaaatgaaaaagtttcgggacctcaaatttgtattccttaaactgggatattcctaaaaacgggattctaataatacatacagtaaaagtaaaccttgaaataactacatgtggatgtaggtatgactttatattatattaaaatcattaataatttagtgaaaagattggttgaaatgaaaatgtataatacccaagttcaaaaatattttttaccttggaacagttgtcaactcgaaatacgaaacaaccgaaataagatctagagttgaaaaggacatagcaacatttaacaacatgcatgagaaatattttcacccattgcgacataatatctctcccactaaaaatgcggctgctaaaatgttattatttccggtcttgctatatggcgcagaggcctggacaataatggaaacattaatgaaaaagctagaggcattcgagatgtgggtgtacccacgtatcctcaaaatatcctgggcgacccacaccaacgtacaggtattgcgtcgaatgggaaaacaaaaagaaatctcttttacaattaagaaacgaaatcttaaatatttcggtcatatcatgaggcatgataaatatcgtatactccaactgataacgcaaggtaaaatagagagcaaacgcggacccggaagaaaagacactcatgacttaaaaacttacgccaatgatttggacaaaaatcgatcgagttattcagaaacgcctcaaatgaaattaaaattgccatgatgatagccaacgtccacaacggacaaggcacatgaagaagaataaaaatatttttaatacacctaaccaaggtaaagtaataaccagccaatgtatgtatacaatatgcatgcgtacaatgcatgcatacaactttctctattttttttttgtggagtattaagcatttatttttttagcttaaagaagacatggaaaattatatggaatatacactcagtaaagctgtggtagatttatttttttacaagatgccaataaatcatacaccattgttacatctacactacagtcggtagtttatacgaatcggctttctgaaaaccttcttccgttttatttgtttatttttgtaaaactcaaaatatgtccttacaaacagtctatccactttaaactaaacaaattcaccataaaactccactttaaccctgataaaacaagaagagaacaaaataaaatgacctgaacgtcaaacaggtaaacagtaacactatgagaatggcgcgcgcttggggtatgcaactagtgacgtcaggccaatagagaagcgttcttgaaatttaaaataatgctagatttctaataaagattttttatagaaaggctttttcaattttgttgaaattttggacaattattcctagggtgtttcttaatcgttttacatgtttgaaatgactttttaattttttgtgaacatccctattgcaaaaaggaaacgtattcaggatagcggtggtaaacagacaccatcctgatactcaactagacaaggtccaagcagacctgatcatcaacaaactggaacgagcagtgaataaggctcttattggaagtcagaatcaacttctgcagttccataaaatatcctttagctcagggac

SEQ ID NO: 1750 - DNA, 2928 bp, Diabrotica virgifera
gtgttatttaacacactacctatatcaaatacatatataaatatattctatcaaaatatacaaaatagttattttcaagtgacctgcactatgaacatatgacgtgttggtgcatcatgaaggtgtcacgaagatattttgttaatggaatctgaaatcaacaataaatcattcaagaacgagctccctttcacccataactacagtaggtaccaacaatttacctaaaaaattactgacaacaggtgacgtattccaaagtgtgacgtcacaatgtattttttgaggttatgtcaaagtttgggcgcgtctacgaaccataaggcattttttgttggcaaactaaaatgatttttcgaaattatttcctaattcttacaataaataaactcaaaaatagctgaaaatgcactgcttttcaaatattatgccttttcggttggtatttgaatccagacgtgatcataacctccaaattagacttcatgacgtcaccgcaaatatgtcatattacaagttttcgtcaaaacgtaacgtcatcaaacgtctaaacgaactacataccacaccaaaaaatatattagggaatctatttttgaagggaactctttttcccctcaaacaattaattttctcggaactacgaacgattttccgaaatattttcgtaatttttaatacgactaaaccccaaaataccacaaatatttgttgatatattagtcgatttaatcgttgcatctataatcacgttgtagcgaaatatacaaaacaatatacagtgcgctaattgaaggattaggtatgcagtgtcaggaggctgatctattccaccaacaacgcagcatttagcactatataccatattcccaattgaaaaattaatgcactgtatataatagaatagaagatttaagataaaattaaagaagataaaagattttaaagtgcactggcgatatcacaatctaatttaatcatgagcaaagtaatatgttaattgatcgaattgagtagtttgtataacaattctctaaaaattacctacaataacgtaaaaattacatccttaagtagaattgggtacacaatatacctatatatcactatttttttatattccgacaattttccacgtttaattaataaaagatgatatagtacacgaatttttctctcaagtacagccttatattctgatatcccaaaagtcaatagccagaaatatttaacggtttcgattcagaagacataaagtggtgaaccaacgcaatcatcgatatagaatatctttgtttatacaaaaatctgtaaaataaatagctaactttccgtaccgccccagtattgctatcatttgaattgtttgattcattagcattaaaattaaattatgaattccaaataactgtttataaaattgtatcccacctctaacctatacttctttttaggacacgatgttgccattttaagagagaaaaattcttgtaccgtatatttatcaaacaacattaactgaagcattataaaccatgtaaaaatgaaaaaggattatcaaaaattacaaagtaacagtttgcaggtctcctattattattatttacacgtaatctatataaaactaaaataaatcccctatgatgattgttacgaatattgcttgcacagagtgatagtctgttaggatcattccatcgactccgcagaactggttcactgggaagtttcgcaattggtgattcgcttcagcggagtcatagtctcaagaaccattgcagaaaacgtagttaaatttagtagttcaattatatactgaagtttgaatgtgtattaatcgaccattatagatttgaatcacttaaataaaataacttaaataacacaggccggcaaacatgagactcacacaaaacagagtatgtgtacttttccgaaggtttttggcgcgcttgttacgttttaaaaattcaatcatctatatattattttattaataaaattattccactctttcatatcgtttcccacatttctcctattgtcttaaataaataatcgaatagatagcagactttgaatttggcaagagttgtcatggatacgttacggtacgtccgtcaccttgacagtcgtcgaattctaaaattgaggtgctacccacataacaatgatgttcgtatcatgttctaagcatatactaccaacattcgtcggagtatattctttttagtgtatgcgtagtacaagcatagcaagtaccttaaaaaacattctaaatttcatgttctttgcatatactttaaagtatattctcgtaccgaatatactgagtacactcgtgtacgtagtaactcggaatattcgtaaaagtttattcttagaatatacttttatcgaatatgcttagcacatacttataagtacattcttaacacatacttataagtagatacttttaaaatatcttaaaaataatatgtatgtataggaagtataatattagccttatagattatcaacttcgttatattttagaataattaataaaatttatgtatgtaggtagtattggacgaatttcatttcaaaattgttgtatggtaaaaaagtttaaacattaattgtattaacgtttattattaaaaattcgttttcataattgaaataactttaccatttcgagtttatccgagtatttttacatcgttggaatttgaatttaggtacattcaattcaatacgggaggctgtgatacgggccattccagaaccaatgcatgccaaaacgtgccaaaacccacaaccaaaggctttggtgttgccaagcatcgagtaagctttttccgtcaaacttaaaaattcccacttttataaaaaaattccctcctgtttacaaaatctgaaaagatatgtttaataattttc

SEQ ID NO: 1751 - DNA, 897 bp, Diabrotica virgifera
gtcccatgtattttgtcggagaaaacttccaattgatttgttaccctttcattaaaatctcatgcaaaaattagaatgctatttaccaccaatataattcctgtcatttgacatgttttacgtgtaggacttattaaaacccacataacaatgatgttcgtatcatgttctaagcatatactaccaacattcgtcggagtatattctttttagtacaagcatagcatgtaccttaaaaaatattctaaatttcatgttctttgcatatactttaaagtatattctcgtaccgaatataccgagtacatgcgtgtacgtagtaactcggaatattcgtaaaagtttattcttagaatatacctttatcgaatattcttagcacgtacttataagtacattcataacacatacttataagtagatacttttaaaatatcttaaaaataatatgtatgtataggaagtataatattagccttatagattatcaacttcgttatattttagaataattaataaaatttatgtatgtaggtagtattggacgaatttcatttcaaaattgttgtatggtaaaaaagtttaaacattaattgtattaacgtttattattaaaaattcgttttcataattgaaataactttaccatttcgagtttatccgagtatttttacatcgttggaatttgaatttaggtacattcaattcaatacgggaggctgtgatacgggccattccagaaccaatgcatgccaaaacgtgccaaaacccacaaccaaaggctttggtgttgccaagcatcgagtaagctttttccgtcaaacttaaaaattcccacttttataaaaaaattccctcctgtttacaaaatctgaaaagatatgtttaataattttc

SEQ ID NO: 1752 - DNA, 818 bp, Diabrotica virgifera
  SmartBlast Evalue=6E-14; Info=Reverse transcriptase n=2 Tax= Ostrinia nubilalis RepID=A4KWG0_OSTNU
atttaatcggtcttctggatatagaggtatttaagtacaggaaatgaacactcaactgatcaggcaacgcagcaagtgttaaataatctataatctctactacagtttattgatcaagtagtttgcaggcaattttttagaaaaaagcctttgagcaatttgaacaaaaatattttgagcaattgggggagcaagtgtggtataagtagtgtgaccaactagcccgaaaaatccgggacatgtccgagaccatccgaattttcaatgttttggtaaaattctattttgaaatttttaatattcttctaaaatctcatcaaactgaattggtaggacgaaaaaaagtcgacagtttcgacagtgtaatattaagatcaatgctcggggtgaggcttatagataaaaaacaaataaatggattagaaacaaaaccaaagtaaaagacgcaggagaacatgctgccaaattaaaatggagcttcgcaggacacaatgcccgactgaaggataaaagatggaatcacgaaatacaacaatggagaccgtggttaggaagagaagcagaaggaaggcccaaatgagatgggctgatggcattaagaagattggagggcacaagaaacaagtggcgcaaaatagaaaacactggattgaattgggggaggcctatgtccaaaattggattacttaaggctgaagaagaacaacaacaaatgagggcacggaaaaaaatagataagcctaaatatcattttaccacaaaactgattcggatgatttatcaccaacaaaaatgtatctgaagttgattatggtttg

SEQ ID NO: 1753 - DNA, 3063 bp, Diabrotica virgifera
  SmartBlast Evalue=1E-21; Info=Endonuclease-reverse transcriptase n=1 Tax=Bombyx mori RepID=D7F170_BOMMO
gtctcttctccccacctcaccgacttccttcaaccttcatggatcctcccatagagaaataacaaggagatcctccttagattcgttagtcatcatttctaccaatctgaatctatacagcgaaacagcgacaagcgacaacagtgtacagtagcgagtcacgtttagggcagctatagaagttgaggagttgaggtgaattttatttttgtatttgtaaacggtcaaggcaaggcttccttataaaaagtgaaatctgcacagaaatggcttccacattaacaactattgttgcagttcttttagtaataaatggagcttatgcattggaatgctacaaatgcaattcacaagataagactctatgtaaatggggtctcacgtcattcctgcaggatacagaacaatgtagctcagttttaggcgctgttttctcgccaaaatgctataaaataactgccaaaagtaaaggcggaagtgagtacatcgctagaggttgtatggcaactggccttggtggtggctgcagcgctatggctaaaacactaagttggttctcctctgcggtttcaagtgacgatccagatagcctccaagtcttaggctgtgaaacttgtgaaacagataaatgcaattcggccacaaaactcactggatttgctttcatcggcctcgtattgtctgcaatggctttcttaatgtaaatgtaaatctcgctggagttattttatgtaactcaaataaatttaggctacgatgcttgttcaatcgaaacacatctttggtcagaagaaaaaattattggtctagaaatatatatgtatctagaaataattgaaacaaagctaaaatcaatatcaataaacgaattaatattaaaattaaactcgccagtcttccaggttacactgcgtcgttggttcctaagccgagctttccacgtcctctctgacgttatcttcggcgcttccggggtctcggtctcctgaggctccagacactacactcgctacaatactgaccaaaaatgcgtttcgatggaacaagcataatatttgtaaggaagatgggcagctaagtatgttcgatgtctcagtaagttacgcaatatagtaatttataggtagttatgactgtaatgtttatattttgaagcatttatgaaagttacgctagtaataatataaagatactattatttgaaactttctaaaaacaaaaaatacgaagtctatatttttaacttcaacaaaaaatattgcgcagagcagaaaaataacgtatgtcctaacccaaaagttttggcacagaatagttatcggattttttctttaatgaagaaatttatttaaacactacactaaattaaacatttaaaaactagttatcataaattacaacatcatcattatggcttactcactcctagcggagtgtttaccgctccttccaattgtagattgttagcttctttatgtctccgaattattgatctccatcttgttttgggtcttccctttggtctctttgttgttggtttccagccggttattgtctttagcgcagaatctgggttagctctttctgtgtgtcccagccacctgagcatttgcgccttcgcaaacttgactatgtcttcaccctggatggcttctttaatttcttcattgattaaccttctaaattcgcctacacctatcctcaccggtcccattattcgtcgaattatctttctttcataagatttctaacttcatttcatctttttgtgttaagcacatcgtctctacaccataggtgatagctggcctggttacggtcttgtaaatttttaatttagttgtcttactaatgtgtttttcttttaagaattttagatagttccagtaggttttattacccagtaggatgcgtttatttatttcatacgttctatcatttctgccactcaccatcactcccaagtatttgaaacggtgtactctttcaaaggtatatgcaccaaacttaatttctttctcgatgtttgaacacttgagctatttcgttttgctctggtttattactagccctctcttctttgattctttatctagtattaatactaactaaactatactatcgaattatgaggagtgacccattcttctctactagtcgcaaatttcttcgaatatctcatgaggttctggacgaaattcagatcaatttctgtttttcgcaaatttgccatcttaattgttcttctcttgggattcccagcctccatgataaactgttgacagtaaagccaaaaaaattggggggcctgcggcaagtttgtgggattatcttttttgggtatagagagtatgtggtgttgtcgaagccagttttgggtatctcgaagcctattactgacagtagacaaagtaaacaaacttttgtttccaaaggcaacttgatattattttgtttttgttaaaataaagccaatgcattttgtcccaaagcttttaggacatacgttattatgaaccattttgagtatatttacgggttacatacaataacaaagcattatgtaatgtgaaaggatcaaaaaaatatagttttgatacactaaacaaaactttaagagtcacattttatatttttgtattgtaagtcataattacatttgcttggttttggtgtattcagaacactttttgcttatgtggtactaaaaagttttagaagtaaatgttagaaataagtatcttatggcatttcctatgttatctactatattgataattttaattgaaaatacgttacatccctagttcgatttccacctcagacatcattctgtatgaatttgcattttgagaaagatcaaaagaaaacttagtttcagttaaaattatgatttatttccatcgaatgtagtagttaagtatattgtttaatacaggacttgaatggttacctcatatgaagagaatacttcatttacaataattacatttaagtttgttgattccattatgtatatattacttttaatttagaataaaatattttaaacagtcttataca

SEQ ID NO: 1754 - DNA, 3063 bp, Diabrotica virgifera
  SmartBlast Evalue=1E-21; Info=Endonuclease-reverse transcriptase n=1 Tax=Bombyx mori RepID=D7F170_BOMMO
gtctcttctccccacctcaccgacttccttcaaccttcatggatcctcccatagagaaataacaaggagatcctccttagattcgttagtcatcatttctaccaatctgaatctatacagcgaaacagcgacaagcgacaacagtgtacagtagcgagtcacgtttagggcagctatagaagttgaggagttgaggtgaattttatttttgtatttgtaaacggtcaaggcaaggcttccttataaaaagtgaaatctgcacagaaatggcttccacattaacaactattgttgcagttcttttagtaataaatggagcttatgcattggaatgctacaaatgcaattcacaagataagactctatgtaaatggggtctcacgtcattcctgcaggatacagaacaatgtagctcagttttaggcgctgttttctcgccaaaatgctataaaataactgccaaaagtaaaggcggaagtgagtacatcgctagaggttgtatggcaactggccttggtggtggctgcagcgctatggctaaaacactaagttggttctcctctgcggtttcaagtgacgatccagatagcctccaagtcttaggctgtgaaacttgtgaaacagataaatgcaattcggccacaaaactcactggatttgctttcatcggcctcgtattgtctgcaatggctttcttaatgtaaatgtaaatctcgctggagttattttatgtaactcaaataaatttaggctacgatgcttgttcaatcgaaacacatctttggtcagaagaaaaaattattggtctagaaatatatatgtatctagaaataattgaaacaaagctaaaatcaatatcaataaacgaattaatattaaaattaaactcgccagtcttccaggttacactgcgtcgttggttcctaagccgagctttccacgtcctctctgacgttatcttcggcgcttccggggtctcggtctcctgaggctccagacactacactcgctacaatactgaccaaaaatgcgtttcgatggaacaagcataatatttgtaaggaagatgggcagctaagtatgttcgatgtctcagtaagttacgcaatatagtaatttataggtagttatgactgtaatgtttatattttgaagcatttatgaaagttacgctagtaataatataaagatactattatttgaaactttctaaaaacaaaaaatacgaagtctatatttttaacttcaacaaaaaatattgcgcagagcagaaaaataacgtatgtcctaacccaaaagttttggcacagaatagttatcggattttttctttaatgaagaaatttatttaaacactacactaaattaaacatttaaaaactagttatcataaattacaacatcatcattatggcttactcactcctagcggagtgtttaccgctccttccaattgtagattgttagcttctttatgtctccgaattattgatctccatcttgttttgggtcttccctttggtctctttgttgttggtttccagccggttattgtctttagcgcagaatctgggttagctctttctgtgtgtcccagccacctgagcatttgcgccttcgcaaacttgactatgtcttcaccctggatggcttctttaatttcttcattgattaaccttctaaattcgcctacacctatcctcaccggtcccattattcgtcgaattatctttctttcataagatttctaacttcatttcatctttttgtgttaagcacatcgtctctacaccataggtgatagctggcctggttacggtcttgtaaatttttaatttagttgtcttactaatgtgtttttcttttaagaattttagatagttccagtaggttttattacccagtaggatgcgtttatttatttcatacgttctatcatttctgccactcaccatcactcccaagtatttgaaacggtgtactctttcaaaggtatatgcaccaaacttaatttctttctcgatgtttgaacacttgagctatttcgttttgctctggtttattactagccctctcttctttgattctttatctagtattaatactaactaaactatactatcgaattatgtggagtgacccattcttctctactagtcgcaaatttcttcgaatatctcgtgaggttctggacgaaattcagatcaatttctgtttttcgcaaatttgccatcttaattgttcttctcttgggattcccagcctccatgataaactgttgacagtaaagccaaaaaaattggggggcctgcggcaagtttgtgggattatcttttttgggtatagagagtatgtggtgttgtcgaagccagttttgggtatctcgaagcctattactgacagtagacaaagtaaacaaacttttgtttccaaaggcaacttgatattattttgtttttgttaaaataaagccaatgcattttgtcccaaagcttttaggacatacgttattatgaaccattttgagtatatttacgggttacatacaataacaaagcattatgtaatgtgaaaggatcaaaaaaatatagttttgatacactaaacaaaactttaagagtcacattttatatttttgtattgtaagtcataattacatttgcttggttttggtgtattcagaacactttttgcttatgtggtactaaaaagttttagaagtaaatgttagaaataagtatcttatggcatttcctatgttatctactatattgataattttaattgaaaatacgttacatccctagttcgatttccacctcagacatcattctgtatgaatttgcattttgagaaagatcaaaagaaaacttagtttcagttaaaattatgatttatttccatcgaatgtagtagttaagtatattgtttaatacaggacttgaatggttacctcatatgaagagaatacttcatttacaataattacatttaagtttgttgattccattatgtatatattacttttaatttagaataaaatattttaaacagtcttataca

SEQ ID NO: 1755 - DNA, 3065 bp, Diabrotica virgifera
  SmartBlast Evalue=1E-21; Info=Endonuclease-reverse transcriptase n=1 Tax=Bombyx mori RepID=D7F170_BOMMO
gtctcttctccccacctcaccgacttccttcaaccttcatggatcctcccatagagaaataacaaggagatcctccttagattcgttagtcatcatttctaccaatctgaatctatacagcgaaacagcgacaagcgacaacagtgtacagtagcgagtcacgtttagggcagctatagaagttgaggagttgaggtgaattttatttttgtatttgtaaacggtcaaggcaaggcttccttataaaaagtgaaatctgcacagaaatggcttccacattaacaactattgttgcagttcttttagtaataaatggagcttatgcattggaatgctacaaatgcaattcacaagataagactctatgtaaatggggtctcacgtcattcctgcaggatacagaacaatgtagctcagttttaggcgctgttttctcgccaaaatgctataaaataactgccaaaagtaaaggcggaagtgagtacatcgctagaggttgtatggcaactggccttggtggtggctgcagcgctatggctaaaacactaagttggttctcctctgcggtttcaagtgacgatccagatagcctccaagtcttaggctgtgaaacttgtgaaacagataaatgcaattcggccacaaaactcactggatttgctttcatcggcctcgtattgtctgcaatggctttcttaatgtaaatgtaaatctcgctggagttattttatgtaactcaaataaatttaggctacgatgcttgttcaatcgaaacacatctttggtcagaagaaaaaattattggtctagaaatatatatgtatctagaaataattgaaacaaagctaaaatcaatatcaataaacgaattaatattaaaattaaactcgccagtcttccaggttacactgcgtcgttggttcctaagccgagctttccacgtcctctctgacgttatcttcggcgcttccggggtctcggtctcctgaggctccagacactacactcgctacaatactgaccaaaaatgcgtttcgatggaacaagcataatatttgtaaggaagatgggcagctaagtatgttcgatgtctcagtaagttacgcaatatagtaatttataggtagttatgactgtaatgtttatattttgaagcatttatgaaagttacgctagtaataatataaagatactattatttgaaactttctaaaaacaaaaaatacgaagtctatatttttaacttcaacaaaaaatattgcgcagagcagaaaaataacgtatgtcctaacccaaaagttttggcacagaatagttatcggattttttctttaatgaagaaatttatttaaacactacactaaattaaacatttaaaaactagttatcataaattacaacatcatcattatggcttactcactcctagcggagtgtttaccgctccttccaattgtagattgttagcttctttatgtctccgaattattgatctccatcttgttttgggtcttccctttggtctctttgttgttggtttccagccggttattgtctttagcgcagaatctgggttagctctttctgtgtgtcccagccacctgagcatttgcgccttcgcaaacttgactatgtcttcaccctggatggcttctttaatttcttcattgattaaccttctaaattcgcctacacctatcctcaccggtcccattattcgtcgaattatctttctttcataagatttctaacttcatttcatctttttgtgttaagcacatcgtctctacaccataggtgatagctggcctggttacggtcttgtaaatttttaatttagttgtcttactaatgtgtttttcttttaagaattttagatagttccagtaggttttattacccagtaggatgcgtttatttatttcatacgttctatcatttctgccactcaccatcactcccaagtatttgaaacggtgtactctttcaaaggtatatgcaccaaacttaatttctttctcgatgtttgaacacttgagctatttcgttttgctctggtttattactagccctctcttctttgattctttatctagtattaatactaactaaactatactatcgaattatgtggagtgacccattcttctctactagtcgcaaatttcttcgacaatctcatgaggttctggacgaaattcagatcaatttctctgtttttcgcaaatttgccatcttaattgttcttcatcttgggattcccagcctccatgataaactgttgacagtaaagccaaaaaaattgggggcctgcggcaagtttgtgagattatcgtttttgggtatagagagtatgtggtgttgtcgaaccaagttttgggtatctcgaagcctattactgacagtagacaaagtaaacaaacttttgtttccaaaggcaacttgatattattttgtttttgttaaaataaagccaatgcattttgtcccaaagcttttaggacatacgttattatgaaccattttgagtatatttacgggttacatacaataacaaagcattatgtaatgtgaaaggatcaaaaaaatatagttttgatacactaaacaaaactttaagagtcacattttatatttttgtattgtaagtcataattacatttgcttggttttggtgtattcagaacactttttgcttatgtggtactaaaaagttttagaagtaaatgttagaaataagtatcttatggcatttcctatgttatctactatattgataattttaattgaaaatacgttacatccctagttcgatttccacctcagacatcattctgtatgaatttgcattttgagaaagatcaaaagaaaacttagtttcagttaaaattatgatttatttccatcgaatgtagtagttaagtatattgtttaatacaggacttgaatggttacctcatatgaagagaatacttcatttacaataattacatttaagtttgttgattccattatgtatatattacttttaatttagaataaaatattttaaacagtcttataca

SEQ ID NO: 1756 - DNA, 3065 bp, Diabrotica virgifera
  SmartBlast Evalue=2E-21; Info=Endonuclease-reverse transcriptase n=1 Tax=Bombyx mori RepID=D7F170_BOMMO
gtctcttctccccacctcaccgacttccttcaaccttcatggatcctcccatagagaaataacaaggagatcctccttagattcgttagtcatcatttctaccaatctgaatctatacagcgaaacagcgacaagcgacaacagtgtacagtagcgagtcacgtttagggcagctatagaagttgaggagttgaggtgaattttatttttgtatttgtaaacggtcaaggcaaggcttccttataaaaagtgaaatctgcacagaaatggcttccacattaacaactattgttgcagttcttttagtaataaatggagcttatgcattggaatgctacaaatgcaattcacaagataagactctatgtaaatggggtctcacgtcattcctgcaggatacagaacaatgtagctcagttttaggcgctgttttctcgccaaaatgctataaaataactgccaaaagtaaaggcggaagtgagtacatcgctagaggttgtatggcaactggccttggtggtggctgcagcgctatggctaaaacactaagttggttctcctctgcggtttcaagtgacgatccagatagcctccaagtcttaggctgtgaaacttgtgaaacagataaatgcaattcggccacaaaactcactggatttgctttcatcggcctcgtattgtctgcaatggctttcttaatgtaaatgtaaatctcgctggagttattttatgtaactcaaataaatttaggctacgatgcttgttcaatcgaaacacatctttggtcagaagaaaaaattattggtctagaaatatatatgtatctagaaataattgaaacaaagctaaaatcaatatcaataaacgaattaatattaaaattaaactcgccagtcttccaggttacactgcgtcgttggttcctaagccgagctttccacgtcctctctgacgttatcttcggcgcttccggggtctcggtctcctgaggctccagacactacactcgctacaatactgaccaaaaatgcgtttcgatggaacaagcataatatttgtaaggaagatgggcagctaagtatgttcgatgtctcagtaagttacgcaatatagtaatttataggtagttatgactgtaatgtttatattttgaagcatttatgaaagttacgctagtaataatataaagatactattatttgaaactttctaaaaacaaaaaatacgaagtctatatttttaacttcaacaaaaaatattgcgcagagcagaaaaataacgtatgtcctaacccaaaagttttggcacagaatagttatcggattttttctttaatgaagaaatttatttaaacactacactaaattaaacatttaaaaactagttatcataaattacaacatcatcattatggcttactcactcctagcggagtgtttaccgctccttccaattgtagattgttagcttctttatgtctccgaattactgatctctccatcttgttttgggtcttccctttggtctctttgttgttggtttccagccggttattgtctttagcgcagaatctgggttagctctttctgtgtgtgccagacacctgagcatttgcgccttcgcaaacttgactatgtcttcaccctggatggcttctttaatttcttcattgattaaccttctaaattcgcctacacctatcctcaccggtcccattattcgtcgaattatctttctttcataagatttctaacttcatttcatctttttgtgttaagcacatcgtctctacaccataggtgatagctggcctggttacggtcttgtaaatttttaatttagttgtcttactaatgtgtttttcttttaagaattttagatagttccagtaggttttattacccagtaggatgcgtttatttatttcatacgttctatcatttctgccactcaccatcactcccaagtatttgaaacggtgtactctttcaaaggtatatgcaccaaacttaatttctttctcgatgtttgaacacttgagctatttcgttttgctctggtttattactagccctctcttctttgattctttatctagtattaatactaactaaactatactatcgaattatgaggagtgacccattcttctctactagtcgcaaatttcttcgaatatctcatgaggttctggacgaaattcagatcaatttctgtttttcgcaaatttgccatcttaattgttcttctcttgggattcccagcctccatgataaactgttgacagtaaagccaaaaaaattggggggcctgcggcaagtttgtgggattatcttttttgggtatagagagtatgtggtgttgtcgaagccagttttgggtatctcgaagcctattactgacagtagacaaagtaaacaaacttttgtttccaaaggcaacttgatattattttgtttttgttaaaataaagccaatgcattttgtcccaaagcttttaggacatacgttattatgaaccattttgagtatatttacgggttacatacaataacaaagcattatgtaatgtgaaaggatcaaaaaaatatagttttgatacactaaacaaaactttaagagtcacattttatatttttgtattgtaagtcataattacatttgcttggttttggtgtattcagaacactttttgcttatgtggtactaaaaagttttagaagtaaatgttagaaataagtatcttatggcatttcctatgttatctactatattgataattttaattgaaaatacgttacatccctagttcgatttccacctcagacatcattctgtatgaatttgcattttgagaaagatcaaaagaaaacttagtttcagttaaaattatgatttatttccatcgaatgtagtagttaagtatattgtttaatacaggacttgaatggttacctcatatgaagagaatacttcatttacaataattacatttaagtttgttgattccattatgtatatattacttttaatttagaataaaatattttaaacagtcttataca

SEQ ID NO: 1757 - DNA, 3065 bp, Diabrotica virgifera
  SmartBlast Evalue=2E-21; Info=Endonuclease-reverse transcriptase n=1 Tax=Bombyx mori RepID=D7F170_BOMMO
gtctcttctccccacctcaccgacttccttcaaccttcatggatcctcccatagagaaataacaaggagatcctccttagattcgttagtcatcatttctaccaatctgaatctatacagcgaaacagcgacaagcgacaacagtgtacagtagcgagtcacgtttagggcagctatagaagttgaggagttgaggtgaattttatttttgtatttgtaaacggtcaaggcaaggcttccttataaaaagtgaaatctgcacagaaatggcttccacattaacaactattgttgcagttcttttagtaataaatggagcttatgcattggaatgctacaaatgcaattcacaagataagactctatgtaaatggggtctcacgtcattcctgcaggatacagaacaatgtagctcagttttaggcgctgttttctcgccaaaatgctataaaataactgccaaaagtaaaggcggaagtgagtacatcgctagaggttgtatggcaactggccttggtggtggctgcagcgctatggctaaaacactaagttggttctcctctgcggtttcaagtgacgatccagatagcctccaagtcttaggctgtgaaacttgtgaaacagataaatgcaattcggccacaaaactcactggatttgctttcatcggcctcgtattgtctgcaatggctttcttaatgtaaatgtaaatctcgctggagttattttatgtaactcaaataaatttaggctacgatgcttgttcaatcgaaacacatctttggtcagaagaaaaaattattggtctagaaatatatatgtatctagaaataattgaaacaaagctaaaatcaatatcaataaacgaattaatattaaaattaaactcgccagtcttccaggttacactgcgtcgttggttcctaagccgagctttccacgtcctctctgacgttatcttcggcgcttccggggtctcggtctcctgaggctccagacactacactcgctacaatactgaccaaaaatgcgtttcgatggaacaagcataatatttgtaaggaagatgggcagctaagtatgttcgatgtctcagtaagttacgcaatatagtaatttataggtagttatgactgtaatgtttatattttgaagcatttatgaaagttacgctagtaataatataaagatactattatttgaaactttctaaaaacaaaaaatacgaagtctatatttttaacttcaacaaaaaatattgcgcagagcagaaaaataacgtatgtcctaacccaaaagttttggcacagaatagttatcggattttttctttaatgaagaaatttatttaaacactacactaaattaaacatttaaaaactagttatcataaattacaacatcatcattatggcttactcactcctagcggagtgtttaccgctccttccaattgtagattgttagcttctttatgtctccgaattactgatctctccatcttgttttgggtcttccctttggtctctttgttgttggtttccagccggttattgtctttagcgcagaatctgggttagctctttctgtgtgtgccagacacctgagcatttgcgccttcgcaaacttgactatgtcttcaccctggatggcttctttaatttcttcattgattaaccttctaaattcgcctacacctatcctcaccggtcccattattcgtcgaattatctttctttcataagatttctaacttcatttcatctttttgtgttaagcacatcgtctctacaccataggtgatagctggcctggttacggtcttgtaaatttttaatttagttgtcttactaatgtgtttttcttttaagaattttagatagttccagtaggttttattacccagtaggatgcgtttatttatttcatacgttctatcatttctgccactcaccatcactcccaagtatttgaaacggtgtactctttcaaaggtatatgcaccaaacttaatttctttctcgatgtttgaacacttgagctatttcgttttgctctggtttattactagccctctcttctttgattctttatctagtattaatactaactaaactatactatcgaattatgtggagtgacccattcttctctactagtcgcaaatttcttcgaatatctcgtgaggttctggacgaaattcagatcaatttctgtttttcgcaaatttgccatcttaattgttcttctcttgggattcccagcctccatgataaactgttgacagtaaagccaaaaaaattggggggcctgcggcaagtttgtgggattatcttttttgggtatagagagtatgtggtgttgtcgaagccagttttgggtatctcgaagcctattactgacagtagacaaagtaaacaaacttttgtttccaaaggcaacttgatattattttgtttttgttaaaataaagccaatgcattttgtcccaaagcttttaggacatacgttattatgaaccattttgagtatatttacgggttacatacaataacaaagcattatgtaatgtgaaaggatcaaaaaaatatagttttgatacactaaacaaaactttaagagtcacattttatatttttgtattgtaagtcataattacatttgcttggttttggtgtattcagaacactttttgcttatgtggtactaaaaagttttagaagtaaatgttagaaataagtatcttatggcatttcctatgttatctactatattgataattttaattgaaaatacgttacatccctagttcgatttccacctcagacatcattctgtatgaatttgcattttgagaaagatcaaaagaaaacttagtttcagttaaaattatgatttatttccatcgaatgtagtagttaagtatattgtttaatacaggacttgaatggttacctcatatgaagagaatacttcatttacaataattacatttaagtttgttgattccattatgtatatattacttttaatttagaataaaatattttaaacagtcttataca

SEQ ID NO: 1758 - DNA, 3067 bp, Diabrotica virgifera
  SmartBlast Evalue=2E-21; Info=Endonuclease-reverse transcriptase n=1 Tax=Bombyx mori RepID=D7F170_BOMMO
gtctcttctccccacctcaccgacttccttcaaccttcatggatcctcccatagagaaataacaaggagatcctccttagattcgttagtcatcatttctaccaatctgaatctatacagcgaaacagcgacaagcgacaacagtgtacagtagcgagtcacgtttagggcagctatagaagttgaggagttgaggtgaattttatttttgtatttgtaaacggtcaaggcaaggcttccttataaaaagtgaaatctgcacagaaatggcttccacattaacaactattgttgcagttcttttagtaataaatggagcttatgcattggaatgctacaaatgcaattcacaagataagactctatgtaaatggggtctcacgtcattcctgcaggatacagaacaatgtagctcagttttaggcgctgttttctcgccaaaatgctataaaataactgccaaaagtaaaggcggaagtgagtacatcgctagaggttgtatggcaactggccttggtggtggctgcagcgctatggctaaaacactaagttggttctcctctgcggtttcaagtgacgatccagatagcctccaagtcttaggctgtgaaacttgtgaaacagataaatgcaattcggccacaaaactcactggatttgctttcatcggcctcgtattgtctgcaatggctttcttaatgtaaatgtaaatctcgctggagttattttatgtaactcaaataaatttaggctacgatgcttgttcaatcgaaacacatctttggtcagaagaaaaaattattggtctagaaatatatatgtatctagaaataattgaaacaaagctaaaatcaatatcaataaacgaattaatattaaaattaaactcgccagtcttccaggttacactgcgtcgttggttcctaagccgagctttccacgtcctctctgacgttatcttcggcgcttccggggtctcggtctcctgaggctccagacactacactcgctacaatactgaccaaaaatgcgtttcgatggaacaagcataatatttgtaaggaagatgggcagctaagtatgttcgatgtctcagtaagttacgcaatatagtaatttataggtagttatgactgtaatgtttatattttgaagcatttatgaaagttacgctagtaataatataaagatactattatttgaaactttctaaaaacaaaaaatacgaagtctatatttttaacttcaacaaaaaatattgcgcagagcagaaaaataacgtatgtcctaacccaaaagttttggcacagaatagttatcggattttttctttaatgaagaaatttatttaaacactacactaaattaaacatttaaaaactagttatcataaattacaacatcatcattatggcttactcactcctagcggagtgtttaccgctccttccaattgtagattgttagcttctttatgtctccgaattactgatctctccatcttgttttgggtcttccctttggtctctttgttgttggtttccagccggttattgtctttagcgcagaatctgggttagctctttctgtgtgtgccagacacctgagcatttgcgccttcgcaaacttgactatgtcttcaccctggatggcttctttaatttcttcattgattaaccttctaaattcgcctacacctatcctcaccggtcccattattcgtcgaattatctttctttcataagatttctaacttcatttcatctttttgtgttaagcacatcgtctctacaccataggtgatagctggcctggttacggtcttgtaaatttttaatttagttgtcttactaatgtgtttttcttttaagaattttagatagttccagtaggttttattacccagtaggatgcgtttatttatttcatacgttctatcatttctgccactcaccatcactcccaagtatttgaaacggtgtactctttcaaaggtatatgcaccaaacttaatttctttctcgatgtttgaacacttgagctatttcgttttgctctggtttattactagccctctcttctttgattctttatctagtattaatactaactaaactatactatcgaattatgtggagtgacccattcttctctactagtcgcaaatttcttcgacaatctcatgaggttctggacgaaattcagatcaatttctctgtttttcgcaaatttgccatcttaattgttcttcatcttgggattcccagcctccatgataaactgttgacagtaaagccaaaaaaattgggggcctgcggcaagtttgtgagattatcgtttttgggtatagagagtatgtggtgttgtcgaaccaagttttgggtatctcgaagcctattactgacagtagacaaagtaaacaaacttttgtttccaaaggcaacttgatattattttgtttttgttaaaataaagccaatgcattttgtcccaaagcttttaggacatacgttattatgaaccattttgagtatatttacgggttacatacaataacaaagcattatgtaatgtgaaaggatcaaaaaaatatagttttgatacactaaacaaaactttaagagtcacattttatatttttgtattgtaagtcataattacatttgcttggttttggtgtattcagaacactttttgcttatgtggtactaaaaagttttagaagtaaatgttagaaataagtatcttatggcatttcctatgttatctactatattgataattttaattgaaaatacgttacatccctagttcgatttccacctcagacatcattctgtatgaatttgcattttgagaaagatcaaaagaaaacttagtttcagttaaaattatgatttatttccatcgaatgtagtagttaagtatattgtttaatacaggacttgaatggttacctcatatgaagagaatacttcatttacaataattacatttaagtttgttgattccattatgtatatattacttttaatttagaataaaatattttaaacagtcttataca

SEQ ID NO: 1759 - DNA, 1585 bp, Diabrotica virgifera
  SmartBlast Evalue=1E-23; Info=Endonuclease-reverse transcriptase n=1 Tax=Bombyx mori RepID=D7F170_BOMMO
ccgaattattgatatctccatcttgtttttgggtcttccctttggtctctttgttgttggtttccaaccggttattgtctttagcgcagaatctggggtagctctttctgtgtgtcccagccacctgagcatttgcgccttcgcaaacttgactgtgtcttcaccctggatggcttctttaatttcttcattgattaaccttctaaattcgcctacacctgccctcaacggtcccattattcgtcgaattatctttttctctaagatttctaacttcatttcatctttttgtgttaagcacatcgtctctacaccataggtgatagctggcctggttgcggtcttgtaaatttttaatttagttgtcttactaatgtgtttttcttttaagaatttttgatagttccagtaggttttattacccagtaggatgcgtttatttatttcatacgttctatcatttctgccactcaccatcactcccaagtatttgaaacggtgtactctttcaaaggtatatgcaccaaacttaatttctttctcgatgtttgaacacttgagctatttcgttttgctctggtttattactagccctctcttctttgattctttatctagtattaatactaactaaactatactatcgaattatgaggagtgacccattcttctctactagtcgcaaatttcttcgaatatctcatgaggttctggacgaaattcagatcaatttctgtttttcgcaaatttgccatcttaattgttcttctcttgggattcccagcctccatgataaactgttgacagtaaagccaaaaaaattggggggcctgcggcaagtttgtgggattatcttttttgggtatagagagtatgtggtgttgtcgaagccagttttgggtatctcgaagcctattactgacagtagacaaagtaaacaaacttttgtttccaaaggcaacttgatattattttgtttttgttaaaataaagccaatgcattttgtcccaaagcttttaggacatacgttattatgaaccattttgagtatatttacgggttacatacaataacaaagcattatgtaatgtgaaaggatcaaaaaaatatagttttgatacactaaacaaaactttaagagtcacattttatatttttgtattgtaagtcataattacatttgcttggttttggtgtattcagaacactttttgcttatgtggtactaaaaagttttagaagtaaatgttagaaataagtatcttatggcatttcctatgttatctactatattgataattttaattgaaaatacgttacatccctagttcgatttccacctcagacatcattctgtatgaatttgcattttgagaaagatcaaaagaaaacttagtttcagttaaaattatgatttatttccatcgaatgtagtagttaagtatattgtttaatacaggacttgaatggttacctcatatgaagagaatacttcatttacaataattacatttaagtttgttgattccattatgtatatattacttttaatttagaataaaatattttaaacagtcttataca

SEQ ID NO: 1760 - DNA, 1585 bp, Diabrotica virgifera
  SmartBlast Evalue=1E-23; Info=Endonuclease-reverse transcriptase n=1 Tax=Bombyx mori RepID=D7F170_BOMMO
ccgaattattgatatctccatcttgtttttgggtcttccctttggtctctttgttgttggtttccaaccggttattgtctttagcgcagaatctggggtagctctttctgtgtgtcccagccacctgagcatttgcgccttcgcaaacttgactgtgtcttcaccctggatggcttctttaatttcttcattgattaaccttctaaattcgcctacacctgccctcaacggtcccattattcgtcgaattatctttttctctaagatttctaacttcatttcatctttttgtgttaagcacatcgtctctacaccataggtgatagctggcctggttgcggtcttgtaaatttttaatttagttgtcttactaatgtgtttttcttttaagaatttttgatagttccagtaggttttattacccagtaggatgcgtttatttatttcatacgttctatcatttctgccactcaccatcactcccaagtatttgaaacggtgtactctttcaaaggtatatgcaccaaacttaatttctttctcgatgtttgaacacttgagctatttcgttttgctctggtttattactagccctctcttctttgattctttatctagtattaatactaactaaactatactatcgaattatgtggagtgacccattcttctctactagtcgcaaatttcttcgaatatctcgtgaggttctggacgaaattcagatcaatttctgtttttcgcaaatttgccatcttaattgttcttctcttgggattcccagcctccatgataaactgttgacagtaaagccaaaaaaattggggggcctgcggcaagtttgtgggattatcttttttgggtatagagagtatgtggtgttgtcgaagccagttttgggtatctcgaagcctattactgacagtagacaaagtaaacaaacttttgtttccaaaggcaacttgatattattttgtttttgttaaaataaagccaatgcattttgtcccaaagcttttaggacatacgttattatgaaccattttgagtatatttacgggttacatacaataacaaagcattatgtaatgtgaaaggatcaaaaaaatatagttttgatacactaaacaaaactttaagagtcacattttatatttttgtattgtaagtcataattacatttgcttggttttggtgtattcagaacactttttgcttatgtggtactaaaaagttttagaagtaaatgttagaaataagtatcttatggcatttcctatgttatctactatattgataattttaattgaaaatacgttacatccctagttcgatttccacctcagacatcattctgtatgaatttgcattttgagaaagatcaaaagaaaacttagtttcagttaaaattatgatttatttccatcgaatgtagtagttaagtatattgtttaatacaggacttgaatggttacctcatatgaagagaatacttcatttacaataattacatttaagtttgttgattccattatgtatatattacttttaatttagaataaaatattttaaacagtcttataca

SEQ ID NO: 1761 - DNA, 1587 bp, Diabrotica virgifera
  SmartBlast Evalue=1E-23; Info=Endonuclease-reverse transcriptase n=1 Tax=Bombyx mori RepID=D7F170_BOMMO
ccgaattattgatatctccatcttgtttttgggtcttccctttggtctctttgttgttggtttccaaccggttattgtctttagcgcagaatctggggtagctctttctgtgtgtcccagccacctgagcatttgcgccttcgcaaacttgactgtgtcttcaccctggatggcttctttaatttcttcattgattaaccttctaaattcgcctacacctgccctcaacggtcccattattcgtcgaattatctttttctctaagatttctaacttcatttcatctttttgtgttaagcacatcgtctctacaccataggtgatagctggcctggttgcggtcttgtaaatttttaatttagttgtcttactaatgtgtttttcttttaagaatttttgatagttccagtaggttttattacccagtaggatgcgtttatttatttcatacgttctatcatttctgccactcaccatcactcccaagtatttgaaacggtgtactctttcaaaggtatatgcaccaaacttaatttctttctcgatgtttgaacacttgagctatttcgttttgctctggtttattactagccctctcttctttgattctttatctagtattaatactaactaaactatactatcgaattatgtggagtgacccattcttctctactagtcgcaaatttcttcgacaatctcatgaggttctggacgaaattcagatcaatttctctgtttttcgcaaatttgccatcttaattgttcttcatcttgggattcccagcctccatgataaactgttgacagtaaagccaaaaaaattgggggcctgcggcaagtttgtgagattatcgtttttgggtatagagagtatgtggtgttgtcgaaccaagttttgggtatctcgaagcctattactgacagtagacaaagtaaacaaacttttgtttccaaaggcaacttgatattattttgtttttgttaaaataaagccaatgcattttgtcccaaagcttttaggacatacgttattatgaaccattttgagtatatttacgggttacatacaataacaaagcattatgtaatgtgaaaggatcaaaaaaatatagttttgatacactaaacaaaactttaagagtcacattttatatttttgtattgtaagtcataattacatttgcttggttttggtgtattcagaacactttttgcttatgtggtactaaaaagttttagaagtaaatgttagaaataagtatcttatggcatttcctatgttatctactatattgataattttaattgaaaatacgttacatccctagttcgatttccacctcagacatcattctgtatgaatttgcattttgagaaagatcaaaagaaaacttagtttcagttaaaattatgatttatttccatcgaatgtagtagttaagtatattgtttaatacaggacttgaatggttacctcatatgaagagaatacttcatttacaataattacatttaagtttgttgattccattatgtatatattacttttaatttagaataaaatattttaaacagtcttataca

SEQ ID NO: 1762 - DNA, 3513 bp, Diabrotica virgifera
  SmartBlast Evalue=1E-158; Info="Probable pyruvate dehydrogenase E1 component subunit alpha, mitochondrial n=1 Tax=Harpegnathos saltator RepID=E2C7V7_9HYME"
ttgtaaataataatttatttatattatgtacattatatatcaatgaaaattgatgattgtaatatattgtgattaaaaaagtacttattagttttgtaatgagtacttttttgtatgatctgttgaaaaatagatggtttaaaaaatgaaaaatgatgttttctacaaaattttcgtggcctaaagacagttacaaactgtatatatacgagattgttttatacaacattttaaatggaacatagcgtattggagaggttcaaatacattttcaaactatttgtgttttatttagtatattattcttctgacatcaatccttgaactatattttcaagtttgtctaaattatccatccattgaacgcttcatgaatttggattggatagaaaattattataaagtatctatatcattaaaattttgaacctatacaataagtaacaaatacaataaataatatttagattctttccttttaagtcctttgcatgccattaatgactgttgatagatagaagatactttagaattaagtggaaattagaaataatcaaggtgtcattcagttattgacggaggaatgttctaaggtcccagcttgtcgtcctaagaaaggttataagtgccagcattaaaattgagtgtcaggagcttctcatagatgtcggtagctgtatgtacggcaacagtttctttaaaagggtcgtacgtccaacagttcagatactactactactagacatctgcatgtgtcagctatgtaacaataaagaaaacttctgttgcgaatgaaagtaaagataacgaaacgctttaacaggatatacaatataacaacagtcctcttatatgtatgttacaaaatttacagaaaatttagataaaagaaacagaaatggactaaaagaactactgtcttagaatttataaggttggcaccgcgttgggctgccgatgtaacaaaataaaaaacttctgttggggtgaaagtaaagagaattgtagtgtattaaaatagaagaaaatcagaaaaaagatgacctcaaggcagtggttcatgattggagcgaaattgcctcatgtcttctccaacttgtaaaacccggtctgactcttaagaagcacttggtaatatggtgtggtaactgcagggacagaataaaaatagtattttattattttcattgatgtttttggtagctaagcgcgtttttcgtactattgggcaaatgtcttcaaaatgtgcaaaggaattgaaaggaaattaacaataacaatcttcttagtgccagttttggctaaaaaattggtaaaaataagtctatgaatgatggcaccaacatttttgaagcctattttcaatataattagaagaaaagctcctaataatttgtagaggcatgtctcttagattatataattattaataattgcgaaattaatgtcgagttcaatgtacttcaaaaatgcctaaatttttgcgccaagaacgaacagaaattatttaaaaacaaaggtcaaaagactaaagatgttatcacattttgcaatacaattaaaaacgattgaagtacttcactatgtaaatattttttaaatctaccaaaaaaatcaaacaatacttttttggtacttgtagatatttttcatattaaaacatatttaaatcaataagaaatacaaataaaatattcattttaaatatatgattatataaaagcattttaatgattgaagataaaaaaataaaaaagataaaaccaaataatgattgaaggtgaataataaatatgtaagttcactgaatatactaaaataaaaaatatgtgttaatcttacgaatattttatgatgaattgtgtatgaaataacccgttttacagaaaaatatagatcatagaaattgtattatcacagtgacctgcaggttcttgacttagttgaacattaccaattttttaacaaaacgaccatttttccggctatgataatcattgagctacattccgttaaaatttcttatttttccctaattggcagatttcgataacgctttacttcaaattaacagctggccctattcttttgtgggtgagagtagtccaggggtcgatatttctgatctggccttccaagttgacggcatagatgtcagctgggagttcgtcgagaccaagttctgcatcggatttggcttgtttggtcgcttcatcgacttgggttcggatttcaccgtcgattttcttgatttcatcaggtgtgaccaagtttgatgagatgattttctccttgaaagaggtaataggatccctggtttgtcttacttcctgaatttcatccctggttctgtaacttgtacctggatcggacatggagtgtcctgagtacctgtatgtggctgcttcaatgaccaatggtccctttccactgcctgcataattgactgcgtacctgaaacattcccttacagccaatacatccataccatctacccagattccaggaacatagtctccccttgaatagtaggtagtacttgctgaagctctttcagcactggtacccataccataaccattgttttcacatacgaaaatgcaaggaatgttccaaagtttggccatgttgtacacctcaaatacttggccttgattggcagcaccatcaccgtacagtgctatgcacactccatctgtgcctttgtattgggcggcaagagcaattccgactcccaaaggaacctgagctccaacgataccgtttcctccataaaagttttcagtgtacatgtgcatagagcctcctttacccttggcgcagcccttttgccttccacagagttcggaaagaactcctactggtgggactcccataaggtaggtccaaccatgggctctgtagcagtgatgacaccatcgtatgggcgaagagcagccttgatacctacagctacagcttcctgtccagagtaaagatgacagaatcctctaatgattttgtctttgtagaggttaccagctgcggtttccatccttctaatggtgtgcatttgtgtgtagtaattgatggcatcttctttatttaaagttactgatgtagcaggagattcatctaatttatgtagtctgtaaggttttgtttcaaaagaagcttctgtagcgaagttctttgaaaaggcgcccaacgttttatttactaaatttgtcaaacgcttagccatatttcaaagtttctgccgaattatttccagtaccaaatgacttcaatttaaccttgtggaatccactgaaaacgtcgtttaaaataaatcaatatccacttactttgggcaaaacggtttttgtgcaaacagttctaacacaatttggaagcattctgatagataaatgtgaagattgtaggtgtcttttatttagaaggaggttttataggtcttcgtccctagcagccagactttttcttgcagataaaattatcgcaaatctaaaatctacataaacccctttaaga

SEQ ID NO: 1763 - DNA, 3512 bp, Diabrotica virgifera
  SmartBlast Evalue=1E-158; Info="Probable pyruvate dehydrogenase E1 component subunit alpha, mitochondrial n=1 Tax=Harpegnathos saltator RepID=E2C7V7_9HYME"
ttgtaaataataatttatttatattatgtacattatatatcaatgaaaattgatgattgtaatatattgtgattaaaaaagtacttattagttttgtaatgagtacttttttgtatgatctgttgaaaaatagatggtttaaaaaatgaaaaatgatgttttctacaaaattttcgtggcctaaagacagttacaaactgtatatatacgagattgttttatacaacattttaaatggaacatagcgtattggagaggttcaaatacattttcaaactatttgtgttttatttagtatattattcttctgacatcaatccttgaactatattttcaagtttgtctaaattatccatccattgaacgcttcatgaatttggattggatagaaaattattataaagtatctatatcattaaaattttgaacctatacaataagtaacaaatacaataaataatatttagattctttccttttaagtcctttgcatgccattaatgactgttgatagatagaagatactttagaattaagtggaaattagaaataatcaaggtgtcattcagttattgacggaggaatgttctaaggcccagcttgtcgtcctaagaaaggttataagtgccagcattaaaattgagtgtcaggagcttctcatagatgtcggtagctgtatgtacggcaacagtttctttaaaagggtcgtacgtccaacagttcagatactactactactagacatctgcatgtgtcagctatgtaacaataaagaaaacttctgttgcgaatgaaagtaaagagaacgaaacgctttaacaggatatacaatataacaacagtcctcttatatgtatgttacaaaatttacagaaaatttagataaaagaaacagaaatggactaaaagaactactgtcttagaatttataaggttggcaccgcgttgggctgccgatgtaacaaaataaaaaacttctgttggggtgaaagtaaagagaattgtagtgtattaaaatagaagaaaatcagaaaaaagatgacctcaaggcagtggttcatgattggagcgaaattgcctcatgtcttctccaacttgtaaaacccggtctgactcttaagaagcacttggtaatatggtgtggtaactgcagggacagaataaaaatagtattttattattttcattgatgtttttggtagctaagcgcgtttttcgtactattgggcaaatgtcttcaaaatgtgcaaaggaattgaaaggaaattaacaataacaatcttcttagtgccagttttggctaaaaaattggtaaaaataagtctatgaatgatggcaccaacatttttgaagcctattttcaatataattagaagaaaagctcctaataatttgtagaggcatgtctcttagattatataattattaataattgcgaaattaatgtcgagttcaatgtacttcaaaaatgcctaaatttttgcgccaagaacgaacagaaattatttaaaaacaaaggtcaaaagactaaagatgttatcacattttgcaatacaattaaaaacgattgaagtacttcactatgtaaatattttttaaatctaccaaaaaaatcaaacaatacttttttggtacttgtagatatttttcatattaaaacatatttaaatcaataagaaatacaaataaaatattcattttaaatatatgattatataaaagcattttaatgattgaagataaaaaaataaaaaagataaaaccaaataatgattgaaggtgaataataaatatgtaagttcactgaatatactaaaataaaaaatatgtgttaatcttacgaatattttatgatgaattgtgtatgaaataacccgttttacagaaaaatatagatcatagaaattgtattatcacagtgacctgcaggttcttgacttagttgaacattaccaattttttaacaaaacgaccatttttccggctatgataatcattgagctacattccgttaaaatttcttatttttccctaattggcagatttcgataacgctttacttcaaattaacagctggccctattcttttgtgggtgagagtagtccaggggtcgatatttctgatctggccttccaagttgacggcatagatgtcagctgggagttcgtcgagaccaagttctgcatcggatttggcttgtttggtcgcttcatcgacttgggttcggatttcaccgtcgattttcttgatttcatcaggtgtgaccaagtttgatgagatgattttctccttgaaagaggtaataggatccctggtttgtcttacttcctgaatttcatccctggttctgtaacttgtacctggatcggacatggagtgtcctgagtacctgtatgtggctgcttcaatgaccaatggtccctttccactgcctgcataattgactgcgtacctgaaacattcccttacagccaatacatccataccatctacccagattccaggaacatagtctccccttgaatagtaggtagtacttgctgaagctctttcagcactggtacccataccataaccattgttttcacatacgaaaatgcaaggaatgttccaaagtttggccatgttgtacacctcaaatacttggccttgattggcagcaccatcaccgtacagtgctatgcacactccatctgtgcctttgtattgggcggcaagagcaattccgactcccaaaggaacctgagctccaacgataccgtttcctccataaaagttttcagtgtacatgtgcatagagcctcctttacccttggcgcagcccttttgccttccacagagttcggaaagaactcctactggtgggactcccataaggtaggtccaaccatgggctctgtagcagtgatgacaccatcgtatgggcgaagagcagccttgatacctacagctacagcttcctgtccagagtaaagatgacagaatcctctaatgattttgtctttgtagaggttaccagctgcggtttccatccttctaatggtgtgcatttgtgtgtagtaattgatggcatcttctttatttaaagttactgatgtagcaggagattcatctaatttatgtagtctgtaaggttttgtttcaaaagaagcttctgtagcgaagttctttgaaaaggcgcccaacgttttatttactaaatttgtcaaacgcttagccatatttcaaagtttctgccgaattatttccagtaccaaatgacttcaatttaaccttgtggaatccactgaaaacgtcgtttaaaataaatcaatatccacttactttgggcaaaacggtttttgtgcaaacagttctaacacaatttggaagcattctgatagataaatgtgaagattgtaggtgtcttttatttagaaggaggttttataggtcttcgtccctagcagccagactttttcttgcagataaaattatcgcaaatctaaaatctacataaacccctttaaga

SEQ ID NO: 1764 - DNA, 3380 bp, Diabrotica virgifera
  SmartBlast Evalue=1E-160; Info="Probable pyruvate dehydrogenase E1 component subunit alpha, mitochondrial n=1 Tax=Camponotus floridanus RepID=E1ZY08_9HYME"
ttgtaaataataatttatttatattatgtacattatatatcaatgaaaattgatgattgtaatatattgtgattaaaaaagtacttattagttttgtaatgagtacttttttgtatgatctgttgaaaaatagatggtttaaaaaatgaaaaatgatgttttctacaaaattttcgtggcctaaagacagttacaaactgtatatatacgagattgttttatacaacattttaaatggaacatagcgtattggagaggttcaaatacattttcaaactatttgtgttttatttagtatattattcttctgacatcaatccttgaactatattttcaagtttgtctaaattatccatccattgaacgcttcatgaatttggattggatagaaaattattataaagtatctatatcattaaaattttgaacctatacaataagtaacaaatacaataaataatatttagattctttccttttaagtcctttgcatgccattaatgactgttgatagatagaagatactttagaattaagtggaaattagaaataatcaaggtgtcattcagttattgacggaggaatgttctaaggtcccagcttgtcgtcctaagaaaggttataagtgccagcattaaaattgagtgtcaggagcttctcatagatgtcggtagctgtatgtacggcaacagtttctttaaaagggtcgtacgtccaacagttcagatactactactactagacatctgcatgtgtcagctatgtaacaataaagaaaacttctgttgcgaatgaaagtaaagataacgaaacgctttaacaggatatacaatataacaacagtcctcttatatgtatgttacaaaatttacagaaaatttagataaaagaaacagaaatggactaaaagaactactgtcttagaatttataaggttggcaccgcgttgggctgccgatgtaacaaaataaaaaacttctgttggggtgaaagtaaagagaattgtagtgtattaaaatagaagaaaatcagaaaaaagatgacctcaaggcagtggttcatgattggagcgaaattgcctcatgtcttctccaacttgtaaaacccggtctgactcttaagaagcacttggtaatatggtgtggtaactgcagggacagaataaaaatagtattttattattttcattgatgtttttggtagctaagcgcgtttttcgtactattgggcaaatgtcttcaaaatgtgcaaaggaattgaaaggaaattaacaataacaatcttcttagtgccagttttggctaaaaaattggtaaaaataagtctatgaatgatggcaccaacatttttgaagcctattttcaatataattagaagaaaagctcctaataatttgtagaggcatgtctcttagattatataattattaataattgcgaaattaatgtcgagttcaatgtacttcaaaaatgcctaaatttttgcgccaagaacgaacagaaattatttaaaaacaaaggtcaaaagactaaagatgttatcacattttgcaatacaattaaaaacgattgaagtacttcactatgtaaatattttttaaatctaccaaaaaaatcaaacaatacttttttggtacttgtagatatttttcatattaaaacatatttaaatcaataagaaatacaaataaaatattcattttaaatatatgattatataaaagcattttaatgattgaagataaaaaaataaaaaagataaaaccaaataatgattgaaggtgaataataaatatgtaagttcactgaatatactaaaataaaaaatatgtgttaatcttacgaatattttatgatgaattgtgtatgaaataacccgttttacagaaaaatatagatcatagaaattgtattatcacagtgacctgcaggttcttgacttagttgaacattaccaattttttaacaaaacgaccatttttccggctatgataatcattgagctacattccgttaaaatttcttatttttccctaattggcagatttcgataacgctttacttcaaattaacagctggccctattcttttgtgggtgagagtagtccaggggtcgatatttctgatctggccttccaagttgacggcatagatgtcagctgggagttcgtcgagaccaagttctgcatcggatttggcttgtttggtcgcttcatcgacttgggttcggatttcaccgtcgattttcttgatttcatcaggtgtgaccaagtttgatgagatgattttctccttgaaagaggtaataggatccctggtttgtcttacttcctgaatttcatccctggttctgtaacttgtacctggatcggacatggagtgtcctgagtacctgtatgtggctgcttcaatgaccaatggtccctttccactgcctgcataattgactgcgtacctgaaacattcccttacagccaatacatccataccatctacccagattccaggaacatagtctccccttgaatagtaggtagtacttgctgaagctctttcagcactggtacccataccataaccattgttttcacatacgaaaatgcaaggaatgttccaaagtttggccatgttgtacacctcaaatacttggccttgattggcagcaccatcaccgtacagtgctatgcacactccatctgtgcctttgtattgggcggcaagagcaattccgactcccaaaggaacctgagctccaacgataccgtttcctccataaaagttttcagtgtacatgtgcatagagcctcctttacccttggcgcagcccttttgccttccacagagttcggaaagaactcctactggtgggactcccataaggtaggtccaaccatgggctctgtagcagtgatgacaccatcgtatgggcgaagagcagccttgatacctacagctacagcttcctgtccagagtaaagatgacagaatcctctaatgattttgtctttgtagaggttaccagctgcggtttccatccttctaatggtgtgcatttgtgtgtagtaattgatggcatcttctttatttaaagttactgatgtagcaggagattcatctaatttatgtagtctgtaaggttttgtttcaaaagaagcttctgtagcgaagttctttgaaaaggcgcccaacgtttttttgggcaaaacggtttttgtgcaaacagttctaacacaatttggaagcattctgatagataaatgtgaagattgtaggtgtcttttatttagaaggaggttttataggtcttcgtccctagcagccagactttttcttgcagataaaattatcgcaaatctaaaatctacataaacccctttaaga

SEQ ID NO: 1765 - DNA, 3379 bp, Diabrotica virgifera
  SmartBlast Evalue=1E-160; Info="Probable pyruvate dehydrogenase E1 component subunit alpha, mitochondrial n=1 Tax=Camponotus floridanus RepID=E1ZY08_9HYME"
ttgtaaataataatttatttatattatgtacattatatatcaatgaaaattgatgattgtaatatattgtgattaaaaaagtacttattagttttgtaatgagtacttttttgtatgatctgttgaaaaatagatggtttaaaaaatgaaaaatgatgttttctacaaaattttcgtggcctaaagacagttacaaactgtatatatacgagattgttttatacaacattttaaatggaacatagcgtattggagaggttcaaatacattttcaaactatttgtgttttatttagtatattattcttctgacatcaatccttgaactatattttcaagtttgtctaaattatccatccattgaacgcttcatgaatttggattggatagaaaattattataaagtatctatatcattaaaattttgaacctatacaataagtaacaaatacaataaataatatttagattctttccttttaagtcctttgcatgccattaatgactgttgatagatagaagatactttagaattaagtggaaattagaaataatcaaggtgtcattcagttattgacggaggaatgttctaaggcccagcttgtcgtcctaagaaaggttataagtgccagcattaaaattgagtgtcaggagcttctcatagatgtcggtagctgtatgtacggcaacagtttctttaaaagggtcgtacgtccaacagttcagatactactactactagacatctgcatgtgtcagctatgtaacaataaagaaaacttctgttgcgaatgaaagtaaagagaacgaaacgctttaacaggatatacaatataacaacagtcctcttatatgtatgttacaaaatttacagaaaatttagataaaagaaacagaaatggactaaaagaactactgtcttagaatttataaggttggcaccgcgttgggctgccgatgtaacaaaataaaaaacttctgttggggtgaaagtaaagagaattgtagtgtattaaaatagaagaaaatcagaaaaaagatgacctcaaggcagtggttcatgattggagcgaaattgcctcatgtcttctccaacttgtaaaacccggtctgactcttaagaagcacttggtaatatggtgtggtaactgcagggacagaataaaaatagtattttattattttcattgatgtttttggtagctaagcgcgtttttcgtactattgggcaaatgtcttcaaaatgtgcaaaggaattgaaaggaaattaacaataacaatcttcttagtgccagttttggctaaaaaattggtaaaaataagtctatgaatgatggcaccaacatttttgaagcctattttcaatataattagaagaaaagctcctaataatttgtagaggcatgtctcttagattatataattattaataattgcgaaattaatgtcgagttcaatgtacttcaaaaatgcctaaatttttgcgccaagaacgaacagaaattatttaaaaacaaaggtcaaaagactaaagatgttatcacattttgcaatacaattaaaaacgattgaagtacttcactatgtaaatattttttaaatctaccaaaaaaatcaaacaatacttttttggtacttgtagatatttttcatattaaaacatatttaaatcaataagaaatacaaataaaatattcattttaaatatatgattatataaaagcattttaatgattgaagataaaaaaataaaaaagataaaaccaaataatgattgaaggtgaataataaatatgtaagttcactgaatatactaaaataaaaaatatgtgttaatcttacgaatattttatgatgaattgtgtatgaaataacccgttttacagaaaaatatagatcatagaaattgtattatcacagtgacctgcaggttcttgacttagttgaacattaccaattttttaacaaaacgaccatttttccggctatgataatcattgagctacattccgttaaaatttcttatttttccctaattggcagatttcgataacgctttacttcaaattaacagctggccctattcttttgtgggtgagagtagtccaggggtcgatatttctgatctggccttccaagttgacggcatagatgtcagctgggagttcgtcgagaccaagttctgcatcggatttggcttgtttggtcgcttcatcgacttgggttcggatttcaccgtcgattttcttgatttcatcaggtgtgaccaagtttgatgagatgattttctccttgaaagaggtaataggatccctggtttgtcttacttcctgaatttcatccctggttctgtaacttgtacctggatcggacatggagtgtcctgagtacctgtatgtggctgcttcaatgaccaatggtccctttccactgcctgcataattgactgcgtacctgaaacattcccttacagccaatacatccataccatctacccagattccaggaacatagtctccccttgaatagtaggtagtacttgctgaagctctttcagcactggtacccataccataaccattgttttcacatacgaaaatgcaaggaatgttccaaagtttggccatgttgtacacctcaaatacttggccttgattggcagcaccatcaccgtacagtgctatgcacactccatctgtgcctttgtattgggcggcaagagcaattccgactcccaaaggaacctgagctccaacgataccgtttcctccataaaagttttcagtgtacatgtgcatagagcctcctttacccttggcgcagcccttttgccttccacagagttcggaaagaactcctactggtgggactcccataaggtaggtccaaccatgggctctgtagcagtgatgacaccatcgtatgggcgaagagcagccttgatacctacagctacagcttcctgtccagagtaaagatgacagaatcctctaatgattttgtctttgtagaggttaccagctgcggtttccatccttctaatggtgtgcatttgtgtgtagtaattgatggcatcttctttatttaaagttactgatgtagcaggagattcatctaatttatgtagtctgtaaggttttgtttcaaaagaagcttctgtagcgaagttctttgaaaaggcgcccaacgtttttttgggcaaaacggtttttgtgcaaacagttctaacacaatttggaagcattctgatagataaatgtgaagattgtaggtgtcttttatttagaaggaggttttataggtcttcgtccctagcagccagactttttcttgcagataaaattatcgcaaatctaaaatctacataaacccctttaaga

SEQ ID NO: 1766 - DNA, 3354 bp, Diabrotica virgifera
  SmartBlast Evalue=1E-158; Info="Probable pyruvate dehydrogenase E1 component subunit alpha, mitochondrial n=1 Tax=Harpegnathos saltator RepID=E2C7V7_9HYME"
ttgtaaataataatttatttatattatgtacattatatatcaatgaaaattgatgattgtaatatattgtgattaaaaaagtacttattagttttgtaatgagtacttttttgtatgatctgttgaaaaatagatggtttaaaaaatgaaaaatgatgttttctacaaaattttcgtggcctaaagacagttacaaactgtatatatacgagattgttttatacaacattttaaatggaacatagcgtattggagaggttcaaatacattttcaaactatttgtgttttatttagtatattattcttctgacatcaatccttgaactatattttcaagtttgtctaaattatccatccattgaacgcttcatgaatttggattggatagaaaattattataaagtatctatatcattaaaattttgaacctatacaataagtaacaaatacaataaataatatttagattctttccttttaagtcctttgcatgccattaatgactgttgatagatagaagatactttagaattaagtggaaattagaaataatcaaggtgtcattcagttattgacggaggaatgttctaaggtcccagcttgtcgtcctaagaaaggttataagggccagcattaaaattgagtgtcaggagcttctcatagatgtcggtggctgtatgtacggcaacagtttctttaaaagggtcgtacgcccaacagttcagatatagctactaaaaagactaaaagaactactgtcttagaacttataagcttggcaccgcattgggctgccgatgtaacaaaataaaaaacttctgttggagtgaaagtaaagagaattgtagtgtattaaaatagaagaaaatcagaaaaaggatgacctcaaggcagtggttcatggttggagcgaaattgcctcatgtcttttccaacttgtaaaacccggtctgactcttaaaaagcacttggtaatatggtgtggtaactgcggggacagaataaaaataggattttactattcacattgatgtttttggtagctaagcgcgtttttcgtactattgggcaaatgtcttcaaaatgtgcaaaggaattgaaaggaaattaacaataacaatcttcttaatgtcagttttggctaaaaaattggtaaaaataagtctatgaatgatggcaccaacatttttgaagcctattttcaatataattagaagaaaagctcctaataatttgtagaggcatgtctcttagattatataattattaataattgcgaaattaatgtcgagttcaatgtacttcaaaaatgcctaaatttttgcgccaagaacgaacagaaattatttaaaaacaaaggtcaaaagactaaagatgttatcacattttgcaatacaattaaaaacgattgaagtacttcactatgtaaatattttttaaatctaccaaaaaaatcaaacaatacttttttggtacttgtagatatttttcatattaaaacatatttaaatcaataagaaatacaaataaaatattcattttaaatatatgattatataaaagcattttaatgattgaagataaaaaaataaaaaagataaaaccaaataatgattgaaggtgaataataaatatgtaagttcactgaatatactaaaataaaaaatatgtgttaatcttacgaatattttatgatgaattgtgtatgaaataacccgttttacagaaaaatatagatcatagaaattgtattatcacagtgacctgcaggttcttgacttagttgaacattaccaattttttaacaaaacgaccatttttccggctatgataatcattgagctacattccgttaaaatttcttatttttccctaattggcagatttcgataacgctttacttcaaattaacagctggccctattcttttgtgggtgagagtagtccaggggtcgatatttctgatctggccttccaagttgacggcatagatgtcagctgggagttcgtcgagaccaagttctgcatcggatttggcttgtttggtcgcttcatcgacttgggttcggatttcaccgtcgattttcttgatttcatcaggtgtgaccaagtttgatgagatgattttctccttgaaagaggtaataggatccctggtttgtcttacttcctgaatttcatccctggttctgtaacttgtacctggatcggacatggagtgtcctgagtacctgtatgtggctgcttcaatgaccaatggtccctttccactgcctgcataattgactgcgtacctgaaacattcccttacagccaatacatccataccatctacccagattccaggaacatagtctccccttgaatagtaggtagtacttgctgaagctctttcagcactggtacccataccataaccattgttttcacatacgaaaatgcaaggaatgttccaaagtttggccatgttgtacacctcaaatacttggccttgattggcagcaccatcaccgtacagtgctatgcacactccatctgtgcctttgtattgggcggcaagagcaattccgactcccaaaggaacctgagctccaacgataccgtttcctccataaaagttttcagtgtacatgtgcatagagcctcctttacccttggcgcagcccttttgccttccacagagttcggaaagaactcctactggtgggactcccataaggtaggtccaaccatgggctctgtagcagtgatgacaccatcgtatgggcgaagagcagccttgatacctacagctacagcttcctgtccagagtaaagatgacagaatcctctaatgattttgtctttgtagaggttaccagctgcggtttccatccttctaatggtgtgcatttgtgtgtagtaattgatggcatcttctttatttaaagttactgatgtagcaggagattcatctaatttatgtagtctgtaaggttttgtttcaaaagaagcttctgtagcgaagttctttgaaaaggcgcccaacgttttatttactaaatttgtcaaacgcttagccatatttcaaagtttctgccgaattatttccagtaccaaatgacttcaatttaaccttgtggaatccactgaaaacgtcgtttaaaataaatcaatatccacttactttgggcaaaacggtttttgtgcaaacagttctaacacaatttggaagcattctgatagataaatgtgaagattgtaggtgtcttttatttagaaggaggttttataggtcttcgtccctagcagccagactttttcttgcagataaaattatcgcaaatctaaaatctacataaacccctttaaga

SEQ ID NO: 1767 - DNA, 3353 bp, Diabrotica virgifera
  SmartBlast Evalue=1E-158; Info="Probable pyruvate dehydrogenase E1 component subunit alpha, mitochondrial n=1 Tax=Harpegnathos saltator RepID=E2C7V7_9HYME"
ttgtaaataataatttatttatattatgtacattatatatcaatgaaaattgatgattgtaatatattgtgattaaaaaagtacttattagttttgtaatgagtacttttttgtatgatctgttgaaaaatagatggtttaaaaaatgaaaaatgatgttttctacaaaattttcgtggcctaaagacagttacaaactgtatatatacgagattgttttatacaacattttaaatggaacatagcgtattggagaggttcaaatacattttcaaactatttgtgttttatttagtatattattcttctgacatcaatccttgaactatattttcaagtttgtctaaattatccatccattgaacgcttcatgaatttggattggatagaaaattattataaagtatctatatcattaaaattttgaacctatacaataagtaacaaatacaataaataatatttagattctttccttttaagtcctttgcatgccattaatgactgttgatagatagaagatactttagaattaagtggaaattagaaataatcaaggtgtcattcagttattgacggaggaatgttctaaggtcccagcttgtcgtcctaagaaaggttataagggccagcattaaaattgagtgtcaggagcttctcatagatgtcggtggctgtatgtacggcaacagtttctttaaaagggtcgtacgcccaacagttcagatatagctactaaaaagactaaaagaactactgtcttagaacttataagcttggcaccgcattgggctgccgatgtaacaaaataaaaaacttctgttggagtgaaagtaaagagaattgtagtgtattaaaatagaaaaaaatcagaaaaagatgacctcgaggcagtggttcatggttggagcgaaattgcctcatgtcttttccaacttgtaaaacccggtctgactcttaagaagcacttggtaatatggtgtggtaactgcggggaccgaataaaaattggattttactatttagattgatgtttttggtagctaagcgcgtttttcgtactattgggcaaatgtcttcaaaatgtgcaaaggaattgaaaggaaattaacaataacaatcttcttaatgtcagttttggctaaaaaattggtaaaaataagtctatgaatgatggcaccaacatttttgaagcctattttcaatataattagaagaaaagctcctaataatttgtagaggcatgtctcttagattatataattattaataattgcgaaattaatgtcgagttcaatgtacttcaaaaatgcctaaatttttgcgccaagaacgaacagaaattatttaaaaacaaaggtcaaaagactaaagatgttatcacattttgcaatacaattaaaaacgattgaagtacttcactatgtaaatattttttaaatctaccaaaaaaatcaaacaatacttttttggtacttgtagatatttttcatattaaaacatatttaaatcaataagaaatacaaataaaatattcattttaaatatatgattatataaaagcattttaatgattgaagataaaaaaataaaaaagataaaaccaaataatgattgaaggtgaataataaatatgtaagttcactgaatatactaaaataaaaaatatgtgttaatcttacgaatattttatgatgaattgtgtatgaaataacccgttttacagaaaaatatagatcatagaaattgtattatcacagtgacctgcaggttcttgacttagttgaacattaccaattttttaacaaaacgaccatttttccggctatgataatcattgagctacattccgttaaaatttcttatttttccctaattggcagatttcgataacgctttacttcaaattaacagctggccctattcttttgtgggtgagagtagtccaggggtcgatatttctgatctggccttccaagttgacggcatagatgtcagctgggagttcgtcgagaccaagttctgcatcggatttggcttgtttggtcgcttcatcgacttgggttcggatttcaccgtcgattttcttgatttcatcaggtgtgaccaagtttgatgagatgattttctccttgaaagaggtaataggatccctggtttgtcttacttcctgaatttcatccctggttctgtaacttgtacctggatcggacatggagtgtcctgagtacctgtatgtggctgcttcaatgaccaatggtccctttccactgcctgcataattgactgcgtacctgaaacattcccttacagccaatacatccataccatctacccagattccaggaacatagtctccccttgaatagtaggtagtacttgctgaagctctttcagcactggtacccataccataaccattgttttcacatacgaaaatgcaaggaatgttccaaagtttggccatgttgtacacctcaaatacttggccttgattggcagcaccatcaccgtacagtgctatgcacactccatctgtgcctttgtattgggcggcaagagcaattccgactcccaaaggaacctgagctccaacgataccgtttcctccataaaagttttcagtgtacatgtgcatagagcctcctttacccttggcgcagcccttttgccttccacagagttcggaaagaactcctactggtgggactcccataaggtaggtccaaccatgggctctgtagcagtgatgacaccatcgtatgggcgaagagcagccttgatacctacagctacagcttcctgtccagagtaaagatgacagaatcctctaatgattttgtctttgtagaggttaccagctgcggtttccatccttctaatggtgtgcatttgtgtgtagtaattgatggcatcttctttatttaaagttactgatgtagcaggagattcatctaatttatgtagtctgtaaggttttgtttcaaaagaagcttctgtagcgaagttctttgaaaaggcgcccaacgttttatttactaaatttgtcaaacgcttagccatatttcaaagtttctgccgaattatttccagtaccaaatgacttcaatttaaccttgtggaatccactgaaaacgtcgtttaaaataaatcaatatccacttactttgggcaaaacggtttttgtgcaaacagttctaacacaatttggaagcattctgatagataaatgtgaagattgtaggtgtcttttatttagaaggaggttttataggtcttcgtccctagcagccagactttttcttgcagataaaattatcgcaaatctaaaatctacataaacccctttaaga

SEQ ID NO: 1768 - DNA, 3221 bp, Diabrotica virgifera
  SmartBlast Evalue=1E-160; Info="Probable pyruvate dehydrogenase E1 component subunit alpha, mitochondrial n=1 Tax=Camponotus floridanus RepID=E1ZY08_9HYME"
ttgtaaataataatttatttatattatgtacattatatatcaatgaaaattgatgattgtaatatattgtgattaaaaaagtacttattagttttgtaatgagtacttttttgtatgatctgttgaaaaatagatggtttaaaaaatgaaaaatgatgttttctacaaaattttcgtggcctaaagacagttacaaactgtatatatacgagattgttttatacaacattttaaatggaacatagcgtattggagaggttcaaatacattttcaaactatttgtgttttatttagtatattattcttctgacatcaatccttgaactatattttcaagtttgtctaaattatccatccattgaacgcttcatgaatttggattggatagaaaattattataaagtatctatatcattaaaattttgaacctatacaataagtaacaaatacaataaataatatttagattctttccttttaagtcctttgcatgccattaatgactgttgatagatagaagatactttagaattaagtggaaattagaaataatcaaggtgtcattcagttattgacggaggaatgttctaaggtcccagcttgtcgtcctaagaaaggttataagggccagcattaaaattgagtgtcaggagcttctcatagatgtcggtggctgtatgtacggcaacagtttctttaaaagggtcgtacgcccaacagttcagatatagctactaaaaagactaaaagaactactgtcttagaacttataagcttggcaccgcattgggctgccgatgtaacaaaataaaaaacttctgttggagtgaaagtaaagagaattgtagtgtattaaaatagaagaaaatcagaaaaaggatgacctcaaggcagtggttcatggttggagcgaaattgcctcatgtcttttccaacttgtaaaacccggtctgactcttaaaaagcacttggtaatatggtgtggtaactgcggggacagaataaaaataggattttactattcacattgatgtttttggtagctaagcgcgtttttcgtactattgggcaaatgtcttcaaaatgtgcaaaggaattgaaaggaaattaacaataacaatcttcttaatgtcagttttggctaaaaaattggtaaaaataagtctatgaatgatggcaccaacatttttgaagcctattttcaatataattagaagaaaagctcctaataatttgtagaggcatgtctcttagattatataattattaataattgcgaaattaatgtcgagttcaatgtacttcaaaaatgcctaaatttttgcgccaagaacgaacagaaattatttaaaaacaaaggtcaaaagactaaagatgttatcacattttgcaatacaattaaaaacgattgaagtacttcactatgtaaatattttttaaatctaccaaaaaaatcaaacaatacttttttggtacttgtagatatttttcatattaaaacatatttaaatcaataagaaatacaaataaaatattcattttaaatatatgattatataaaagcattttaatgattgaagataaaaaaataaaaaagataaaaccaaataatgattgaaggtgaataataaatatgtaagttcactgaatatactaaaataaaaaatatgtgttaatcttacgaatattttatgatgaattgtgtatgaaataacccgttttacagaaaaatatagatcatagaaattgtattatcacagtgacctgcaggttcttgacttagttgaacattaccaattttttaacaaaacgaccatttttccggctatgataatcattgagctacattccgttaaaatttcttatttttccctaattggcagatttcgataacgctttacttcaaattaacagctggccctattcttttgtgggtgagagtagtccaggggtcgatatttctgatctggccttccaagttgacggcatagatgtcagctgggagttcgtcgagaccaagttctgcatcggatttggcttgtttggtcgcttcatcgacttgggttcggatttcaccgtcgattttcttgatttcatcaggtgtgaccaagtttgatgagatgattttctccttgaaagaggtaataggatccctggtttgtcttacttcctgaatttcatccctggttctgtaacttgtacctggatcggacatggagtgtcctgagtacctgtatgtggctgcttcaatgaccaatggtccctttccactgcctgcataattgactgcgtacctgaaacattcccttacagccaatacatccataccatctacccagattccaggaacatagtctccccttgaatagtaggtagtacttgctgaagctctttcagcactggtacccataccataaccattgttttcacatacgaaaatgcaaggaatgttccaaagtttggccatgttgtacacctcaaatacttggccttgattggcagcaccatcaccgtacagtgctatgcacactccatctgtgcctttgtattgggcggcaagagcaattccgactcccaaaggaacctgagctccaacgataccgtttcctccataaaagttttcagtgtacatgtgcatagagcctcctttacccttggcgcagcccttttgccttccacagagttcggaaagaactcctactggtgggactcccataaggtaggtccaaccatgggctctgtagcagtgatgacaccatcgtatgggcgaagagcagccttgatacctacagctacagcttcctgtccagagtaaagatgacagaatcctctaatgattttgtctttgtagaggttaccagctgcggtttccatccttctaatggtgtgcatttgtgtgtagtaattgatggcatcttctttatttaaagttactgatgtagcaggagattcatctaatttatgtagtctgtaaggttttgtttcaaaagaagcttctgtagcgaagttctttgaaaaggcgcccaacgtttttttgggcaaaacggtttttgtgcaaacagttctaacacaatttggaagcattctgatagataaatgtgaagattgtaggtgtcttttatttagaaggaggttttataggtcttcgtccctagcagccagactttttcttgcagataaaattatcgcaaatctaaaatctacataaacccctttaaga

SEQ ID NO: 1769 - DNA, 3220 bp, Diabrotica virgifera
  SmartBlast Evalue=1E-160; Info="Probable pyruvate dehydrogenase E1 component subunit alpha, mitochondrial n=1 Tax=Camponotus floridanus RepID=E1ZY08_9HYME"
ttgtaaataataatttatttatattatgtacattatatatcaatgaaaattgatgattgtaatatattgtgattaaaaaagtacttattagttttgtaatgagtacttttttgtatgatctgttgaaaaatagatggtttaaaaaatgaaaaatgatgttttctacaaaattttcgtggcctaaagacagttacaaactgtatatatacgagattgttttatacaacattttaaatggaacatagcgtattggagaggttcaaatacattttcaaactatttgtgttttatttagtatattattcttctgacatcaatccttgaactatattttcaagtttgtctaaattatccatccattgaacgcttcatgaatttggattggatagaaaattattataaagtatctatatcattaaaattttgaacctatacaataagtaacaaatacaataaataatatttagattctttccttttaagtcctttgcatgccattaatgactgttgatagatagaagatactttagaattaagtggaaattagaaataatcaaggtgtcattcagttattgacggaggaatgttctaaggtcccagcttgtcgtcctaagaaaggttataagggccagcattaaaattgagtgtcaggagcttctcatagatgtcggtggctgtatgtacggcaacagtttctttaaaagggtcgtacgcccaacagttcagatatagctactaaaaagactaaaagaactactgtcttagaacttataagcttggcaccgcattgggctgccgatgtaacaaaataaaaaacttctgttggagtgaaagtaaagagaattgtagtgtattaaaatagaaaaaaatcagaaaaagatgacctcgaggcagtggttcatggttggagcgaaattgcctcatgtcttttccaacttgtaaaacccggtctgactcttaagaagcacttggtaatatggtgtggtaactgcggggaccgaataaaaattggattttactatttagattgatgtttttggtagctaagcgcgtttttcgtactattgggcaaatgtcttcaaaatgtgcaaaggaattgaaaggaaattaacaataacaatcttcttaatgtcagttttggctaaaaaattggtaaaaataagtctatgaatgatggcaccaacatttttgaagcctattttcaatataattagaagaaaagctcctaataatttgtagaggcatgtctcttagattatataattattaataattgcgaaattaatgtcgagttcaatgtacttcaaaaatgcctaaatttttgcgccaagaacgaacagaaattatttaaaaacaaaggtcaaaagactaaagatgttatcacattttgcaatacaattaaaaacgattgaagtacttcactatgtaaatattttttaaatctaccaaaaaaatcaaacaatacttttttggtacttgtagatatttttcatattaaaacatatttaaatcaataagaaatacaaataaaatattcattttaaatatatgattatataaaagcattttaatgattgaagataaaaaaataaaaaagataaaaccaaataatgattgaaggtgaataataaatatgtaagttcactgaatatactaaaataaaaaatatgtgttaatcttacgaatattttatgatgaattgtgtatgaaataacccgttttacagaaaaatatagatcatagaaattgtattatcacagtgacctgcaggttcttgacttagttgaacattaccaattttttaacaaaacgaccatttttccggctatgataatcattgagctacattccgttaaaatttcttatttttccctaattggcagatttcgataacgctttacttcaaattaacagctggccctattcttttgtgggtgagagtagtccaggggtcgatatttctgatctggccttccaagttgacggcatagatgtcagctgggagttcgtcgagaccaagttctgcatcggatttggcttgtttggtcgcttcatcgacttgggttcggatttcaccgtcgattttcttgatttcatcaggtgtgaccaagtttgatgagatgattttctccttgaaagaggtaataggatccctggtttgtcttacttcctgaatttcatccctggttctgtaacttgtacctggatcggacatggagtgtcctgagtacctgtatgtggctgcttcaatgaccaatggtccctttccactgcctgcataattgactgcgtacctgaaacattcccttacagccaatacatccataccatctacccagattccaggaacatagtctccccttgaatagtaggtagtacttgctgaagctctttcagcactggtacccataccataaccattgttttcacatacgaaaatgcaaggaatgttccaaagtttggccatgttgtacacctcaaatacttggccttgattggcagcaccatcaccgtacagtgctatgcacactccatctgtgcctttgtattgggcggcaagagcaattccgactcccaaaggaacctgagctccaacgataccgtttcctccataaaagttttcagtgtacatgtgcatagagcctcctttacccttggcgcagcccttttgccttccacagagttcggaaagaactcctactggtgggactcccataaggtaggtccaaccatgggctctgtagcagtgatgacaccatcgtatgggcgaagagcagccttgatacctacagctacagcttcctgtccagagtaaagatgacagaatcctctaatgattttgtctttgtagaggttaccagctgcggtttccatccttctaatggtgtgcatttgtgtgtagtaattgatggcatcttctttatttaaagttactgatgtagcaggagattcatctaatttatgtagtctgtaaggttttgtttcaaaagaagcttctgtagcgaagttctttgaaaaggcgcccaacgtttttttgggcaaaacggtttttgtgcaaacagttctaacacaatttggaagcattctgatagataaatgtgaagattgtaggtgtcttttatttagaaggaggttttataggtcttcgtccctagcagccagactttttcttgcagataaaattatcgcaaatctaaaatctacataaacccctttaaga

SEQ ID NO: 1770 - DNA, 4453 bp, Diabrotica virgifera
  SmartBlast Evalue=1E-135; Info=DnaJ homolog subfamily A member 1 n=1 Tax=Bombyx mori RepID=Q2F5I7_BOMMO
attatcgatagttctagatcgctctttccctttcctctttgttgtttccttgttctcacattcgacattaggatattttgtcgattagtacagaaaattccagacttccttagtccaatatttgcagtttaattgcagtgatcaatttagaatcaaatatctagtcgagaacagtgtttttaaaactatatacatatattttaagtaagtagaaagcgtgcaagtattaggaagcatggtgaatgaaactaaattttatgatattctgggtgtcaaaccagactgttcacctgaggatttaaagaaggcctacaggaaactagccttaaagtaccaccctgataaaaatccaaatgagggagaaaaattcaagcagatctcccaagcctatgaagtcctttcagacccggaaaaaaagaaaatatatgacttaggaggtgaacaagcactcaaggaacgaggagttggcggaggtttttcgagccccatggatttattcgacatgtttttcagtggtggatttggtggtggtcgacggaggaaagaacataggggcaagaatgtcatccatcaacttactgttactttagaggaactttacaaaggagcagttaggaagttggcattgcagaaaaatgttatttgtgataaatgtgagggtagaggaggcaaaaaaggagcagttgaacaatgtacaacatgtagaggtacaggtgtacaagtacaagtgcaacaaattggattaggcatgcttcaacaaattcaaacagtatgtcccgattgtagaggacaaggtgaaaagattaatcctaaagatcgttgcaagcagtgtaatggtaaaaaagtagttcgtgaacgcaaagtattagaagtacacattgacaaaggcatggttgatgaacagaaaatagtattcactggtgaaggtgatcaagaacccgaattggaacctggtgatataattatagtactagatgaaaaagaacatccagtatttaagagatacaatgtgcatgatttatacatgagaatggaaatacaattagtggaagctttgtgcggttttcagaaagctgtcaaaacattagatgatagagaactggtgattactgttttacctggtgaagttattaaaaatggggactacaaatgtattttaaatgaaggcatgccacaatataagaatccatttgaaaaaggacgtttcatcattcagttctatgttaagtttcccgatacacttcctccagaattaattcctgatttagaaagagttctaccacccagagaagaatccatgatctctgaccatgcagaagaagtgacattggttgactttgatccagaagctgaagcccggagaagatctcacaggaatgcatatgatgaagatgatgacatgcatgggcaaggtcaaagagtacaatgtgctacaaattaaatacaattttaaactactttccaaattagagatatgttaacaaagggggacaatatatttttagaataatcagtcagcaaatacagatttttactaatataaaaccaaaaaatgtttgggagtaatattcaaggttggcattattgttaagaaattgttattagtttgtttaaatttctaaacatattgtaaagcagtattaattgtttaattcacttcgtttattgcaggctcaatccatcaagatgaattaatgtaatattgcaataagaagttttatcatagctctcaaatgacaatcatatttgtgaatatgtactgtgttgtaatattttcagtctaatctttttaatttcgttattaatctcgatttaatttgttccaattgaaatatatttgaatttatcttgaatacttatttaccagctatgcctgatatgcactattgattgaactttttattaaaaaagataaatttttcttatatttcttatctttctccaatgtaatgttgtaaaggggttacagctttttagttaaattttcaggtgttttcttatttagacttttttgtggtacaatatcttctagaatattcctataaattgtgccaaaaatttagaaatgtgacatatgaagaagtatcttgagctctgcagttaatattaaacaaagatgcgttattgtgccttttttcctgattgtataatttttaataaccaaggtataaacttaattccaataataacgattgattctaaactaaattatgagatcttgattctaaaccaaattccctatattagtttcatagtagttcatattatctgttaatttgagtgttactttacttcaataaactattaagatttcaagatttctttagaagatctggcgagagagaaataggaaaaaacttttttacatatttaagattccattccttaatttacagtcatcttaaatatgaaattatatgcgtgctgttactttattttatagcggtagaaattgtaaagcatttattaatttgttatagcatcacatcactcttcatcataaataagtttatatttaaattgtataaaattatgataagtttatattatgaacataagttttgaagactactttattgagttttagacaattgaggggcttggaagtaaaagggtttaagtgcacttttttcaaattctgatttaagtacagattcgcatacctaaatggtattataccttggtggtaaattgatctaagcatatttcgggtcgcggacgtttccccaactgtcatcaatacgactaacatcacgcgtaactttgatactaaaatatttgatacactttgatactaattataaaaaaaatatgcattgaaatccagttcccgtaattcgttaaacgtgatacaagtgagtacaaagacatacatatttgtttctttgtaattacagcttcaaattaccgtacacttctcgtagactctgccgataaggtagaatcgtgttagggaaaagtcgcgcgcccacatatttcgccctacaggcgccatctatcgccattatattttgttcaatgaaaacaattgcagtttgctttggtagtaaacaggtttatccgtgctcttgaaccgttttaccacaaaactatttttagtattctgtaaaaacaaatagtaagaaacgggtttaagtgagcttgaaccattttaccacaaaactatttttagtattttgtaatgtgtaaacacatgttaatacaggatattttaagtaaataaatattagatttgtgaccaattttgaagactaattaagtattatgcaacgtgccagttgtagttacactgtggataacagctggaacaaaaatgattagtaatatgtagttaacatctgcaattgaaccgttttaccagtaacatttatcaacaccatgtaccgattcaagtacatttttttaataattgaaaaaaggaaggatatagtaagtgtaatacccttatatttttatcactttatagtacattgtacactagacaaaatttagtctaatgactcctagaatttataaaactcaaacaactttgaagatgattatctcagaactacaaaaactgcacttaaacccttttacgtctggcccccctcaattatgatactcataggcgcgctaaatgttgccaagtcagtcaagttcggtttcttgttatagataatcgatttttagaaattccaatgtgacacaaaatctaggcatgggataaaaaagtttatttgaagaaagtgtatttttttctgttctttttaatggcggtacagactcattttcaacgaaaacatttcgtttataaattcgcaaaagtctgtgtgttattgagttgccgctcctgcaatactcagatcagatttatcgatggattcttatgtagttttttcttctgaatccaaatctgaaaacggcatttcgatatttctaaccgtcttcgagataatcgaccccaaagtgtaaaatgtgacgtcacaatcgggttattttcttccgacacactacacgtccagctgaaatcgttgctattaagtaggctagttttttaatctcgatttgttaagcaaagcataggttatttacatttgagtttgacagttcgtgaatgtcaaactaaattttaaattaagtattaataaaacatcaatgacatttgatagtgaatttaattattatataaaataaataagatgttcaaaaatacaatttgagtatattttaaaagcaataatttttaagctgttttttttaaacagctttaaaaagatttatacgagtatacggcctcccctttatgataaatggactattccatttgctatgaaattaaaatacagtcggttcgctaaactcgacacaactggctagtgaatttagtaggtaatttttttgtttttgcgaataattagtaatcatttttttgcccaatgtgcaaaattatttactaaaatcactagccact

SEQ ID NO: 1771 - DNA, 4501 bp, Diabrotica virgifera
  SmartBlast Evalue=1E-135; Info=DnaJ homolog subfamily A member 1 n=1 Tax=Bombyx mori RepID=Q2F5I7_BOMMO
attatcgatagttctagatcgctctttccctttcctctttgttgtttccttgttctcacattcgacattaggatattttgtcgattagtacagaaaattccagacttccttagtccaatatttgcagtttaattgcagtgatcaatttagaatcaaatatctagtcgagaacagtgtttttaaaactatatacatatattttaagtaagtagaaagcgtgcaagtattaggaagcatggtgaatgaaactaaattttatgatattctgggtgtcaaaccagactgttcacctgaggatttaaagaaggcctacaggaaactagccttaaagtaccaccctgataaaaatccaaatgagggagaaaaattcaagcagatctcccaagcctatgaagtcctttcagacccggaaaaaaagaaaatatatgacttaggaggtgaacaagcactcaaggaacgaggagttggcggaggtttttcgagccccatggatttattcgacatgtttttcagtggtggatttggtggtggtcgacggaggaaagaacataggggcaagaatgtcatccatcaacttactgttactttagaggaactttacaaaggagcagttaggaagttggcattgcagaaaaatgttatttgtgataaatgtgagggtagaggaggcaaaaaaggagcagttgaacaatgtacaacatgtagaggtacaggtgtacaagtacaagtgcaacaaattggattaggcatgcttcaacaaattcaaacagtatgtcccgattgtagaggacaaggtgaaaagattaatcctaaagatcgttgcaagcagtgtaatggtaaaaaagtagttcgtgaacgcaaagtattagaagtacacattgacaaaggcatggttgatgaacagaaaatagtattcactggtgaaggtgatcaagaacccgaattggaacctggtgatataattatagtactagatgaaaaagaacatccagtatttaagagatacaatgtgcatgatttatacatgagaatggaaatacaattagtggaagctttgtgcggttttcagaaagctgtcaaaacattagatgatagagaactggtgattactgttttacctggtgaagttattaaaaatggggactacaaatgtattttaaatgaaggcatgccacaatataagaatccatttgaaaaaggacgtttcatcattcagttctatgttaagtttcccgatacacttcctccagaattaattcctgatttagaaagagttctaccacccagagaagaatccatgatctctgaccatgcagaagaagtgacattggttgactttgatccagaagctgaagcccggagaagatctcacaggaatgcatatgatgaagatgatgacatgcatgggcaaggtcaaagagtacaatgtgctacaaattaaatacaattttaaactactttccaaattagagatatgttaacaaagggggacaatatatttttagaataatcagtcagcaaatacagatttttactaatataaaaccaaaaaatgtttgggagtaatattcaaggttggcattattgttaagaaattgttattagtttgtttaaatttctaaacatattgtaaagcagtattaattgtttaattcacttcgtttattgcaggctcaatccatcaagatgaattaatgtaatattgcaataagaagttttatcatagctctcaaatgacaatcatatttgtgaatatgtactgtgttgtaatattttcagtctaatctttttaatttcgttattaatctcgatttaatttgttccaattgaaatatatttgaatttatcttgaatacttatttaccagctatgcctgatatgcactattgattgaactttttattaaaaaagataaatttttcttatatttcttatctttctccaatgtaatgttgtaaaggggttacagctttttagttaaattttcaggtgttttcttatttagacttttttgtggtacaatatcttctagaatattcctataaattgtgccaaaaatttagaaatgtgacatatgaagaagtatcttgagctctgcagttaatattaaacaaagatgcgttattgtgccttttttcctgattgtataatttttaataaccaaggtataaacttaattccaataataacgattgattctaaactaaattatgagatcttgattctaaaccaaattccctatattagtttcatagtagttcatattatctgttaatttgagtgttactttacttcaataaactattaagatttcaagatttctttagaagatctggcgagagagaaataggaaaaaacttttttacatatttaagattccattccttaatttacagtcatcttaaatatgaaattatatgcgtgctgttactttattttatagcggtagaaattgtaaagcatttattaatttgttatagcatcacatcactcttcatcataaataagtttatatttaaattgtataaaattatgataagtttatattatgaacataagttttgaagactactttattgagttttagacaattgaggggcttggaagtaaaagggtttaagtgcacttttttcaaattctgatttaagtacagattcgcatacctaaatggtattataccttggtggtaaattgatctaagcatatttcgggtcgcggacgtttccccaactgtcatcaatacgactaacatcacgcgtaactttgatactaaaatatttgatacactttgatactaattataaaaaaaatatgcattgaaatccagttcccgtaattcgttaaacgtgatacaagtgagtacaaagacatacatatttgtttctttgtaattacagcttcaaattaccgtacacttctcgtagactctgccgataaggtagaatcgtgttagggaaaagtcgcgcgcccacatatttcgccctacaggcgccatctatcgccattatattttgttcaatgaaaacaattgcagtttgctttggtagtaaacaggtttatccgtgctcttgaaccgttttaccacaaaactatttttagtattctgtaaaaacaaatagtaagaaacgggtttaagtgagcttgaaccattttaccacaaaactatttttagtattttgtaatgtgtaaacacatgttaatacaggatattttaagtaaataaatattagatttgtgaccaattttgaagactaattaagtattatgcaacgtgccagttgtagttacactgtggataacagctggaacaaaaatgattagtaatatgtagttaacatctgcaattgaaccgttttaccagtaacatttatcaacaccatgtaccgattcaagtacatttttttaataattgaaaaaaggaaggatatagtaagtgtaatacccttatatttttatcactttatagtacattgtacactagacaaaatttagtctaatgactcctagaatttataaaactcaaacaactttgaagatgattatctcagaactacaaaaactgcacttaaacccttttacgtctggcccccctcaattataatatggtgttaacaaatttaatttacctttctaacgtgacctttcttatctactaaaatcgaagtgtgtgaggtaatacctctgaaatatatcacaagtagacattcttcttatatattttgtccctctttggtactgtatgcattataattcctcagcaagttgtataacaggctgtttatgtcgtgttaaattaggtaatttatttaaatacacacatatatacagactaattatttattattcattttaaatacaagtcaaaaatatgtttagctttctggacgtctccacactcggacaaccggacaattgagagatctatggagaattaaataacagagttcaagatttatgaatcgtaaaagtgagaaaggcattctgaagggaaaatacatattcagctcatattaacaacaatatgtatatgaatggaagtgtttacaagacactgcctatgaagaatcagctgggaatcttagtatctattgtgtgaagaagaatataacctctttatacagtgatgagcgggctaataaccggaggatagcgcagaagatggaaaacattaagttgtgagataaagagagatgaagctggtggggtgggatgtttagcgatgaaaacctataaatttgcattatatttattgtttcccacttttagatgtattcgcggtgtgcaagtacttggaggggatacgagaaacgatcgtgcgagaatagcggagaaatattgcaactttcttaaataattcatattgtcaaattgacgtatattccatacctactgtcattgaagaagaaaaattatatattgctccacaatattgatattatatgcaattattatataaaggtaaatttaattaattgtattttgcttgcagtactgcatttta

SEQ ID NO: 1772 - DNA, 4455 bp, Diabrotica virgifera
  SmartBlast Evalue=1E-135; Info=DnaJ homolog subfamily A member 1 n=1 Tax=Bombyx mori RepID=Q2F5I7_BOMMO
attatcgatagttctagatcgctctttccctttcctctttgttgtttccttgttctcacattcgacattaggatattttgtcgattagtacagaaaattccagacttccttagtccaatatttgcagtttaattgcagtgatcaatttagaatcaaatatctagtcgagaacagtgtttttaaaactatatacatatattttaagtaagtagaaagcgtgcaagtattaggaagcatggtgaatgaaactaaattttatgatattctgggtgtcaaaccagactgttcacctgaggatttaaagaaggcctacaggaaactagccttaaagtaccaccctgataaaaatccaaatgagggagaaaaattcaagcagatctcccaagcctatgaagtcctttcagacccggaaaaaaagaaaatatatgacttaggaggtgaacaagcactcaaggaacgaggagttggcggaggtttttcgagccccatggatttattcgacatgtttttcagtggtggatttggtggtggtcgacggaggaaagaacataggggcaagaatgtcatccatcaacttactgttactttagaggaactttacaaaggagcagttaggaagttggcattgcagaaaaatgttatttgtgataaatgtgagggtagaggaggcaaaaaaggagcagttgaacaatgtacaacatgtagaggtacaggtgtacaagtacaagtgcaacaaattggattaggcatgcttcaacaaattcaaacagtatgtcccgattgtagaggacaaggtgaaaagattaatcctaaagatcgttgcaagcagtgtaatggtaaaaaagtagttcgtgaacgcaaagtattagaagtacacattgacaaaggcatggttgatgaacagaaaatagtattcactggtgaaggtgatcaagaacccgaattggaacctggtgatataattatagtactagatgaaaaagaacatccagtatttaagagatacaatgtgcatgatttatacatgagaatggaaatacaattagtggaagctttgtgcggttttcagaaagctgtcaaaacattagatgatagagaactggtgattactgttttacctggtgaagttattaaaaatggggactacaaatgtattttaaatgaaggcatgccacaatataagaatccatttgaaaaaggacgtttcatcattcagttctatgttaagtttcccgatacacttcctccagaattaattcctgatttagaaagagttctaccacccagagaagaatccatgatctctgaccatgcagaagaagtgacattggttgactttgatccagaagctgaagcccggagaagatctcacaggaatgcatatgatgaagatgatgacatgcatgggcaaggtcaaagagtacaatgtgctacaaattaaatacaattttaaactactttccaaattagagatatgttaacaaagggggacaatatatttttagaataatcagtcagcaaatacagatttttactaatataaaaccaaaaaatgtttgggagtaatattcaaggttggcattattgttaagaaattgttattagtttgtttaaatttctaaacatattgtaaagcagtattaattgtttaattcacttcgtttattgcaggctcaatccatcaagatgaattaatgtaatattgcaataagaagttttatcatagctctcaaatgacaatcatatttgtgaatatgtactgtgttgtaatattttcagtctaatctttttaatttcgttattaatctcgatttaatttgttccaattgaaatatatttgaatttatcttgaatacttatttaccagctatgcctgatatgcactattgattgaactttttattaaaaaagataaatttttcttatatttcttatctttctccaatgtaatgttgtaaaggggttacagctttttagttaaattttcaggtgttttcttatttagacttttttgtggtacaatatcttctagaatattcctataaattgtgccaaaaatttagaaatgtgacatatgaagaagtatcttgagctctgcagttaatattaaacaaagatgcgttattgtgccttttttcctgattgtataatttttaataaccaaggtataaacttaattccaataataacgattgattctaaactaaattatgagatcttgattctaaaccaaattccctatattagtttcatagtagttcatattatctgttaatttgagtgttactttacttcaataaactattaagatttcaagatttctttagaagatctggcgagagagaaataggaaaaaacttttttacatatttaagattccattccttaatttacagtcatcttaaatatgaaattatatgcgtgctgttactttattttatagcggtagaaattgtaaagcatttattaatttgttatagcatcacatcactcttcatcataaataagtttatatttaaattgtataaaattatgataagtttatattatgaacataagttttgaagactactttattgagttttagacaattgaggggcttggaagtaaaagggtttaagtgcacttttttcaaattctgatttaagtacagattcgcatacctaaatggtattataccttggtggtaaattgatctaagcatatttcgggtcgcggacgtttccccaactgtcatcaatacgactaacatcacgcgtaactttgatactaaaatatttgatacactttgatactaattataaaaaaaatatgcattgaaatccagttcccgtaattcgttaaacgtgatacaagtgagtacaaagacatacatatttgtttctttgtaattacagcttcaaattaccgtacacttctcgtagactctgccgataaggtagaatcgtgttagggaaaagtcgcgcgcccacatatttcgccctacaggcgccatctatcgccattatattttgttcaatgaaaacaattgcagtttgctttggtagtaaacaggtttatccgtgctcttgaaccgttttaccacaaaactatttttagtattctgtaaaaacaaatagtaagaaacgggtttaagtgagcttgaaccattttaccacaaaactatttttagtattttgtaatgtgtaaacacatgttaatacaggatattttaagtaaataaatattagatttgtgaccaattttgaagactaattaagtattatgcaacgtgccagttgtagttacactgtggataacagctggaacaaaaatgattagtaatatgtagttaacatctgcaattgaaccgttttaccagtaacatttatcaacaccatgtaccgattcaagtacatttttttaataattgaaaaaaggaaggatatagtaagtgtaatacccttatatttttatcactttatagtacattgtacactagacaaaatttagtctaatgactcctagaatttataaaactcaaacaactttgaagatgattatctcagaactacaaaaactgcacttaaacccttttacgtctggcccccctcaattatgatactcataggcgcgctaaatgttgccaagtcagtcaagttcggtttcttgttatagataatcgatttttagaaattccaatgtgacacaaaatctaggcatgggataaaaaagtttatttgaagaaagtgtatttttttctgttctttttaatggcggtacagactcattttcaacgaaaacatttcgtttataaattcgcaaaagtctgtgtgttattgagttgccgctcctgcaatactcagatcagatttatcgatggattcttatgtagttttttcttctgaatccaaatctgaaaacggcatttcgatatttctaaccgtcttcgagataatcgaccccaaagtgtaaaatgtgacgtcacaatcgggttattttcttccgacacactacacgtccagctgaaatcgttgctattaagtaggctagttttttaatatcgatttgttaagcaaagcataggttatttacatttgagtttgacagttcgtgaatgtcaaactaaattttaaattaagtattaataaaacatcaatgacatttgatagtgaatttaattattatataaaataaataagatgttcaaaaatacaatttgagtatattttaaaagcaataatttttttaagctgttttttttaaacagctttaaaaagatttatacgagtatacggcctcccctttatgataaatggactattccatttgctatgaaattaaaatacagtcggttcgctaaactcgacacaactggctagtgaatttagtaggtaatttttttgtttttgcgaataattagtaatcatttttttgcccaatgtgcaaaattatttactaaaatcactagccact

SEQ ID NO: 1773 - DNA, 3578 bp, Diabrotica virgifera
  SmartBlast Evalue=1E-135; Info=DnaJ homolog subfamily A member 1 n=1 Tax=Bombyx mori RepID=Q2F5I7_BOMMO
attatcgatagttctagatcgctctttccctttcctctttgttgtttccttgttctcacattcgacattaggatattttgtcgattagtacagaaaattccagacttccttagtccaatatttgcagtttaattgcagtgatcaatttagaatcaaatatctagtcgagaacagtgtttttaaaactatatacatatattttaagtaagtagaaagcgtgcaagtattaggaagcatggtgaatgaaactaaattttatgatattctgggtgtcaaaccagactgttcacctgaggatttaaagaaggcctacaggaaactagccttaaagtaccaccctgataaaaatccaaatgagggagaaaaattcaagcagatctcccaagcctatgaagtcctttcagacccggaaaaaaagaaaatatatgacttaggaggtgaacaagcactcaaggaacgaggagttggcggaggtttttcgagccccatggatttattcgacatgtttttcagtggtggatttggtggtggtcgacggaggaaagaacataggggcaagaatgtcatccatcaacttactgttactttagaggaactttacaaaggagcagttaggaagttggcattgcagaaaaatgttatttgtgataaatgtgagggtagaggaggcaaaaaaggagcagttgaacaatgtacaacatgtagaggtacaggtgtacaagtacaagtgcaacaaattggattaggcatgcttcaacaaattcaaacagtatgtcccgattgtagaggacaaggtgaaaagattaatcctaaagatcgttgcaagcagtgtaatggtaaaaaagtagttcgtgaacgcaaagtattagaagtacacattgacaaaggcatggttgatgaacagaaaatagtattcactggtgaaggtgatcaagaacccgaattggaacctggtgatataattatagtactagatgaaaaagaacatccagtatttaagagatacaatgtgcatgatttatacatgagaatggaaatacaattagtggaagctttgtgcggttttcagaaagctgtcaaaacattagatgatagagaactggtgattactgttttacctggtgaagttattaaaaatggggactacaaatgtattttaaatgaaggcatgccacaatataagaatccatttgaaaaaggacgtttcatcattcagttctatgttaagtttcccgatacacttcctccagaattaattcctgatttagaaagagttctaccacccagagaagaatccatgatctctgaccatgcagaagaagtgacattggttgactttgatccagaagctgaagcccggagaagatctcacaggaatgcatatgatgaagatgatgacatgcatgggcaaggtcaaagagtacaatgtgctacaaattaaatacaattttaaactactttccaaattagagatatgttaacaaagggggacaatatatttttagaataatcagtcagcaaatacagatttttactaatataaaaccaaaaaatgtttgggagtaatattcaaggttggcattattgttaagaaattgttattagtttgtttaaatttctaaacatattgtaaagcagtattaattgtttaattcacttcgtttattgcaggctcaatccatcaagatgaattaatgtaatattgcaataagaagttttatcatagctctcaaatgacaatcatatttgtgaatatgtactgtgttgtaatattttcagtctaatctttttaatttcgttattaatctcgatttaatttgttccaattgaaatatatttgaatttatcttgaatacttatttaccagctatgcctgatatgcactattgattgaactttttattaaaaaagataaatttttcttatatttcttatctttctccaatgtaatgttgtaaaggggttacagctttttagttaaattttcaggtgttttcttatttagacttttttgtggtacaatatcttctagaatattcctataaattgtgccaaaaatttagaaatgtgacatatgaagaagtatcttgagctctgcagttaatattaaacaaagatgcgttattgtgccttttttcctgattgtataatttttaataaccaaggtataaacttaattccaataataacgattgattctaaactaaattatgagatcttgattctaaaccaaattccctatattagtttcatagtagttcatattatctgttaatttgagtgttactttacttcaataaactattaagatttcaagatttctttagaagatctggcgagagagaaataggaaaaaacttttttacatatttaagattccattccttaatttacagtcatcttaaatatgaaattatatgcgtgctgttactttattttatagcggtagaaattgtaaagcatttattaatttgttatagcatcacatcactcttcatcataaataagtttatatttaaattgtataaaattatgataagtttatattatgaacataagttttgaagactactttattgagttttagacaattgaggggcttggaagtaaaagggtttaagtgcacttttttcaaattctgatttaagtacagattcgcatacctaaatggtattataccttggtggtaaattgatctaagcatatttcgggtcgcggacgtttccccaactgtcatcaatacgactaacatcacgcgtaactttgatactaaaatatttgatacactttgatactaattataaaaaaaatatgcattgaaatccagttcccgtaattcgttaaacgtgatacaagtgagtacaaagacatacatatttgtttctttgtaattacagcttcaaattaccgtacacttctcgtagactctgccgataaggtagaatcgtgttagggaaaagtcgcgcgcccacatatttcgccctacaggcgccatctatcgccattatattttgttcaatgaaaacaattgcagtttgctttggtagtaaacaggtttatccgtgctcttgaaccgttttaccacaaaactatttttagtattctgtaaaaacaaatagtaagaaacgggtttaagtgagcttgaaccattttaccacaaaactatttttagtattttgtaatgtgtaaacacatgttaatacaggatattttaagtaaataaatattagatttgtgaccaattttgaagactaattaagtattatgcaacgtgccagttgtagttacactgtggataacagctggaacaaaaatgattagtaatatgtagttaacatctgcaattgaaccgttttaccagtaacatttatcaacaccatgtaccgattcaagtacatttttttaataattgaaaaaaggaaggatatagtaagagtaataatatacccttatatttttatcattttatagtacattgtacactagacatattttagtttaatgactcctagaatttataaaactcaaaacaactttgaaactgattatctcagaactatcaaaactgcacttaaacc

SEQ ID NO: 1774 - DNA, 3907 bp, Diabrotica virgifera
ttagctcagaaggaaaaaaaattaaaagggcagagagacactaaatctcaagtgagtattcgggctagcttcaatacaccgaatattggctttggagatatgagaagaaaatttggtaatgaaatgatagtaactaggaagaaaatgagactgttaatacaaaaatggaaggaaaatagataagaatgctagagataaaataatatcgagttacaacaaagaaagaagaagaaaaagggcgccaactcgaacgaacaactcagctctcagaaccaagaagttggacaggttcgagattttgaagtaacgaacaacaggaactctatgacactggttacaaccacctgaaatacaaaatactaaatactaaccgtgtcttgctacattatatactggtaatacagactgaaataaaacatcaacctttctaataacaaatatattaacaataactctattatacatatattgacaatgtaatatataaatcaaaacacaataacagtggtagtgggtggtgaaacggtcaaacaggaccaaacagccactaacttacaattaaccactacacactgcgctaagtaaatgtattagtagaaaatccaaaagcaaaagtccgtgtgaatagcacaaagttcttacaactaaaagttagtaatatttcctaaattgaactcgtctaatgagatacgtacacgacaagaacgctacggttaccaaaaattaagtatctcatctagcaaaaatactaattattatacaattgacttatataaatgagctggtcagactcttaatatacaatgtaaaaacccactagacatattccctattttaaaagctcgacaaaattttacccccgattccctatcaaattttaagctacaattatttatgattattattaaacaagacttacttaattagaaaaaactactatttataatatggaacaaaacaaagacctgaaaaccctatctgtcacgaaaatatgtacctagttccactcgattgtatgcatacaaacagtttacagtgcaagcaactatagagtacccaaaatatataaataataaaagtaaacaaacttatctttcaccacagttcctatttaagaattcaagatgaagtccataggagagtccttttggcacgataaactggttggatgctgtggtgggcaagtcctactgaaaaatcctaaatgttgtgaagtcaggtactggttttctccaacgaaacagcgagctctatgggtaaaccatggcaaagttgctaacagttactggtacatacttcaagtgacataaattatgcaaaggaatgcaaagtgactaagttacgacgtaactaagtgactaagtcactaagtgtctaagtggcggaatctacaataaagtttattaaatttagttatttatgtattacaataacagtagcagtacatattgaacaggcccaaacaaaaacatcaaatattaggtaggttaggtatccatatgtcatgtcaaaatttctgaagtttacttcaattcagacatgacagggacgtgcgcattagatgggcgtgacagatagactgtatagatactcgttaaaactttttataaatcacagataaaaaacttaagtaaaaacgtcacgataaggtataaaagatattagaatttaggtttggacactagaaaaacttgacctttaatgttcttttcaaatatttaaaggataatatgatctacaatttggaatttaaatttaacactaaaaccctgtggccttgattgattgttcctttgtaaatggaaatgaatatcattattataatatggattatatatgaacttaactacaatgatgcattaccacggaaaataatgagaaatatatcaacagtttacttacttggacagacgaaacacgctggccttaaacttcttttatgtaaaaaaaaccaaagataaattgagttttgatattatcgctattccaaaaaagatggtcttaatgttccttcattttagtgatatatctgctccatttttattccaaatctcgtccaaatccgccacttaagaaaaaaaaacacagcgtgttcgccctgagtcttgaccaaaactgaagtcccgatggccggatcgacaaaatcgaccgcccaggttttcgcgcgtgagcagagagatatcgttcttaagtcgatcgacggcgtcgcacacggaatttatttaggggtatttgatgaaattttattgggatttatttagttaatagcgtaactgctacattctccctcatctccagcaaaaaaaaaggaaaactcccaaaggatttcctttttttttaagttttcctgagcgaactaacgctagggcgaacccgaggatggacacagtaaaggagaaacgtggtggtataaaaccataattatggtaggctcaacagccatactatttgctgaggaggcggaacaaaaatcaggaacgaagtcatacagacagtataaaggccacgcgagatatatttaatcatatttgcagaaagtataaaacatagaagggatatgtaactaaccgacataggtaactgaccgacataagttattcaacgcgataattttaatttagtaaaaccaaagattgaagaaaaaaaacaaacaattacgcgttaatcgcttacattctaaatataattatacaaccttatagagtaagttaactcttaacactacttactatctacattctcatgtgttaacaaaccatcattaaaactaaattacaggcgtttattaacaacccctaacacaatattaccagaaccattcacaacaatcaaactaaaacaaatcctattaactctacccaacattgacactagagcgaacaaattctattaatcacccgagagttcaatgagggactaattcatcaggactagttgaaactacatcgctacaaagctaaacctatatgatatggttccggatatcaacaacaactaaaaagcaaggtaaaagataatccttaacctctactctcttgggcagtgataggaagacacaatataggtaaagatactagcaagcccactatactcatggtatagggtatgctaaaaggtaaaaggtataaaaatcctaactgtaatacctaaactgtactattgacgtggtccaattctttactcacgacaagcacagagaaggacagattcttaggactttataataatcaagataaagataagatatacattcaatcaagatatagataagagataaactcatcaaggtaaaggtacgaggtaaactcaaggtaaagataaagataaatgcatcaaggtaaaggtactagataaactcatatctaccttttcatatttaaggtagaagaacatctactaacataatgctcagtagggagacaaataaggtaactcacatactcacatccactaatccaagcaagtggtagagacaggtaaccaaacttaaagtaataagatatgttaaaactcaatcatttaaaagatatcagcataggagatgacaaccaagttaaacagacttacttacagctgaatatcagaacgatccaattatatatgacacattctaatttcaacctaagagacactctaggaacaacttatagatattaatagatttctgagccaagtgaaatgcacaagcccagggtgatcagtcctgaacccacgctaaaccctgacacagttaagtgaatacataagctttatgggcatggtccgcgcgcttgaaccatgcaaagccataactcaaagaaaatgttttaacagtattttctaagtatccctataaatactcatttaacccagaattcaagatggggaaaattcccattttccatcctgtactcctatggtatatagt

SEQ ID NO: 1775 - DNA, 3572 bp, Diabrotica virgifera
ttagctcagaaggaaaaaaaattaaaagggcagagagacactaaatctcaagtgagtattcgggctagcttcaatacaccgaatattggctttggagatatgagaagaaaatttggtaatgaaatgatagtaactaggaagaaaatgagactgttaatacaaaaatggaaggaaaatagataagaatgctagagataaaataatatcgagttacaacaaagaaagaagaagaaaaagggcgccaactcgaacgaacaactcagctctcagaaccaagaagttggacaggttcgagattttgaagtaacgaacaacaggaactctatgacactggttacaaccacctgaaatacaaaatactaaatactaaccgtgtcttgctacattatatactggtaatacagactgaaataaaacatcaacctttctaataacaaatatattaacaataactctattatacatatattgacaatgtaatatataaatcaaaacacaataacagtggtagtgggtggtgaaacggtcaaacaggaccaaacagccactaacttacaattaaccactacacactgcgctaagtaaatgtattagtagaaaatccaaaagcaaaagtccgtgtgaatagcacaaagttcttacaactaaaagttagtaatatttcctaaattgaactcgtctaatgagatacgtacacgacaagaacgctacggttaccaaaaattaagtatctcatctagcaaaaatactaattattatacaattgacttatataaatgagctggtcagactcttaatatacaatgtaaaaacccactagacatattccctattttaaaagctcgacaaaattttacccccgattccctatcaaattttaagctacaattatttatgattattattaaacaagacttacttaattagaaaaaactactatttataatatggaacaaaacaaagacctgaaaaccctatctgtcacgaaaatatgtacctagttccactcgattgtatgcatacaaacagtttacagtgcaagcaactatagagtacccaaaatatataaataataaaagtaaacaaacttatctttcaccacagttcctatttaagaattcaagatgaagtccataggagagtccttttggcacgataaactggttggatgctgtggtgggcaagtcctactgaaaaatcctaaatgttgtgaagtcaggtactggttttctccaacgaaacagcgagctctatgggtaaaccatggcaaagttgctaacagttactggtacatacttcaagtgacataaattatgcaaaggaatgcaaagtgactaagttacgacgtaactaagtgactaagtcactaagtgtctaagtggcggaatctacaataaagtttattaaatttagttatttatgtattacaataacagtagcagtacatattgaacaggcccaaacaaaaacatcaaatattaggtaggttaggtatccatatgtcatgtcaaaatttctgaagtttacttcaattcagacatgacagggacgtgcgcattagatgggcgtgacagatagactgtatagatactcgttaaaactttttataaatcacagataaaaaacttaagtaaaaacgtcacgataaggtataaaagatattagaatttaggtttggacactagaaaaacttgacctttaatgttcttttcaaatatttaaaggataatatgatctacaatttggaatttaaatttaacactaaaaccctgtggccttgattgattgttcctttgtaaatggaaatgaatatcattattataatatggattatatatgaacttaactacaatgatgcattaccacggaaaataatgagaaatatatcaacagtttacttacttggacagacgaaacacgctggccttaaacttcttttatgtaaaaaaaaccaaagataaattgagttttgatattatcgctattccaaaaaagatggtcttaatgttccttcattttagtgatatatctgctccatttttattccaaatctcgtccaaatccgccacttaagaaaaaaaaacacagcgtgttcgccctgagtcttgaccaaaactgaagtcccgatggccggatcgacaaaatcgaccgcccaggttttcgcgcgtgagcagagagatatcgttcttaagtcgatcgacggcgtcgcacacggaatttatttaggggtatttgatgaaattttattgggatttatttagttaatagcgtaactgctacattctccctcatctccagcaaaaaaaaaggaaaactcccaaaggatttcctttttttttaagttttcctgagcgaactaacgctagggcgaacccgaggatggacacagtaaaggagaaacgtggtggtataaaaccataattatggtaggctcaacagccatactatttgctgaggaggcggaacaaaaatcaggaacgaagtcatacagacagtataaaggccacgcgagatatatttaatcatatttgcagaaagtataaaacatagaagggatatgtaactaaccgacataggtaactgaccgacataagttattcaacgcgataattttaatttagtaaaaccaaagattgaagaaaaaaaacaaacaattacgcgttaatcgcttacattctaaatataattatacaaccttatagagtaagttaactcttaacactacttactatctacattctcatgtgttaacaaaccatcattaaaactaaattacaggcgtttattaacaacccctaacacaatattaccagaaccattcacaacaatcaaactaaaacaaatcctattaactctacccaacattgacactagagcgaacaaattctattaatcacccgagagttcaatgagggactaattcatcaggactagttgaaactacatcgctacaaagctaaacctatatgatatggttccggatatcaacaacaactaaaaagcaaggtaaaagataatccttaacctctactctcttgggcagtgataggaagacacaatataggtaaagatactagcaagcccactatactcatggtatagggtatgctaaaaggtaaaaggtataaaaatcctaactgtaatacctaaactgtactattgacgtggtccaattctttactcacgacaagcacagagaaggacagattcttaggactttataataatcaagataaagataagatatacattcaatcaagatatagataagagataaactcatcaaggtaaaggtacgaggtaaactcaaggtaaagataaagataaatgcatcaaggtaaaggtactagataaactcaaactaaaggtaaagataaactcacttcaggtaaaggtaaagataaactcatatctaccttttcatatttaaggtagaagaacatctactaacataatgctcagtagggagacaaataaggtaactcacatactcacatccactaatccaagcaagtggtagagacaggtaaccaaacttaaagtaataagatatgttaaaactcaaatcattt

SEQ ID NO: 1776 - DNA, 3393 bp, Diabrotica virgifera
ttagctcagaaggaaaaaaaattaaaagggcagagagacactaaatctcaagtgagtattcgggctagcttcaatacaccgaatattggctttggagatatgagaagaaaatttggtaatgaaatgatagtaactaggaagaaaatgagactgttaatacaaaaatggaaggaaaatagataagaatgctagagataaaataatatcgagttacaacaaagaaagaagaagaaaaagggcgccaactcgaacgaacaactcagctctcagaaccaagaagttggacaggttcgagattttgaagtaacgaacaacaggaactctatgacactggttacaaccacctgaaatacaaaatactaaatactaaccgtgtcttgctacattatatactggtaatacagactgaaataaaacatcaacctttctaataacaaatatattaacaataactctattatacatatattgacaatgtaatatataaatcaaaacacaataacagtggtagtgggtggtgaaacggtcaaacaggaccaaacagccactaacttacaattaaccactacacactgcgctaagtaaatgtattagtagaaaatccaaaagcaaaagtccgtgtgaatagcacaaagttcttacaactaaaagttagtaatatttcctaaattgaactcgtctaatgagatacgtacacgacaagaacgctacggttaccaaaaattaagtatctcatctagcaaaaatactaattattatacaattgacttatataaatgagctggtcagactcttaatatacaatgtaaaaacccactagacatattccctattttaaaagctcgacaaaattttacccccgattccctatcaaattttaagctacaattatttatgattattattaaacaagacttacttaattagaaaaaactactatttataatatggaacaaaacaaagacctgaaaaccctatctgtcacgaaaatatgtacctagttccactcgattgtatgcatacaaacagtttacagtgcaagcaactatagagtacccaaaatatataaataataaaagtaaacaaacttatctttcaccacagttcctatttaagaattcaagatgaagtccataggagagtccttttggcacgataaactggttggatgctgtggtgggcaagtcctactgaaaaatcctaaatgttgtgaagtcaggtactggttttctccaacgaaacagcgagctctatgggtaaaccatggcaaagttgctaacagttactggtacatacttcaagtgacataaattatgcaaaggaatgcaaagtgactaagttacgacgtaactaagtgactaagtcactaagtgtctaagtggcggaatttggacagacgaaacacgctggccttaaacttcttttatgtaaaaaaaaccaaagataaattgagttttgatattatcgctattccaaaaaagatggtcttaatgttccttcattttagtgatatatctgctccatttttattccaaatctcgtccaaatccgccacttaagaaaaaaaaacacagcgtgttcgccctgagtcttgaccaaaactgaagtcccgatggccggatcgacaaaatcgaccgcccaggttttcgcgcgtgagcagagagatatcgttcttaagtcgatcgacggcgtcgcacacggaatttatttaggggtatttgatgaaattttattgggatttatttagttaatagcgtaactgctacattctccctcatctccagcaaaaaaaaaggaaaactcccaaaggatttcctttttttttaagttttcctgagcgaactaacgctagggcgaacccgaggatggacacagtaaaggagaaacgtggtggtataaaaccataattatggtaggctcaacagccatactatttgctgaggaggcggaacaaaaatcaggaacgaagtcatacagacagtataaaggccacgcgagatatatttaatcatatttgcagaaagtataaaacatagaagggatatgtaactaaccgacataggtaactgaccgacataagttattcaacgcgataattttaatttagtaaaaccaaagattgaagaaaaaaaacaaacaattacgcgttaatcgcttacattctaaatataattatacaaccttatagagtaagttaactcttaacactacttactatctacattctcatgtgttaacaaaccatcattaaaactaaattacaggcgtttattaacaacccctaacacaatattaccagaaccattcacaacaatcaaactaaaacaaatcctattaactctacccaacattgacactagagcgaacaaattctattaatcacccgagagttcaatgagggactaattcatcaggactagttgaaactacatcgctacaaagctaaacctatatgatatggttccggatatcaacaacaactaaaaagcaaggtaaaagataatccttaacctctactctcttgggcagtgataggaagacacaatataggtaaagatactagcaagcccactatactcatggtatagggtatgctaaaaggtaaaaggtataaaaatcctaactgtaatacctaaactgtactattgacgtggtccaattctttactcacgacaagcacagagaaggacagattcttaggactttataataatcaagataaagataagatatacattcaatcaagatatagataagagataaactcatcaaggtaaaggtacgaggtaaactcaaggtaaagataaagataaatgcatcaaggtaaaggtactagataaactcatatctaccttttcatatttaaggtagaagaacatctactaacataatgctcagtagggagacaaataaggtaactcacatactcacatccactaatccaagcaagtggtagagacaggtaaccaaacttaaagtaataagatatgttaaaactcaatcatttaaaagatatcagcataggagatgacaaccaagttaaacagacttacttacagctgaatatcagaacgatccaattatatatgacacattctaatttcaacctaagagacactctaggaacaacttatagatattaatagatttctgagccaagtgaaatgcacaagcccagggtgatcagtcctgaacccacgctaaaccctgacacagttaagtgaatacataagctttatgggcatggtccgcgcgcttgaaccatgcaaagccataactcaaagaaaatgttttaacagtattttctaagtatccctataaatactcatttaacccagaattcaagatggggaaaattcccattttccatcctgtactcctatggtatatagt

SEQ ID NO: 1777 - DNA, 3058 bp, Diabrotica virgifera
ttagctcagaaggaaaaaaaattaaaagggcagagagacactaaatctcaagtgagtattcgggctagcttcaatacaccgaatattggctttggagatatgagaagaaaatttggtaatgaaatgatagtaactaggaagaaaatgagactgttaatacaaaaatggaaggaaaatagataagaatgctagagataaaataatatcgagttacaacaaagaaagaagaagaaaaagggcgccaactcgaacgaacaactcagctctcagaaccaagaagttggacaggttcgagattttgaagtaacgaacaacaggaactctatgacactggttacaaccacctgaaatacaaaatactaaatactaaccgtgtcttgctacattatatactggtaatacagactgaaataaaacatcaacctttctaataacaaatatattaacaataactctattatacatatattgacaatgtaatatataaatcaaaacacaataacagtggtagtgggtggtgaaacggtcaaacaggaccaaacagccactaacttacaattaaccactacacactgcgctaagtaaatgtattagtagaaaatccaaaagcaaaagtccgtgtgaatagcacaaagttcttacaactaaaagttagtaatatttcctaaattgaactcgtctaatgagatacgtacacgacaagaacgctacggttaccaaaaattaagtatctcatctagcaaaaatactaattattatacaattgacttatataaatgagctggtcagactcttaatatacaatgtaaaaacccactagacatattccctattttaaaagctcgacaaaattttacccccgattccctatcaaattttaagctacaattatttatgattattattaaacaagacttacttaattagaaaaaactactatttataatatggaacaaaacaaagacctgaaaaccctatctgtcacgaaaatatgtacctagttccactcgattgtatgcatacaaacagtttacagtgcaagcaactatagagtacccaaaatatataaataataaaagtaaacaaacttatctttcaccacagttcctatttaagaattcaagatgaagtccataggagagtccttttggcacgataaactggttggatgctgtggtgggcaagtcctactgaaaaatcctaaatgttgtgaagtcaggtactggttttctccaacgaaacagcgagctctatgggtaaaccatggcaaagttgctaacagttactggtacatacttcaagtgacataaattatgcaaaggaatgcaaagtgactaagttacgacgtaactaagtgactaagtcactaagtgtctaagtggcggaatttggacagacgaaacacgctggccttaaacttcttttatgtaaaaaaaaccaaagataaattgagttttgatattatcgctattccaaaaaagatggtcttaatgttccttcattttagtgatatatctgctccatttttattccaaatctcgtccaaatccgccacttaagaaaaaaaaacacagcgtgttcgccctgagtcttgaccaaaactgaagtcccgatggccggatcgacaaaatcgaccgcccaggttttcgcgcgtgagcagagagatatcgttcttaagtcgatcgacggcgtcgcacacggaatttatttaggggtatttgatgaaattttattgggatttatttagttaatagcgtaactgctacattctccctcatctccagcaaaaaaaaaggaaaactcccaaaggatttcctttttttttaagttttcctgagcgaactaacgctagggcgaacccgaggatggacacagtaaaggagaaacgtggtggtataaaaccataattatggtaggctcaacagccatactatttgctgaggaggcggaacaaaaatcaggaacgaagtcatacagacagtataaaggccacgcgagatatatttaatcatatttgcagaaagtataaaacatagaagggatatgtaactaaccgacataggtaactgaccgacataagttattcaacgcgataattttaatttagtaaaaccaaagattgaagaaaaaaaacaaacaattacgcgttaatcgcttacattctaaatataattatacaaccttatagagtaagttaactcttaacactacttactatctacattctcatgtgttaacaaaccatcattaaaactaaattacaggcgtttattaacaacccctaacacaatattaccagaaccattcacaacaatcaaactaaaacaaatcctattaactctacccaacattgacactagagcgaacaaattctattaatcacccgagagttcaatgagggactaattcatcaggactagttgaaactacatcgctacaaagctaaacctatatgatatggttccggatatcaacaacaactaaaaagcaaggtaaaagataatccttaacctctactctcttgggcagtgataggaagacacaatataggtaaagatactagcaagcccactatactcatggtatagggtatgctaaaaggtaaaaggtataaaaatcctaactgtaatacctaaactgtactattgacgtggtccaattctttactcacgacaagcacagagaaggacagattcttaggactttataataatcaagataaagataagatatacattcaatcaagatatagataagagataaactcatcaaggtaaaggtacgaggtaaactcaaggtaaagataaagataaatgcatcaaggtaaaggtactagataaactcaaactaaaggtaaagataaactcacttcaggtaaaggtaaagataaactcatatctaccttttcatatttaaggtagaagaacatctactaacataatgctcagtagggagacaaataaggtaactcacatactcacatccactaatccaagcaagtggtagagacaggtaaccaaacttaaagtaataagatatgttaaaactcaaatcattt

SEQ ID NO: 1778 - DNA, 2859 bp, Diabrotica virgifera
ttagctcagaaggaaaaaaaattaaaagggcagagagacactaaatctcaagtgagtattcgggctagcttcaatacaccgaatattggctttggagatatgagaagaaaatttggtaatgaaatgatagtaactaggaagaaaatgagactgttaatacaaaaatggaaggaaaatagataagaatgctagagataaaataatatcgagttacaacaaagaaagaagaagaaaaagggcgccaactcgaacgaacaactcagctctcagaaccaagaagttggacaggttcgagattttgaagtaacgaacaacaggaactctatgacactggttacaaccacctgaaatacaaaatactaaatactaaccgtgtcttgctacattatatactggtaatacagactgaaataaaacatcaacctttctaataacaaatatattaacaataactctattatacatatattgacaatgtaatatataaatcaaaacacaataacagtggtagtgggtggtgaaacggtcaaacaggaccaaacagccactaacttacaattaaccactacacactgcgctaagtaaatgtattagtagaaaatccaaaagcaaaagtccgtgtgaatagcacaaagttcttacaactaaaagttagtaatatttcctaaattgaactcgtctaatgagatacgtacacgacaagaacgctacggttaccaaaaattaagtatctcatctagcaaaaatactaattattatacaattgacttatataaatgagctggtcagactcttaatatacaatgtaaaaacccactagacatattccctattttaaaagctcgacaaaattttacccccgattccctatcaaattttaagctacaattatttatgattattattaaacaagacttacttaattagaaaaaactactatttataatatggaacaaaacaaagacctgaaaaccctatctgtcacgaaaatatgtacctagttccactcgattgtatgcatacaaacagtttacagtgcaagcaactatagagtacccaaaatatataaataataaaagtaaacaaacttatctttcaccacagttcctatttaagaattcaagatgaagtccataggagagtccttttggcacgataaactggttggatgctgtggtgggcaagtcctactgaaaaatcctaaatgttgtgaagtcaggtactggttttctccaacgaaacagcgagctctatgggtaaaccatggcaaagttgctaacagttactggtacatacttcaagtgacataaattatgcaaaggaatgcaaagtgactaagttacgacgtaactaagtgactaagtcactaagtgtctaagtggcggaatctacaataaagtttattaaatttagttatttatgtattacaataacagtagcagtacatattgaacaggcccaaacaaaaacatcaaatattaggtaggttaggtatccatatgtcatgtcaaaatttctgaagtttacttcaattcagacatgacagggacgtgcgcattagatgggcgtgacagatagactgtatagatactcgttaaaactttttataaatcacagataaaaaacttaagtaaaaacgtcacgataaggtataaaagatattagaatttaggtttggacactagaaaaacttgacctttaatgttcttttcaaatatttaaaggataatatgatctacaatttggaatttaaatttaacactaaaaccctgtggccttgattgattgttcctttgtaaatggaaatgaatatcattattataatatggattatatatgaacttaactacaatgatgcattaccacggaaaataatgagaaatatatcaacagtttacttacttggacagacgaaacacgctggccttaaacttcttttatgtaaaaaaaaccaaagataaattgagttttgatattatcgctattccaaaaaagatggtcttaatgttccttcattttagtgatatatctgctccatttttattccaaatctcgtccaaatccgccacttaagaaaaaaaaacacagcgtgttcgccctgagtcttgaccaaaactgaagtcccgatggccggatcgacaaaatcgaccgcccaggttttcgcgcgtgagcagagagatatcgttcttaagtcgatcgacggcgtcgcacacggaatttatttaggggtatttgatgaaattttattgggatttatttagttaatagcgtaactgctacattctccctcatctccagcaaaaaaaaaggaaaactcccaaaggatttcctttttttttaagttttcctgagcgaactaacgctagggcgaacccgaggatggacacagtaaaggagaaacgtggtggtataaaaccataattatggtaggctcaacagccatactatttgctgaggaggcggaacaaaaatcaggaacgaagtcatacagacagtataaaggccacgcgagatatatttaatcatatttgcagaaagtataaaacatagaagggatatgtaactaaccgacatagttattcaacaagataatttattttaatttagtaaaaataaagatagagaaaaacaaataattacacgttaatcacttacattctaaatataattatacaaccttatagagtaagtcaactcttaacactacttactatctgcattctcaagtgttagtaacccatcattaaatctaaattacaggtgtgtattaacaacacctaacacagtataaccaagaaccatacacaacaatcaacatatcaaatttacccacattgatactagagcgaacaaattcta

SEQ ID NO: 1779 - DNA, 2345 bp, Diabrotica virgifera
ttagctcagaaggaaaaaaaattaaaagggcagagagacactaaatctcaagtgagtattcgggctagcttcaatacaccgaatattggctttggagatatgagaagaaaatttggtaatgaaatgatagtaactaggaagaaaatgagactgttaatacaaaaatggaaggaaaatagataagaatgctagagataaaataatatcgagttacaacaaagaaagaagaagaaaaagggcgccaactcgaacgaacaactcagctctcagaaccaagaagttggacaggttcgagattttgaagtaacgaacaacaggaactctatgacactggttacaaccacctgaaatacaaaatactaaatactaaccgtgtcttgctacattatatactggtaatacagactgaaataaaacatcaacctttctaataacaaatatattaacaataactctattatacatatattgacaatgtaatatataaatcaaaacacaataacagtggtagtgggtggtgaaacggtcaaacaggaccaaacagccactaacttacaattaaccactacacactgcgctaagtaaatgtattagtagaaaatccaaaagcaaaagtccgtgtgaatagcacaaagttcttacaactaaaagttagtaatatttcctaaattgaactcgtctaatgagatacgtacacgacaagaacgctacggttaccaaaaattaagtatctcatctagcaaaaatactaattattatacaattgacttatataaatgagctggtcagactcttaatatacaatgtaaaaacccactagacatattccctattttaaaagctcgacaaaattttacccccgattccctatcaaattttaagctacaattatttatgattattattaaacaagacttacttaattagaaaaaactactatttataatatggaacaaaacaaagacctgaaaaccctatctgtcacgaaaatatgtacctagttccactcgattgtatgcatacaaacagtttacagtgcaagcaactatagagtacccaaaatatataaataataaaagtaaacaaacttatctttcaccacagttcctatttaagaattcaagatgaagtccataggagagtccttttggcacgataaactggttggatgctgtggtgggcaagtcctactgaaaaatcctaaatgttgtgaagtcaggtactggttttctccaacgaaacagcgagctctatgggtaaaccatggcaaagttgctaacagttactggtacatacttcaagtgacataaattatgcaaaggaatgcaaagtgactaagttacgacgtaactaagtgactaagtcactaagtgtctaagtggcggaatttggacagacgaaacacgctggccttaaacttcttttatgtaaaaaaaaccaaagataaattgagttttgatattatcgctattccaaaaaagatggtcttaatgttccttcattttagtgatatatctgctccatttttattccaaatctcgtccaaatccgccacttaagaaaaaaaaacacagcgtgttcgccctgagtcttgaccaaaactgaagtcccgatggccggatcgacaaaatcgaccgcccaggttttcgcgcgtgagcagagagatatcgttcttaagtcgatcgacggcgtcgcacacggaatttatttaggggtatttgatgaaattttattgggatttatttagttaatagcgtaactgctacattctccctcatctccagcaaaaaaaaaggaaaactcccaaaggatttcctttttttttaagttttcctgagcgaactaacgctagggcgaacccgaggatggacacagtaaaggagaaacgtggtggtataaaaccataattatggtaggctcaacagccatactatttgctgaggaggcggaacaaaaatcaggaacgaagtcatacagacagtataaaggccacgcgagatatatttaatcatatttgcagaaagtataaaacatagaagggatatgtaactaaccgacatagttattcaacaagataatttattttaatttagtaaaaataaagatagagaaaaacaaataattacacgttaatcacttacattctaaatataattatacaaccttatagagtaagtcaactcttaacactacttactatctgcattctcaagtgttagtaacccatcattaaatctaaattacaggtgtgtattaacaacacctaacacagtataaccaagaaccatacacaacaatcaacatatcaaatttacccacattgatactagagcgaacaaattcta

SEQ ID NO: 1780 - DNA, 282 bp, Diabrotica virgifera
ctgggaacaacttatagatattaatatatttctgagccaagtgaagtgcacaagttcggggtgatcagtcctgaacccacgctaaaccctgacacactaaagcgactacataagctttatgggcatggtccgcgcgaaaccatataagaccataagtaaatcaaagaaaatattttttttttgaaaagtgttttccaattatccctataaatactcatttaacccagaattcaagatggggaaaattcccattttccatcctgtactcctatggtatatagt

SEQ ID NO: 1781 - DNA, 2290 bp, Diabrotica virgifera
  SmartBlast Evalue=1E-162; Info="Pyruvate dehydrogenase E1 component subunit beta, mitochondrial n=2 Tax=Formicidae RepID= E2C3B2_9HYME"
ttttatataacaaataataatttattttcgataatttacatgcgaggaattaataaagtaaaattgatttgataataaaagtacgcaacaaaacaaaacattaaaagacaacaaattgaaaaattgagaaatttgtgcaataagtaattgtaaataaaatgctattttcaattaggcaatcaaccacaatttcattataacatgaggatatacaaggtaactagaaagtgatttataatgacaaattatcttttaaattgcgtcccagatgtaaacgaatacatactataataaagatagaacatataagtaattcataaaatatataaaaagttataacgagtgacctaacacaaatcaagacgcaatttctagtgcctcgtatatcacagattttgacctaataactttatgcgtaaaacatttcaacacaacctctggttgttgagacaatctaccattcccaacgtttttgagtattttaaagattgactattgcaagttttacctgagaaaaattgaggttatgttacaatattaactgatgtagaatatgccattacatactgattctgaagaatgtttgtgacattattaaacttaatttcaaaaaatttgcatcttgaaattcaattttattattcgtattatacgcaaacccagaggcccatttaaaacttaaaaaactaaaaatagggctattcatcgtcgccatcttcttgtactcccgacatgtgacgtacaatatatacacgtcatacgtcatacatctttggtatatataattggtacatgcctaccaatgacgtatgacgtgtatatattgtacgtcatatgtcaagagtacggaaaaatggcagccatgaataacccgatgtatcaagaattgcacttttgacatattttacatcaaaaagtttcactcgaatctaatgcattcagaattctactttgaactttcttccttgcagtttcatcttgttgatcggatgtattatgatgatttgttactggataattctacgagatctacttgactttcaatagctttttcgttgcgtcgacgacatctttggctgttggaagggcggcggcttctaaggatttcgcgtatggcataggaacatcggcacctgtgattctgatggctggttggtctagatggaagaaggtttcggtttccattattcttgcgagaatttcagcgccgataccacatgttggccaacctaattcaactgatataagatggtgtgttttagctaccgatttcataactgtatctgtgtctaatggtctaagacttctgagattaataacttcggcttcgatgcccttaccagctaattctttagcagcgtcgagacacaattctacagccttcgagtgagctacaaatgttatatgttttcctggcttttcgatcttagcttttcctataggtagtacgaaatctttgctcaaggcttcgtcggacatcggatattgaacaccatataataattcgttttctaggaacacaactggatctggatctctgatggctgcttttaatagtcctttgctatcttcggaattgtatggagaaataaccttcaatcctggacaatgggcgtaccaagctccaaaacattgagaatgttgggcagctacaccagaagccgctccattaggtcctctgaacacaattggtacatttacacgtccagcagacatgtagaaggttttgccagcagaattgatgatttgatcaattgactgcatagcaaagttaaatgtcatgaattcgcaaatgggcctcaaaccagccatggcagcaccggttgcaattccagtgaatcccatttcagtaattggtgtgtcaatgactcttttgtctccatactttttccaaagacctctggttactttataagctccatcgtattgagctacctcttcacctagaataaacaccctctcatctctctccatttcttcgtccatggctgagttaagagcatctctgacagtcatttgcttggaggctacagcatttgttgttgaaaatgatcttctggtgattcccttttttaagtttcctattaaattcaaagatttgatagatgccattttaactgaggggatgtcttgaattcaaggtgagagaggtcgtacttaaccgtataggaagtttgtgaattggtgtagctgctttttatcagtggcctgcaaatcggaattcactcacacatatacgtaatcacaggcaaagcatgtgatgtaagtcctctaccaacgaaactcgtgg

SEQ ID NO: 1782 - DNA, 2291 bp, Diabrotica virgifera
  SmartBlast Evalue=1E-162; Info="Pyruvate dehydrogenase E1 component subunit beta, mitochondrial n=2 Tax=Formicidae RepID= E2C3B2_9HYME"
ttttatataacaaataataatttattttcgataatttacatgcgaggaattaataaagtaaaattgatttgataataaaagtacgcaacaaaacaaaacattaaaagacaacaaattgaaaaattgagaaatttgtgcaataagtaattgtaaataaaatgctattttcaattaggcaatcaaccacaatttcattataacatgaggatatacaaggtaactagaaagtgatttataatgacaaattatcttttaaattgcgtcccagatgtaaacgaatacatactataataaagatagaacatataagtaattcataaaatatataaaaagttataacgagtgacctaacacaaatcaagacgcaatttctagtgcctcgtatatcacagattttgacctaataactttatgcgtaaaacatttcaacacaacctctggttgttgagacaatctaccattcccaacgtttttgagtattttaaagattgactattgcaagttttacctgagaaaaattgaggttatgttacaatattaactgatgtagaatatgccattacatactgattctgaagaatgtttgtgacattattaaacttaatttcaaaaaatttgcatcttgaaattcaattttattattcgtattatacgcaaacccagaggcccatttaaaacttaaaaaactaaaaatagggctattcatcgtcgccatttttcttgtactcccgacatgtgacgtacaatatatacacgtcatacgtcatacatctttggtatatataattggtacatgcctaccaatgacgtatgacgtgtatatattgtacgtcatatgtcaagagtacggaaaaatggcagccatgaataacccgatgtatcaagaattgcacttttgacatattttacatcaaaaagtttcactcgaatctaatgcattcagaattctactttgaactttcttccttgcagtttcatcttgttgatcggatgtattatgatgatttgttactggataattctacgagatctacttgactttcaatagctttttcgttgcgtcgacgacatctttggctgttggaagggcggcggcttctaaggatttcgcgtatggcataggaacatcggcacctgtgattctgatggctggttggtctagatggaagaaggtttcggtttccattattcttgcgagaatttcagcgccgataccacatgttggccaacctaattcaactgatataagatggtgtgttttagctaccgatttcataactgtatctgtgtctaatggtctaagacttctgagattaataacttcggcttcgatgcccttaccagctaattctttagcagcgtcgagacacaattctacagccttcgagtgagctacaaatgttatatgttttcctggcttttcgatcttagcttttcctataggtagtacgaaatctttgctcaaggcttcgtcggacatcggatattgaacaccatataataattcgttttctaggaacacaactggatctggatctctgatggctgcttttaatagtcctttgctatcttcggaattgtatggagaaataaccttcaatcctggacaatgggcgtaccaagctccaaaacattgagaatgttgggcagctacaccagaagccgctccattaggtcctctgaacacaattggtacatttacacgtccagcagacatgtagaaggttttgccagcagaattgatgatttgatcaattgactgcatagcaaagttaaatgtcatgaattcgcaaatgggcctcaaaccagccatggcagcaccggttgcaattccagtgaatcccatttcagtaattggtgtgtcaatgactcttttgtctccatactttttccaaagacctctggttactttataagctccatcgtattgagctacctcttcacctagaataaacaccctctcatctctctccatttcttcgtccatggctgagttaagagcatctctgacagtcatttgcttggaggctacagcatttgttgttgaaaatgatcttctggtgattcccttttttaagtttcctattaaattcaaagatttgatagatgccattttaactgaggggatgtcttgaattcaaggtgagagaggtcgtacttaaccgtataggaagtttgtgaattggtgtagctgctttttatcagtggcctgcaaatcggaattcactcacacatatacgtaatcacaggcaaagcatgtgatgtaagtcctctaccaacgaaactcgtgg

SEQ ID NO: 1783 - DNA, 2290 bp, Diabrotica virgifera
  SmartBlast Evalue=1E-162; Info="Pyruvate dehydrogenase E1 component subunit beta, mitochondrial n=2 Tax=Formicidae RepID= E2C3B2_9HYME"
ttttatataacaaataataatttattttcgataatttacatgcgaggaattaataaagtaaaattgatttgataataaaagtacgcaacaaaacaaaacattaaaagacaacaaattgaaaaattgagaaatttgtgcaataagtaattgtaaataaaatgctattttcaattaggcaatcaaccacaatttcattataacatgaggatatacaaggtaactagaaagtgatttataatgacaaattatcttttaaattgcgtcccagatgtaaacgaatacatactataataaagatagaacatataagtaattcataaaatatataaaaagttataacgagtgacctaacacaaatcaagacgcaatttctagtgcctcgtatatcacagattttgacctaataactttatgcgtaaaacatttcaacacaacctctggttgttgagacaatctaccattcccaacgtttttgagtattttaaagattgactattgcaagttttacctgagaaaaattgaggttatgttacaatattaactgatgtagaatatgccattacatactgattctgaagaatgtttgtgacattattaaacttaatttcaaaaaatttgcatcttgaaattcaattttattattcgtattatacgcaaacccagaggcccatttaaaacttaaaaaactaaaaatagggctattcatcgtcgccattttcttgtactcccgacatgtgacgtacaatatatacacgtcatacgtcatacatctttggtatatataattggtacatgcctaccaatgacgtatgacgtgtatatattgtacgtcatatgtcaagagtacggaaaaatggcagccatgaataacccgatgtatcaagaattgcacttttgacatattttacatcaaaaagtttcactcgaatctaatgcattcagaattctactttgaactttcttccttgcagtttcatcttgttgatcggatgtattatgatgatttgttactggataattctacgagatctacttgactttcaatagctttttcgttgcgtcgacgacatctttggctgttggaagggcggcggcttctaaggatttcgcgtatggcataggaacatcggcacctgtgattctgatggctggttggtctagatggaagaaggtttcggtttccattattcttgcgagaatttcagcgccgataccacatgttggccaacctaattcaactgatataagatggtgtgttttagctaccgatttcataactgtatctgtgtctaatggtctaagacttctgagattaataacttcggcttcgatgcccttaccagctaattctttagcagcgtcgagacacaattctacagccttcgagtgagctacaaatgttatatgttttcctggcttttcgatcttagcttttcctataggtagtacgaaatctttgctcaaggcttcgtcggacatcggatattgaacaccatataataattcgttttctaggaacacaactggatctggatctctgatggctgcttttaatagtcctttgctatcttcggaattgtatggagaaataaccttcaatcctggacaatgggcgtaccaagctccaaaacattgagaatgttgggcagctacaccagaagccgctccattaggtcctctgaacacaattggtacatttacacgtccagcagacatgtagaaggttttgccagcagaattgatgatttgatcaattgactgcatagcaaagttaaatgtcatgaattcgcaaatgggcctcaaaccagccatggcagcaccggttgcaattccagtgaatcccatttcagtaattggtgtgtcaatgactcttttgtctccatactttttccaaagacctctggttactttataagctccatcgtattgagctacctcttcacctagaataaacaccctctcatctctctccatttcttcgtccatggctgagttaagagcatctctgacagtcatttgcttggaggctacagcatttgttgttgaaaatgatcttctggtgattcccttttttaagtttcctattaaattcaaagatttgatagatgccattttaactgaggggatgtcttgaattcaaggtgagagaggtcgtacttaaccgtataggaagtttgtgaattggtgtagctgctttttatcagtggcctgcaaatcggaattcactcacacatatacgtaatcacaggcaaagcatgtgatgtaagtcctctaccaacgaaactcgtgg

SEQ ID NO: 1784 - DNA, 2284 bp, Diabrotica virgifera
  SmartBlast Evalue=1E-162; Info="Pyruvate dehydrogenase E1 component subunit beta, mitochondrial n=2 Tax=Formicidae RepID= E2C3B2_9HYME"
ttttatataacaaataataatttattttcgataatttacatgcgaggaattaataaagtaaaattgatttgataataaaagtacgcaacaaaacaaaacattaaaagacaacaaattgaaaaattgagaaatttgtgcaataagtaattgtaaataaaatgctattttcaattaggcaatcaaccacaatttcattataacatgaggatatacaaggtaactagaaagtgatttataatgacaaattatcttttaaattgcgtcccagatgtaaacgaatacatactataataaagatagaacatataagtaattcataaaatatataaaaagttataacgagtgacctaacacaaatcaagacgcaatttctagtgcctcgtatatcacagattttgacctaataactttatgcgtaaaacatttcaacacaacctctggttgttgagacaatctaccattcccaacgtttttgagtattttaaagattgactattgcaagttttacctgagaaaaattgaggttatgttacaatattaactgatgtagaatatgccattacatactgattctgaagaatgtttgtgacattattaaacttaatttcaaaaaatttgcatcttgaaattcaattttattattcgtattatacgcaaacccagaggcccatttaaaacttaaaaaactaaaaatagggctattcatcgtcgccacttttcttgcactcccgacatgtgacgtacaatatatacacgtcatacatctttggtatatataattggtacatgcctaccaatgacgtatgacgtgtatatattgtacgtcacatgtcaagagcacgagaaaatggcagccatgaataacccggtgtatcaagaattgcacttttgacatattttacatcaaaaagtttcacttgaatctaatgcattcagaattctactttgaactttcttccttgcagtttcatcttgttgatcggatgtattatgatgatttgttactggataattctacgagatctacttgactttcaatagctttttcgttgcgtcgacgacatctttggctgttggaagggcggcggcttctaaggatttcgcgtatggcataggaacatcggcacctgtgattctgatggctggttggtctagatggaagaaggtttcggtttccattattcttgcgagaatttcagcgccgataccacatgttggccaacctaattcaactgatataagatggtgtgttttagctaccgatttcataactgtatctgtgtctaatggtctaagacttctgagattaataacttcggcttcgatgcccttaccagctaattctttagcagcgtcgagacacaattctacagccttcgagtgagctacaaatgttatatgttttcctggcttttcgatcttagcttttcctataggtagtacgaaatctttgctcaaggcttcgtcggacatcggatattgaacaccatataataattcgttttctaggaacacaactggatctggatctctgatggctgcttttaatagtcctttgctatcttcggaattgtatggagaaataaccttcaatcctggacaatgggcgtaccaagctccaaaacattgagaatgttgggcagctacaccagaagccgctccattaggtcctctgaacacaattggtacatttacacgtccagcagacatgtagaaggttttgccagcagaattgatgatttgatcaattgactgcatagcaaagttaaatgtcatgaattcgcaaatgggcctcaaaccagccatggcagcaccggttgcaattccagtgaatcccatttcagtaattggtgtgtcaatgactcttttgtctccatactttttccaaagacctctggttactttataagctccatcgtattgagctacctcttcacctagaataaacaccctctcatctctctccatttcttcgtccatggctgagttaagagcatctctgacagtcatttgcttggaggctacagcatttgttgttgaaaatgatcttctggtgattcccttttttaagtttcctattaaattcaaagatttgatagatgccattttaactgaggggatgtcttgaattcaaggtgagagaggtcgtacttaaccgtataggaagtttgtgaattggtgtagctgctttttatcagtggcctgcaaatcggaattcactcacacatatacgtaatcacaggcaaagcatgtgatgtaagtcctctaccaacgaaactcgtgg

SEQ ID NO: 1785 - DNA, 1645 bp, Diabrotica virgifera
  SmartBlast Evalue=1E-162; Info="Pyruvate dehydrogenase E1 component subunit beta, mitochondrial n=2 Tax=Formicidae RepID= E2C3B2_9HYME"
tattcgtattatacgcaaacccagaggcccatttaaaacttaaaaaactaaaaatagggctattcatcgccgccacttttctcgtactcccgacacgtgacgcacaatatatacacgtcatacatctttggtatatataattggtacatgcctaccaatgacgtatgacgtgtatatattgtacgtcacatgtcaagagcacgagaaaatggcagccatgaataacccggtgtatcaagaattgcacttttgacatattttacatcaaaaagtttcacttgaatctaatgcattcagaattctactttgaactttcttccttgcagtttcatcttgttgatcggatgtattatgatgatttgttactggataattctacgagatctacttgactttcaatagctttttcgttgcgtcgacgacatctttggctgttggaagggcggcggcttctaaggatttcgcgtatggcataggaacatcggcacctgtgattctgatggctggttggtctagatggaagaaggtttcggtttccattattcttgcgagaatttcagcgccgataccacatgttggccaacctaattcaactgatataagatggtgtgttttagctaccgatttcataactgtatctgtgtctaatggtctaagacttctgagattaataacttcggcttcgatgcccttaccagctaattctttagcagcgtcgagacacaattctacagccttcgagtgagctacaaatgttatatgttttcctggcttttcgatcttagcttttcctataggtagtacgaaatctttgctcaaggcttcgtcggacatcggatattgaacaccatataataattcgttttctaggaacacaactggatctggatctctgatggctgcttttaatagtcctttgctatcttcggaattgtatggagaaataaccttcaatcctggacaatgggcgtaccaagctccaaaacattgagaatgttgggcagctacaccagaagccgctccattaggtcctctgaacacaattggtacatttacacgtccagcagacatgtagaaggttttgccagcagaattgatgatttgatcaattgactgcatagcaaagttaaatgtcatgaattcgcaaatgggcctcaaaccagccatggcagcaccggttgcaattccagtgaatcccatttcagtaattggtgtgtcaatgactcttttgtctccatactttttccaaagacctctggttactttataagctccatcgtattgagctacctcttcacctagaataaacaccctctcatctctctccatttcttcgtccatggctgagttaagagcatctctgacagtcatttgcttggaggctacagcatttgttgttgaaaatgatcttctggtgattcccttttttaagtttcctattaaattcaaagatttgatagatgccattttaactgaggggatgtcttgaattcaaggtgagagaggtcgtacttaaccgtataggaagtttgtgaattggtgtagctgctttttatcagtggcctgcaaatcggaattcactcacacatatacgtaatcacaggcaaagcatgtgatgtaagtcctctaccaacgaaactcgtgg

SEQ ID NO: 1786 - DNA, 1341 bp, Diabrotica virgifera
aaaccaacctttttctaaattgcgcaagttgtactattaatattaatgttaataaatgaaatataaatattttgccgtttcacaatttgacaattcacttttaactgcagtgccttaaattttttaaagcactagtgctttaaagtagcatttttaacgctcctatggagtgctaaaaattgcatttttaacacggttgtagaaaaacgcttttctttagttcaatcgtttgggtcaaatctttagacgttaatttgattgccttttcttcagtgcaaatgaatgaaaatttgcagacctatgcattcgcgggaacaatacacaaatagtcaatcaaaaattttttatgtttatgaattgtttaaataaaaaaaccattttaatggaaaatgcttaaattctcttgttttttacaatgtagaaacttgaaacttttacagattgtagctaattatatgaactatacataatttcaccttttacgttatttgtttacgttatgcttcatataaaacaataaagtttcaaatttatccagtttttgtccgatttctatccagttttcagcgaaaaaaagttatggcaccgcagagggacgaatgttgcccttagtatcgtcgtgggcttcgactgtccataaaacgcaaggttcgactgctgactacgctgcgctgtcgtgaacttgggcccgaaagtgtttgcgtaaggacaggcttaaaagcctgcattgagcctgcaaagcttacgtttcattgagccgagtgcgatcattaaggtacgtatccatacaagggtgaaccccgctcggtgtagctgctcaaatggatacagcatgcgctcccttatatataaaccgcaaaccggttgaaacgaagagtgtacgcgccaagcggcgatcaccgacgcgacgtatccactaagtggagctactacaccgagagaggttcacccttgtatggatacgtacctttagatggcttgcgcatcgaagaactgcattgcgagaaattaacagcgtctacaccgtgcaatagtaaagtattacaagagatggaaatactgcgaaaactataatagtcgtaaataatgattttgatttaagaaatataaagaaattacagaaaatgtacaatgtatgtatcaaaagttaaaataaatgcaaaaaaggtatctgtcatatacctacatcctttttttttaaacatgacgatatattttaatgtttgaaaagtgtaagactaaaaagtaaaaaataaaacaatatgaagatttttttaagaaacgcttttattcacttatgagtgactaaaagttaaaatataaaaaaatcaaataaaaagc

SEQ ID NO: 1787 - DNA, 1293 bp, Diabrotica virgifera
cgtatggtccaaaaatatttacgtacctatgtccaattaggcaaaaggtaaagttaaaccccttttgccacggtggggtgagattcagtaaaaactcacaccaaccgttctgtaagtaaaatataacctttacagatgcctttaccatatttttaaacgcttttatttagttcaatagtttgcagtcaaatctttagacgttaatttgactgccttttcttcaatgcaaatgaatgaaaatttgcagacatatgcattcgcgggaacaatacacgaatagtcgatcaaatttttttttatgtttatgaattgtttaaataaaaaaaccattttaatggaaaatgcttaaattctcttgttttttacaatgtagaaacttgaaacttttacagattgtagctaattatatgaactatacataatttcaccttttacgttatttgtttacgttatgcttcatataaaacaataaagtttcaaatttatccagtttttgtccgatttctatccagttttcagcgaaaaaaagttatggcaccgcagagggacgaatgttgcccttagtatcgtcgtgggcttcgactgtccataaaacgcaaggttcgactgctgactacgctgcgctgtcgtgaacttgggcccgaaagtgtttgcgtaaggacaggcttaaaagcctgcattgagcctgcaaagcttacgtttcattgagccgagtgcgatcattaaggtacgtatccatacaagggtgaaccccgctcggtgtagctgctcaaatggatacagcatgcgctcccttatatataaaccgcaaaccggttgaaacgaagagtgtacgcgccaagcggcgatcaccgacgcgacgtatccactaagtggagctactacaccgagagaggttcacccttgtatggatacgtacctttagatggcttgcgcatcgaagaactgcattgcgagaaattaacagcgtctacaccgtgcaatagtaaagtattacaagagatggaaatactgcgaaaactataatagtcgtaaataatgattttgatttaagaaatataaagaaattacagaaaatgtacaatgtatgtatcaaaagttaaaataaatgcaaaaaaggtatctgtcatatacctacatcctttttttttaaacatgacgatatattttaatgtttgaaaagtgtaagactaaaaagtaaaaaataaaacaatatgaagatttttttaagaaacgcttttattcacttatgagtgactaaaagttaaaatataaaaaaatcaaataaaaagc

SEQ ID NO: 1788 - DNA, 956 bp, Diabrotica virgifera
aaaccaacctttttctaaattgcgcaagttgtactattaatattaatgttaataaatgaaatataaatattttgccgtttcacaatttgacaattcacttttaactgcagtgccttaaattttttaaagcactagtgctttaaagtagcatttttaacgctcctatggagtgctaaaaattgcatttttaacacggttgtagaaaaacgcttttctttagttcaatcgtttgggtcaaatctttagacgttaatttgattgccttttcttcagtgcaaatgaatgaaaatttgcagacctatgcattcgcgggaacaatacacaaatagtcaatcaaaaattttttatgtttatgaattgtttaaataaaaaaaccattttaatggaaaatgcttaaattctcttgttttttacaatgtagaaacttgaaacttttacagattgtagctaattatatgaactatacataatttcaccttttacgttatttgtttacgttatgcttcatataaaacaataaagtttcaaatttatccagtttttgtccgatttctatccagttttcagcgaaaaaaagttatggcaccgcagagggacgaatgttgcccttagtatcgtcgtgggcttcgactgtccataaaacgcaaggttcgactgctgactacgctgcgctgtcgtgaacttgggcccgaaagtgtttgcgtaaggacaggcttaaaagcctgcattgagcctgcaaagcttacgtttcattgagccgagtgcgatcattaaggtacgtatccatacaagagatggaaatactgcgaaaactataatagtcgtaaataatgattttgatttaagaaatataaagaaattacagaaaatgtacaatgtatgtatcaaaagttaaaataaatgcaaaaaaaggtatctgtcatatacctacatccttttttttaacatgactatat

SEQ ID NO: 1789 - DNA, 908 bp, Diabrotica virgifera
cgtatggtccaaaaatatttacgtacctatgtccaattaggcaaaaggtaaagttaaaccccttttgccacggtggggtgagattcagtaaaaactcacaccaaccgttctgtaagtaaaatataacctttacagatgcctttaccatatttttaaacgcttttatttagttcaatagtttgcagtcaaatctttagacgttaatttgactgccttttcttcaatgcaaatgaatgaaaatttgcagacatatgcattcgcgggaacaatacacgaatagtcgatcaaatttttttttatgtttatgaattgtttaaataaaaaaaccattttaatggaaaatgcttaaattctcttgttttttacaatgtagaaacttgaaacttttacagattgtagctaattatatgaactatacataatttcaccttttacgttatttgtttacgttatgcttcatataaaacaataaagtttcaaatttatccagtttttgtccgatttctatccagttttcagcgaaaaaaagttatggcaccgcagagggacgaatgttgcccttagtatcgtcgtgggcttcgactgtccataaaacgcaaggttcgactgctgactacgctgcgctgtcgtgaacttgggcccgaaagtgtttgcgtaaggacaggcttaaaagcctgcattgagcctgcaaagcttacgtttcattgagccgagtgcgatcattaaggtacgtatccatacaagagatggaaatactgcgaaaactataatagtcgtaaataatgattttgatttaagaaatataaagaaattacagaaaatgtacaatgtatgtatcaaaagttaaaataaatgcaaaaaaaggtatctgtcatatacctacatccttttttttaacatgactatat

SEQ ID NO: 1790 - DNA, 785 bp, Diabrotica virgifera
cgtatggtccaaaaatatttacgtacctatgtccaattaggcaaaaggtaaagttaaaccccttttgccacggtggggtgagattcagtaaaaactcacaccaaccgttctgtaagtaaaatataacctttacagatgcctttaccatatttttaaacgcttttatttagttcaatagattgcgtcaaatctttggatgttaatttgactaccttttcttccatgcaaatgaatgaaaatttgcagacatatgcattcgcgggaacaatacacgaatagacaacaaaaaaatttgtttatgtttattaattgttaaaaaaacgattttaatggaaaatgcttaaattctcttgttttttacaatctagaaatttgaaatttttacggattgttagctaatgatatgaactatacataatttcactttttacgttaattgtttacgttatgcttcataaataaacaataaagtttcaaatttttttgccgattccgactacttttcatgttagtacatcatatgttttatacatattttaataaacatgacgatatattttaatgtttgaaaagtgtaagactaaaaagtaaaaaataaaaaaatatgaaaaaaatttttaagaaacgcttttcttcagttacgagtgactaaaattaaacatataaaaaaatcaaccaaaaagcaaaaaatgaaaaaaaattgaaaagatctgacacattcgataaagaaaagcgtggggcgaaaaccgtttattcgatgaacacgcgccacgcttttctttgac

SEQ ID NO: 1791 - DNA, 458 bp, Diabrotica virgifera
cgtatggtccaaaaatatttacgtacctatgtccaattaggcaaaaggtaaagttaaaccccttttgccacggtggggtgagattcagtaaaaactcacaccaaccgttctgtaagtaaaatataacctttacagatgcctttaccatatttttaaacgcttttatttagttcaatagattgcgtcaaatctttggatgttaatttgactaccttttcttccatgcaaatgaatgaaaatttgcagacatatgcattcgcggtgacaatacacgaatagacaacaataaatttttgtttatgtttattaattgtttaaataaaaaaaaacgattttaatggaaaaaggcctaaattctcttgttttttacaatgtagaaacttgaaacttttacggatggtagctaatgatataacctatacataatttcactttttacgttaattgtttacgttatg

SEQ ID NO: 1792 - DNA, 1221 bp, Diabrotica virgifera
  SmartBlast Evalue=6E-54; Info=2-deoxyglucose-6-phosphate phosphatase n=1 Tax=Aedes aegypti RepID=Q17GH7_AEDAE
tcaacctttgccgcgtgactactaggtggtgtttatcaatgataagagggagtattttgatctgattcctatcaagaatgttaataaattgggctgcacattgttttaaagaccaaaatacgtttgcatttgtgaaggtaaacattgtgaccaaaccaggtattgaaagccatcaatctccaaagggccatcatcgttcccgtctgtaaataatcgatctagaacgtggagaggaatctgcgataaccgagaaattttctctgacataaaaatgactttcgacgaagataaaatctttggtgacgacggttgttctcaaccacgagctttcccagttacgcatgttttgtttgatttggacggggtgataattgaatcagaatcgatatacgaaaagatctctgctgatatctgtcgagaatacggcaaaacatacacgaaagatctgaaatctaaagtgatgggcaccccagagtttgaaacctgtcgaataatagtaacagatctaaatttgcctctgactccagcagaatttctaaagaaatatgaagataaagtatggatagagctacagaggcctgagttgttgcctggagttaaagatgttgtgaaacttttccacaaacatgatgtacctattgctattgctacatcttccagggagccaataatgaaaatgaagacaaaacctcatagggaattaataaatctattccgccacgtcgtttgtggcagttcagacccagaagtcaaaaacaacaagcctgctccagatatattcttagtgtgtgcatcacgattcccagataaaccacatccctcacagtgtcttgttttcgaagattctcccaatggagtacaagctgcgctgaacgcaggtatgcaagttgttatggtaccaaacccagacctgcatccagaccatcctattagaagcaaagctacccaagttctagaatcatttgagcattttgaaccagagatgttcggattaccatcaagagtttaaggcgttattatttaaaattatatattttctattattttttatagatatttgttatactgataatactatgatatagtaaaaaatgtgccattacctgtgatgtccctaagtgttcgactgaattagtatttaagagtatattttatgcaaaaatatgttttattagaaatgaaaaaaatattactgagttttatattttcttccaatttctc

SEQ ID NO: 1793 - DNA, 4205 bp, Diabrotica virgifera
  SmartBlast Evalue=5E-73; Info="UDP-GlcNAc:betaGal beta-1,3-N- acetylglucosaminyltransferase 5 n=2 Tax=Formicidae RepID=E2B9U7_ 9HYME"
aataatataatatttatttaggaataacaataaagatttacaaaaaataaaaagcataatgagtactacctaaataaacataaataactcactgaagttgagctaccttgtatatatattattaatatacatacaaaagtagcaccccttgtgcgtgagacttaaaaatataatatattaacttacaatataaacaagaacaaaaaatatttaacaattgtataaatgtatacagttatatgggaatttataaaaatactaaaaaactctaacattaaataagaaaaaaaataaaaatatactaattttacatatgtaatttgtgatataaatgtgtccatcaattcaaggaatgttgcagttgataataaaaatctctatagatgtaaactttatttcgatatttatttcatacttaagtttatttattagaattgtccattaacaagttcttcgcaaaattttgttgatttgctcccaatccattgtttaatttcatatttatacctatgttttttataatttttaaattgttttaaattatccggtagtaaattgtacaatttgggccctatgtaaccaacatatctttggaggatggatttattacattttggtagaattgcattatgttttatatatctagtttgatgggcatgactgttaaaatttaatattatctttttttcatgtatatgtataagggctttatagcagaataatttacgtacagttaaaaatttactttcgttatataacagctcactagaatatcttatatttttcccgtatataattctaattatccatttctgaataatatttatagaatgcacaaaatatttcatttttgcattgtaattatgacgtcgaagtatgtgtcaaatatatccagcgttctattaatggatacttttattgttatattatttttttgcatttcatagaatctctaagcatacacacacccaaacttatatggaaccaccatgtatttcaaagtaatatttatttcttttgaaaaaacttgttattgttgcgaagaataaaggtttttattgaaaataaacaaatctataagacaatcagatagtacagctcggtacggtataaggttatttgtttgagttgcaaattgaacgaagataaataaactaacttttgcgtccaaaaacgaaaatatgcgtcatatgggattatagaacttacaacggggaaagattattggccttgtggagcaagtaatgttatcagagggacatagctgtaggcgaggcgtaacacagggcgttctgtccaaaacctatgctaggtaacaggactaggaaagttcaaaaataaagcaagggaaagtcgccaaaaagtaataacagcacgccacgatcgtttgattgtccattcagctggaaggcacccaaccatttctcacctgcagctccaaaggcagcttttggaagctacaggtgtaactctttcagttgaaacgataagaagaagagttagtgccaagaagtatagagcaggagacaattatgggttcccgagttatccaggcagcacaagattgatcgcctaaattggtgtcttcaccaccaaaactggaacattgggaattgacaaaatgtgctattttcaaaaaagtcaggatttgtgtaaaatcagatgacccacgaaatcgtgtacttagaggtcgaggaagacaagcaagaacggaaactgtcagatctgttcacaaatatacaaggggaagtgtaatgttctggagaggaattgtgattcgtataaaaactcatttaattttcatccaatcaactttaactgttcacaggtatgttgataatctgtagttaggctctagagaggtgcaacaggagaacatttaattttcttacatgataatggacctccacataccattagagtgatagagacatcattgaagcagaaggtatcccttgtttggagtggcctgcttgctcaccctgcttgttaaccctatagagaatttgtgggatatgcttaaaagaaaaattagagctcaccaggataatccacaaaacacctcacggctaatacaagctgctcttgaaggatggagcaacctaccacaataaaatgttgataatttgatttcagtttgcttacgcaaactgaagcttgcataaggaataggggtgataacactgactaaaaaaagcgaaaaaataaataaaaacaatttaaacattattcgttttacattgaaatttgttatgctattgactttaaaacaactacataatttcaatttgtttgttaatactttattgttttatttaactgttatgcatttgttattaaattgctttaaaatgaatattgtttgacttcgtgtgttcgtttttttttttaaattcgcacgaaataataagaaatatcaggtgattccatataattttgggtgtgtgtatacccgaactactacactccctaaaacgacacttagtcctaactccaagacgcaagaggctcagaggcttagtcttgttcttgctcaaatcttgcactgtcagtcttcgtcttgctaaaataggcaatcttggtattggccttgcgaaaacgtaagaacaagtccaagactgcaagaccaagaccgattttgggcaacactaaatagaacaaatcccgttcgtgagttactgagaactattaaagtaagaaaaatgtcgtacctaggacatgttcttagaggaaaccggtacagtaccttcagcttatcatgaaagataaaattgaggccgcaggaggactcgaagtaagcagatgtcatggttcaagaacatttgcgattggacacgaatatgcagtgcagaacaactattagccgaagaccttgtataactggtcaaattaattgccaccgttaggggtacctaatatgacactaaaagaagaagagaaagcacaggagaaatataaatttgtagcgaactgaataagtttaaggactatttggttatggggtaatactggcctagaattataccaaatatagtcttttttaagtctttttcgatcagtctttcatgaccctcagactatctgaaattgttttcaatcaaaatctgttctattaaccttttaagttaatttgtaatatcactaaatataaacctctgcgcttcgcgctttttaacaaaattccatagctttcttatttctttttctagcatattagccgatccaaaaaggaatggatgagatacgttataagatctataaacaatattgtataagttagactcagacaaaaccaacggttcaatattggtatgagtaaaattgagtttcttaaaaagagtaccggtaatgtggatgtcgtctatccaaaagaaatgcgacttctgagcctccttgtaaatagcaaatatcacatctggcgtgtagagcagcgcccaacccgggcagtgcgtcgggtacactctttcagggtactccgaaaaagacaccctccattttgatctataggaccttaaaactaagctattatatctaggtgtacaaaataaacctttcctagcaccatgaggggataagtcgtagataagaaaatttttcatagttggcatgttgacaaatacatcatcatcagtcttcaagatatatttggcttgagggcaatggtaaacgaaatacttcaaagtcatcacatgcttataagtcagatttctgtatgtatctgcgaaactgccttgaataacgtcattatgcaacacgttttccgcttctatcatcttctgtaagtgctcggaatgagtaccaacactgccaaccataaataatactttcacgttgtcttccttttctccccatgtttctcttatagtctgcctcttttcaaagtttgaaggcgctgaatgcactaatactagtagtagtaaaggaatggtttcgttgcaaatgaagttaatcatagaaaaattaaagttgagatcaatcagttggttgtagtcgttctccggtacgtgaagaactttttcggtgaagccggggtcatcctttgtcaatactgtgtatggtgtagatattgttgtggaggctggaactactatataacgaggggttgacaattcgtgccataataacaacactatcacaaatcccagtagaagaactaccaacttggtacatggtcttttctcaagcatgttcaattgtcatccttg

SEQ ID NO: 1794 - DNA, 4144 bp, Diabrotica virgifera
  SmartBlast Evalue=5E-73; Info="UDP-GlcNAc:betaGal beta-1,3-N- acetylglucosaminyltransferase 5 n=2 Tax=Formicidae RepID=E2B9U7_ 9HYME"
tcgttcaagtcgatatattgttaaaatgcacaatatacaatgagcaaaaataattatataaaagataaataaactttctgtaaattatgcatttaattaatattccttaaggccattcacaattacaaacatatgactttttaaattcaaacatctaatcgaatgagggggcatgaaattttagagatttattttttctcaaaagatatttttatattaagatatctcaaaggatatttatgatatatgtatgtatagtcggaatattataatccttcaaaattaactataattgataaaatataataagtattatcatactaaaataatcaacaagttaaagtttgtcacgaacggggagctatagtataatatatattatagcaaaatagtgaaacgtaatttatattatagtaaaccatatatatataccatatatttcagaatatgtaatatatgtttagtatctcgtaaacagaaatcagtaacaagtagttaaaacattccctagctatgcatttttcgtgttcgtctaaaacttcgacaaataaacaaaccgcacttcggtttagtacactgaaaagtgaggagtatagcggggagcgaaatataaatataaaatatcgctcgacgttgcatattcgacaaatacttttttcgtgtatgcagactcactcattactataatgagcgatatttctgtaatatatgagatataaaggtacgcatcaatacgttggtgctccgtatagctgatcaaatggatacggaatgcgctcccctacatataaaccgcaaaccggttgaatcgaagagggtgagcgccgagcaccaacgtatccactatatggagcttctatacggagcagcaatgtatggatacgtaccttaatatacacacacccaaacttatgtggaatcaccatgtatttcaaaacaatatttatttcttttgaaaaaagttgttattgttgcgaagaataaaggcttttattgaaaataaacaaacatataagacaatcggatagtacagctcggtacggtataggttatttgattgagttgcaaattgaacgaaacataaactaacttttgcgtccaaaaacgaaaatatgcatcatgtggggttatagaacttacaacgaggaaagattattggtcttgtggagaaagtaatgttctcagagggacataggtgtagagtgtagagctaggcgtaatacagggcgttctgtccaaaacctatgttaggtaacaggaacaaggaaagctcaaaagtaaagcaagggaaagtagccaaaagtaataacagctctccacgatcgtttaattgtccaatcagctggaaaacagccaaccatttctcacctgcagctccaaaggcagcttttggaaactacaggtgtaactgtttcagttgaaacgataagaagaagagttcgtaccaagaagtatacagcaggagacagttatgggttctcgagttatccaggcagcacaggattgatcgcctaaattggtgtcttcaccaccaaaattggaacattgggaattgacaaaatgtgctattttcaaaaaagtcaggatttgtgtaaaatcagatgacccacgaaatcgtgtacttagaggtcgaggaagacaagcaagaacggaaactgtcagatctgttcacaaatatacaaggggaagtgtaatgttctggagaggaattgtgattcgtataaaaactcatttaattttcatccaatcaactttaactgttcacaggtatgttgataatctgtagttaggctctagagaggtgcaacaggagaacatttaattttcttacatgataatggacctccacataccattagagtgatagagacatcattgaagcagaaggtatcccttgtttggagtggcctgcttgctcaccctgcttgttaaccctatagagaatttgtgggatatgcttaaaagaaaaattagagctcaccaggataatccacaaaacacctcacggctaatacaagctgctcttgaaggatggagcaacctaccacaataaaatgttgataatttgatttcagtttgcttacgcaaactgaagcttgcataaggaataggggtgataacactgactaaaaaaagcgaaaaaataaataaaaacaatttaaacattattcgttttacattgaaatttgttatgctattgactttaaaacaactacataatttcaatttgtttgttaatactttattgttttatttaactgttatgcatttgttattaaattgctttaaaatgaatattgtttgacttcgtgtgttcgtttttttttttaaattcgcacgaaataataagaaatatcaggtgattccatataattttgggtgtgtgtatacccgaactactacactccctaaaacgacacttagtcctaactccaagacgcaagaggctcagaggcttagtcttgttcttgctcaaatcttgcactgtcagtcttcgtcttgctaaaataggcaatcttggtattggccttgcgaaaacgtaagaacaagtccaagactgcaagaccaagaccgattttgggcaacactaaatagaacaaatcccgttcgtgagttactgagaactattaaagtaagaaaaatgtcgtacctaggacatgttcttagaggaaaccggtacagtaccttcagcttatcatgaaagataaaattgaggccgcaggaggactcgaagtaagcagatgtcatggttcaagaacatttgcgattggacacgaatatgcagtgcagaacaactattagccgaagaccttgtataactggtcaaattaattgccaccgttaggggtacctaatatgacactaaaagaagaagagaaagcacaggagaaatataaatttgtagcgaactgaataagtttaaggactatttggttatggggtaatactggcctagaattataccaaatatagtcttttttaagtctttttcgatcagtctttcatgaccctcagactatctgaaattgttttcaatcaaaatctgttctattaaccttttaagttaatttgtaatatcactaaatataaacctctgcgcttcgcgctttttaacaaaattccatagctttcttatttctttttctagcatattagccgatccaaaaaggaatggatgagatacgttataagatctataaacaatattgtataagttagactcagacaaaaccaacggttcaatattggtatgagtaaaattgagtttcttaaaaagagtaccggtaatgtggatgtcgtctatccaaaagaaatgcgacttctgagcctccttgtaaatagcaaatatcacatctggcgtgtagagcagcgcccaacccgggcagtgcgtcgggtacactctttcagggtactccgaaaaagacaccctccattttgatctataggaccttaaaactaagctattatatctaggtgtacaaaataaacctttcctagcaccatgaggggataagtcgtagataagaaaatttttcatagttggcatgttgacaaatacatcatcatcagtcttcaagatatatttggcttgagggcaatggtaaacgaaatacttcaaagtcatcacatgcttataagtcagatttctgtatgtatctgcgaaactgccttgaataacgtcattatgcaacacgttttccgcttctatcatcttctgtaagtgctcggaatgagtaccaacactgccaaccataaataatactttcacgttgtcttccttttctccccatgtttctcttatagtctgcctcttttcaaagtttgaaggcgctgaatgcactaatactagtagtagtaaaggaatggtttcgttgcaaatgaagttaatcatagaaaaattaaagttgagatcaatcagttggttgtagtcgttctccggtacgtgaagaactttttcggtgaagccggggtcatcctttgtcaatactgtgtatggtgtagatattgttgtggaggctggaactactatataacgaggggttgacaattcgtgccataataacaacactatcacaaatcccagtagaagaactaccaacttggtacatggtcttttctcaagcatgttcaattgtcatccttg

SEQ ID NO: 1795 - DNA, 2155 bp, Diabrotica virgifera
aataatataatatttatttaggaataacaataaagatttacaaaaaataaaaagcataatgagtactacctaaataaacataaataactcactgaagttgagctaccttgtatatatattattaatatacatacaaaagtagcaccccttgtgcgtgagacttaaaaatataatatattaacttacaatataaacaagaacaaaaaatatttaacaattgtataaatgtatacagttatatgggaatttataaaaatactaaaaaactctaacattaaataagaaaaaaaataaaaatatactaattttacatatgtaatttgtgatataaatgtgtccatcaattcaaggaatgttgcagttgataataaaaatctctatagatgtaaactttatttcgatatttatttcatacttaagtttatttattagaattgtccattaacaagttcttcgcaaaattttgttgatttgctcccaatccattgtttaatttcatatttatacctatgttttttataatttttaaattgttttaaattatccggtagtaaattgtacaatttgggccctatgtaaccaacatatctttggaggatggatttattacattttggtagaattgcattatgttttatatatctagtttgatgggcatgactgttaaaatttaatattatctttttttcatgtatatgtataagggctttatagcagaataatttacgtacagttaaaaatttactttcgttatataacagctcactagaatatcttatatttttcccgtatataattctaattatccatttctgaataatatttatagaatgcacaaaatatttcatttttgcattgtaattatgacgtcgaagtatgtgtcaaatatatccagcgttctattaatggatacttttattgttatattatttttttgcatttcatagaatctctaagcatacacacacccaaacttatatggaaccaccatgtatttcaaagtaatatttatttcttttgaaaaaacttgttattgttgcgaagaataaaggtttttattgaaaataaacaaatctataagacaatcagatagtacagctcggtacggtataaggttatttgtttgagttgcaaattgaacgaagataaataaactaacttttgcgtccaaaaacgaaaatatgcgtcatatgggattatagaacttacaacggggaaagattattggccttgtggagcaagtaatgttatcagagggacatagctgtaggcgaggcgtaacacagggcgttctgtccaaaacctatgctaggtaacaggactaggaaagttcaaaaataaagcaagggaaagtcgccaaaaagtaataacagcacgccacgatcgtttgattgtccattcagctggaaggcacccaaccatttctcacctgcagctccaaaggcagcttttggaagctacaggtgtaactctttcagttgaaacgataagaagaagagttagtgccaagaagtatagagcaggagacaattatgggttcccgagttatccaggcagcacaagattgatcgcctaaattggtgtcttcaccaccaaaactggaacattgggaattgacaaaatgtgctattttcaaaaaagtcaggatttaatgtaatcggatggaaaatcagatgacccacgaaatcgtgtagttagaggtcgaggaagacaagcaagaacgaaaactgtcagatctgttcacaaatatacaaggggaagtgtaatgttctggagaggaattgtgatcgtaaaatccctttaattttcatccaatcaactttaactgctcacaggtatgttgataacctgtagtcaggctctggagaggtgcaacaggagaaaatttaattttattgcatgataatggacctctcataccattagagtgactacagacatcattgaagcagaaggtatccctgtttggagtggcctgcttgctcacccgagcttaatcctatagagtatttgtggcatatgcttaaaagaaaattagagctcttgggataatccacaaaacaccgcacggctagtacaagctgctttaaaggatggagcaacctaccataacaaaatgttgataatttgattaggagcgtgcccacgctcatat

SEQ ID NO: 1796 - DNA, 2094 bp, Diabrotica virgifera
tcgttcaagtcgatatattgttaaaatgcacaatatacaatgagcaaaaataattatataaaagataaataaactttctgtaaattatgcatttaattaatattccttaaggccattcacaattacaaacatatgactttttaaattcaaacatctaatcgaatgagggggcatgaaattttagagatttattttttctcaaaagatatttttatattaagatatctcaaaggatatttatgatatatgtatgtatagtcggaatattataatccttcaaaattaactataattgataaaatataataagtattatcatactaaaataatcaacaagttaaagtttgtcacgaacggggagctatagtataatatatattatagcaaaatagtgaaacgtaatttatattatagtaaaccatatatatataccatatatttcagaatatgtaatatatgtttagtatctcgtaaacagaaatcagtaacaagtagttaaaacattccctagctatgcatttttcgtgttcgtctaaaacttcgacaaataaacaaaccgcacttcggtttagtacactgaaaagtgaggagtatagcggggagcgaaatataaatataaaatatcgctcgacgttgcatattcgacaaatacttttttcgtgtatgcagactcactcattactataatgagcgatatttctgtaatatatgagatataaaggtacgcatcaatacgttggtgctccgtatagctgatcaaatggatacggaatgcgctcccctacatataaaccgcaaaccggttgaatcgaagagggtgagcgccgagcaccaacgtatccactatatggagcttctatacggagcagcaatgtatggatacgtaccttaatatacacacacccaaacttatgtggaatcaccatgtatttcaaaacaatatttatttcttttgaaaaaagttgttattgttgcgaagaataaaggcttttattgaaaataaacaaacatataagacaatcggatagtacagctcggtacggtataggttatttgattgagttgcaaattgaacgaaacataaactaacttttgcgtccaaaaacgaaaatatgcatcatgtggggttatagaacttacaacgaggaaagattattggtcttgtggagaaagtaatgttctcagagggacataggtgtagagtgtagagctaggcgtaatacagggcgttctgtccaaaacctatgttaggtaacaggaacaaggaaagctcaaaagtaaagcaagggaaagtagccaaaagtaataacagctctccacgatcgtttaattgtccaatcagctggaaaacagccaaccatttctcacctgcagctccaaaggcagcttttggaaactacaggtgtaactgtttcagttgaaacgataagaagaagagttcgtaccaagaagtatacagcaggagacagttatgggttctcgagttatccaggcagcacaggattgatcgcctaaattggtgtcttcaccaccaaaattggaacattgggaattgacaaaatgtgctattttcaaaaaagtcaggatttaatgtaatcggatggaaaatcagatgacccacgaaatcgtgtagttagaggtcgaggaagacaagcaagaacgaaaactgtcagatctgttcacaaatatacaaggggaagtgtaatgttctggagaggaattgtgatcgtaaaatccctttaattttcatccaatcaactttaactgctcacaggtatgttgataacctgtagtcaggctctggagaggtgcaacaggagaaaatttaattttattgcatgataatggacctctcataccattagagtgactacagacatcattgaagcagaaggtatccctgtttggagtggcctgcttgctcacccgagcttaatcctatagagtatttgtggcatatgcttaaaagaaaattagagctcttgggataatccacaaaacaccgcacggctagtacaagctgctttaaaggatggagcaacctaccataacaaaatgttgataatttgattaggagcgtgcccacgctcatat

SEQ ID NO: 1797 - DNA, 677 bp, Diabrotica virgifera
gtaactgtttcagttgaaacgataagaagagttcgtaccaagaagtatacagcaggagccagttatgggtttccgagttatccaggcagcacacgattgatcgcctaaattgaagtcttcaccaccaaaactggaacattgggaattgaaaaaatgtgctattgtcaaaaaaagtcaggatttgtgtaaaattagatgacatacgaaatcgcgtacttagaggtcgagaaagacaagcaagaacgaaaactgttagatctattcacagatatacaaggggaagtgtaatgttctggagaggaattgtgatcgtaaaatccctttaattttcatccaatcaactttaactgctcacaggtatgttgataacctgtagtcaggctctggagaggtgcaacaggagaaaatttaattttattgcatgataatggacctctcataccattagagtgactacagacatcattgaagcagaaggtatccctgtttggagtggcctgcttgctcacccgagcttaatcctatagagtatttgtggcatatgcttaaaagaaaattagagctcttgggataatccacaaaacaccgcacggctagtacaagctgctttaaaggatggagcaacctaccataacaaaatgttgataatttgattaggagcgtgcccacgctcatat

SEQ ID NO: 1798 - DNA, 501 bp, Diabrotica virgifera
caggattggtgtaacatcagatactcacgaaatcgtgtacttagaggtcgaagaatacaagcaagaacgaaaactgtcggatctgttcacaaatatacaaggaaaagtataatgttctggagaggaattgtgatcgtaaaatccctttaattttcatccaatcaactttaactgctcacaggtatgttgataacctgtagtcaggctctggagaggtgcaacaggagaaaatttaattttattgcatgataatggacctctcataccattagagtgactacagacatcattgaagcagaaggtatccctgtttggagtggcctgcttgctcacccgagcttaatcctatagagtatttgtggcatatgcttaaaagaaaattagagctcttgggataatccacaaaacaccgcacggctagtacaagctgctttaaaggatggagcaacctaccataacaaaatgttgataatttgattaggagcgtgcccacgctcatat

SEQ ID NO: 1799 - DNA, 1070 bp, Diabrotica virgifera
  SmartBlast Evalue=3E-23; Info=Endonuclease-reverse transcriptase n=1 Tax=Bombyx mori RepID=D5LB38_BOMMO
cccaacccgggcagtacgtcgggtacactctttcagggtactcccaaaaagacaccctccattttgatctataggaccttaaaactaagctattatatctaggtgtacaaaataaacctttcttagcaccatgaggggataaatcgtagatcagtaagctttttagcttcaatctaggttgaacagcatgattgatagtacgtctccctgtctcactcccacattgatgccaacgtttctaaagatgaaatcattacaatgtaagcacaccttaaagctaaaattgcgccaaagaatgatcaaatgctatatttggtctgtgttattccatggcaccgaaacttggactctaaaggctgatatgatcaatcgcctagaggcctttgagatgtggttgcatagaacaatgctcccaatttcctctacagcgatgcaaaccaacgaagctattttaaatagagcaaatttcgtttatgatttactgaaagctattaaagcaaggagagatacaacatacttcagctgattatacaggggaaaatccagggcaagagaagtgtaggaaggagactaatctcgtggttgcgtaacttgagggaatggtacggatgcacatcaaccgaactattcagagcagcagcatctaacatcagaatagccttgatgattgccaacctccgtcgcggagatggcacgtgaagaagattaaagcaagaaaaatttatacctagggcatattcttagaggaaccggtacagaacccttcagcttatcatgagagataaaatcgagggtgcagagaaattggaaggaagcagatgtcatggcccaaaatcattcgtgattggacaggaatacgtattgcagaaaatcgtgtacaactggccaatgtaattgccaacgttaggggacctaatatgacactgacataagaagaagaaagcaccagagagatgtaaatttacagcgaattgaataattttgaggactatttggttatggggtaatggtggcctataattataccaaatatagtctttctttaagtctttttcgatcagtctttcatg

SEQ ID NO: 1800 - DNA, 2704 bp, Diabrotica virgifera
  SmartBlast Evalue=6E-88; Info=Retinaldehyde-binding protein 1 n= 1 Tax=Harpegnathos saltator RepID=E2C3S3_9HYME
atctcctccaacaaaaacactctgtatgtttgtgtcctctggaacaagtcatatttgtttatactattaatccctttgttaacagtgaaaagtgtgaggaacaataacaaagatggcatcgcccttttccctgaaccagggccccttggacgaggaaacccaagccctcgccaaggaagaactacgagagactccagaaatgatgaaaacgggaatagagaagttgagagaatacctgaacaatgacgaatcacttaattttaaagataccgatgagtacctgaccattttccttaggccttgcaaatgggaccccaaaggcgcatacgatctgatgaagagaatagctgaatttaaagaaaaacataaaggccttttagaaaatttgttacctgacgaagagaaacctgcttttacagaacataacgtagtgaatatactgaccaatttggaccacaaaggcaggagagtgcttctcgtcttcgctggagaaacatgggatccatccaaagtaacgtcagaccaaatcttccgcatgttctacctcatccacgaaatggccgtgttggaacccaagacgcaggttagaggagtggtagttatcatggactacgacggtatgggaatgaaacaagttcgtggactcggacccgctttcagccttcttttgctcaccttcatccaagacgcgatgcctttgagattaaaagaagttcatatggttaaagaaccttttgtgttcaacatggtgtggcagttattcaagcctttcttgaaaccaaagctgaagggcaggatcttcttccacggaaagaaaatgtcctctcttcacaagtatatggcaccatcacacttgcccaagaactacgatggagaactgccagccattgactattccggcaaagactggtatcctgtcatcgaagaccacatggaccacatgaagttgatgagcacctttggatacaaaaagtaataagcggaaaaagggtgttgtccttcctaagtcttcgttaaaaaatttccccaaatgtttctttgtaaaacgtttcttaatcataaataatgttaatttttgttttaatattcagttgtataaatttttcgaaaaaaattagtcgataagctaaaattaaaatgggcataaaaaacatcatgtcgcatttttgtcgtcacattaaaaagacataatttttgtaacttagctcacgtaagaaaagataaggcaacgatttaatgttgaatttaaaaaaaaaatggtcagttttgacaactgacatattttcaataaacaaatttatttatttatatcgaaatgtaataaaattaaaatgtatcaataattatcaaaggtcattgtaatgcccaatcagagcaaactatccggtgtcctgcgcgcaacaccaataattaatgtttattttaaaaaattcctgacgccgtggtggttaatcgattttagttttgcaaattgcaaatgaaaggtacagtacatttttctataagcaaaaaaatttcaatgtgctataatctgctttatttttagtcctgtaacagtttgaaaaattgaatttttttttgcgaaagctggattgcaaaatttattttgcaaaatctattgaaccgatcttaatgaaattcacagtattgcttaactctatcatatagtttttctgggtgaaatttgaagttccaaagtttagcataaatggttgaaaaacgtaaaatgcgaatacttgtttttgtacagttttttcccaattattgctattttgcaacaaaggtgactattttttaaattttcaaccaactctatattgtaggaaatttaattacacaacttttatgtctaaacaagttttctcggaaatgaatactcttaaagttgtaatcaaaaacgaagaaaaaaatcgaatttttccttcattttttgatattttgattatttaaacaatgttccggaccattttgagagggaggataactggaatattgttatttaagttattttcaagcaatttctgcaaaaaaatttgagtcacctctcaacgtccaaatgtactaatatttttacagatgcgccctggtcaatacctaataatcgtttccaaaaacacatacgacaattttttaatgaaggtgcattcatttctctattttgatttattttacaaggaaacgttgggaaatgggctgttatatacgaatatactttttttaacttttatattattatttataccaatatatattaaaaaaatcaccaaatattccgtactgaacattccatattattccatgaccaaagactggttaagactatattttgagttttagaaacattttcttatatgttaaagtttgttgtaagataagtatttaattagtgataatttttacagtctgatattctttgcgcagaataatttgatcatttttctgcttgaagatgtcatactgaagaatgaaactatagcataatgaaaaaaatgtaaaatactattttcttatattgttatgtcctaggttatggcagtggtagctgctagattaggttattttaaatttttacttaaatttttaattttaaacatacttgcacacactttttcttcaaactgttgtttttaatactattttagaaatattaagcgcctaaccaaattttttaaaaataattgtgatgtatatttcttgttttgta

SEQ ID NO: 1801 - DNA, 2704 bp, Diabrotica virgifera
  SmartBlast Evalue=6E-88; Info=Retinaldehyde-binding protein 1 n= 1 Tax=Harpegnathos saltator RepID=E2C3S3_9HYME
atctcctccaacaaaaacactctgtatgtttgtgtcctctggaacaagtcatatttgtttatactattaatccctttgttaacagtgaaaagtgtgaggaacaataacaaagatggcatcgcccttttccctgaaccagggccccttggacgaggaaacccaagccctcgccaaggaagaactacgagagactccagaaatgatgaaaacgggaatagagaagttgagagaatacctgaacaatgacgaatcacttaattttaaagataccgatgagtacctgaccattttccttaggccttgcaaatgggaccccaaaggcgcatacgatctgatgaagagaatagctgaatttaaagaaaaacataaaggcctattagaaaatttgttacctgacgaagagaaacctgcttttacagaacataacgtagtgaatatactgaccaatttggatcacaaaggcaggagagtgcttctcgtcttcgctggagaaacatgggatccatccaaagtaacgtcagaccaaatcttccgcatgttctatctcatccacgaaatggccgtgttggaacccaagacgcaggttagaggagtggtagttatcatggactacgacggcatgggaatgaaacaagtccgtggactcggtcccgctttcagccttcttttgctcaccttcatccaagacgcgatgcctttgagattaaaggaagttcatatggttaaagaaccttttgtgttcaacatggtgtggcagttattcaagcctttcttgaaaccaaagctgaagggcaggatcttcttccacggaaagaaaatgtcctctcttcacaagtatatggcaccatcacacttgcccaagaactacgatggagaactgccagccattgactattccggcaaagactggtatcctgtcatcgaagaccacatggaccacatgaagttgatgagcacctttggatacaaaaagtaataagcggaaaaagggtgttgtccttcctaagtcttcgttaaaaaatttccccaaatgtttctttgtaaaacgtttcttaatcataaataatgttaatttttgttttaatattcagttgtataaatttttcgaaaaaaattagtcgataagctaaaattaaaatgggcataaaaaacatcatgtcgcatttttgtcgtcacattaaaaagacataatttttgtaacttagctcacgtaagaaaagataaggcaacgatttaatgttgaatttaaaaaaaaaatggtcagttttgacaactgacatattttcaataaacaaatttatttatttatatcgaaatgtaataaaattaaaatgtatcaataattatcaaaggtcattgtaatgcccaatcagagcaaactatccggtgtcctgcgcgcaacaccaataattaatgtttattttaaaaaattcctgacgccgtggtggttaatcgattttagttttgcaaattgcaaatgaaaggtacagtacatttttctataagcaaaaaaatttcaatgtgctataatctgctttatttttagtcctgtaacagtttgaaaaattgaatttttttttgcgaaagctggattgcaaaatttattttgcaaaatctattgaaccgatcttaatgaaattcacagtattgcttaactctatcatatagtttttctgggtgaaatttgaagttccaaagtttagcataaatggttgaaaaacgtaaaatgcgaatacttgtttttgtacagttttttcccaattattgctattttgcaacaaaggtgactattttttaaattttcaaccaactctatattgtaggaaatttaattacacaacttttatgtctaaacaagttttctcggaaatgaatactcttaaagttgtaatcaaaaacgaagaaaaaaatcgaatttttccttcattttttgatattttgattatttaaacaatgttccggaccattttgagagggaggataactggaatattgttatttaagttattttcaagcaatttctgcaaaaaaatttgagtcacctctcaacgtccaaatgtactaatatttttacagatgcgccctggtcaatacctaataatcgtttccaaaaacacatacgacaattttttaatgaaggtgcattcatttctctattttgatttattttacaaggaaacgttgggaaatgggctgttatatacgaatatactttttttaacttttatattattatttataccaatatatattaaaaaaatcaccaaatattccgtactgaacattccatattattccatgaccaaagactggttaagactatattttgagttttagaaacattttcttatatgttaaagtttgttgtaagataagtatttaattagtgataatttttacagtctgatattctttgcgcagaataatttgatcatttttctgcttgaagatgtcatactgaagaatgaaactatagcataatgaaaaaaatgtaaaatactattttcttatattgttatgtcctaggttatggcagtggtagctgctagattaggttattttaaatttttacttaaatttttaattttaaacatacttgcacacactttttcttcaaactgttgtttttaatactattttagaaatattaagcgcctaaccaaattttttaaaaataattgtgatgtatatttcttgttttgta

SEQ ID NO: 1802 - DNA, 1496 bp, Diabrotica virgifera
  SmartBlast Evalue=3E-88; Info=Retinaldehyde-binding protein 1 n= 1 Tax=Harpegnathos saltator RepID=E2C3S3_9HYME
atctcctccaacaaaaacactctgtatgtttgtgtcctctggaacaagtcatatttgtttatactattaatccctttgttaacagtgaaaagtgtgaggaacaataacaaagatggcatcgcccttttccctgaaccagggccccttggacgaggaaacccaagccctcgccaaggaagaactacgagagactccagaaatgatgaaaacgggaatagagaagttgagagaatacctgaacaatgacgaatcacttaattttaaagataccgatgagtacctgaccattttccttaggccttgcaaatgggaccccaaaggcgcatacgatctgatgaagagaatagctgaatttaaagaaaaacataaaggccttttagaaaatttgttacctgacgaagagaaacctgcttttacagaacataacgtagtgaatatactgaccaatttggaccacaaaggcaggagagtgcttctcgtcttcgctggagaaacatgggatccatccaaagtaacgtcagaccaaatcttccgcatgttctacctcatccacgaaatggccgtgttggaacccaagacgcaggttagaggagtggtagttatcatggactacgacggtatgggaatgaaacaagttcgtggactcggacccgctttcagccttcttttgctcaccttcatccaagacgcgatgcctttgagattaaaagaagttcatatggttaaagaaccttttgtgttcaacatggtgtggcagttattcaagcctttcttgaaaccaaagctgaagggcaggatcttcttccacggaaagaaaatgtcctctcttcacaagtatatggcaccatcacacttgcccaagaactacgatggagaactgccagccattgactattccggcaaagactggtatcctgtcatcgaagaccacatggaccacatgaagttgatgagcacctttggatacaaaaagtaataagcggaaaaagggtgttgtccttcctaagtcttcgttaaaaaatttccccaaatgtttctttgtaaaacgtttcttaatcataaataatgttaatttttgttttaatattcagttgtataaatttttcgaaaaaaattagtcgataagctaaaattaaaatgggcataaaaaacatcatgtcgcatttttgtcgtcacattaaaaagacataatttttgtaacttagctcacgtaagaaaagataaggcaacgatttaatgttgaatttaaaaaaaaaatggtcagttttgacaactgacatattttcgccactgagtgcattgccatctatgtatgtgaattctctagttacactcaatacgaattttgacaagaatggcatactagtccagggcccatctgttttgagatggacgttgggaggtgactcaaatttttttgcagaaattgcttgaaagtgactcgaatagtaatatttgagttgtcctccctctcaagggggtccggaacattgttt

SEQ ID NO: 1803 - DNA, 1496 bp, Diabrotica virgifera
  SmartBlast Evalue=3E-88; Info=Retinaldehyde-binding protein 1 n= 1 Tax=Harpegnathos saltator RepID=E2C3S3_9HYME
atctcctccaacaaaaacactctgtatgtttgtgtcctctggaacaagtcatatttgtttatactattaatccctttgttaacagtgaaaagtgtgaggaacaataacaaagatggcatcgcccttttccctgaaccagggccccttggacgaggaaacccaagccctcgccaaggaagaactacgagagactccagaaatgatgaaaacgggaatagagaagttgagagaatacctgaacaatgacgaatcacttaattttaaagataccgatgagtacctgaccattttccttaggccttgcaaatgggaccccaaaggcgcatacgatctgatgaagagaatagctgaatttaaagaaaaacataaaggcctattagaaaatttgttacctgacgaagagaaacctgcttttacagaacataacgtagtgaatatactgaccaatttggatcacaaaggcaggagagtgcttctcgtcttcgctggagaaacatgggatccatccaaagtaacgtcagaccaaatcttccgcatgttctatctcatccacgaaatggccgtgttggaacccaagacgcaggttagaggagtggtagttatcatggactacgacggcatgggaatgaaacaagtccgtggactcggtcccgctttcagccttcttttgctcaccttcatccaagacgcgatgcctttgagattaaaggaagttcatatggttaaagaaccttttgtgttcaacatggtgtggcagttattcaagcctttcttgaaaccaaagctgaagggcaggatcttcttccacggaaagaaaatgtcctctcttcacaagtatatggcaccatcacacttgcccaagaactacgatggagaactgccagccattgactattccggcaaagactggtatcctgtcatcgaagaccacatggaccacatgaagttgatgagcacctttggatacaaaaagtaataagcggaaaaagggtgttgtccttcctaagtcttcgttaaaaaatttccccaaatgtttctttgtaaaacgtttcttaatcataaataatgttaatttttgttttaatattcagttgtataaatttttcgaaaaaaattagtcgataagctaaaattaaaatgggcataaaaaacatcatgtcgcatttttgtcgtcacattaaaaagacataatttttgtaacttagctcacgtaagaaaagataaggcaacgatttaatgttgaatttaaaaaaaaaatggtcagttttgacaactgacatattttcgccactgagtgcattgccatctatgtatgtgaattctctagttacactcaatacgaattttgacaagaatggcatactagtccagggcccatctgttttgagatggacgttgggaggtgactcaaatttttttgcagaaattgcttgaaagtgactcgaatagtaatatttgagttgtcctccctctcaagggggtccggaacattgttt

SEQ ID NO: 1804 - DNA, 1003 bp, Diabrotica virgifera
cataaatggttgaaaaacgtaaagtgcgaatacttgtttttgtacagttttttcccaattattgctattttgcaacaaaggtgactgttttttggatttccgaccaactctatattgtaggaagtttgattgcacaacttttatgtcaatacagcttttctcggagatgagtgactcttggggttgtagtcaagaagcgaagaaggaaatcgaatttttccttcattttttgatattttgattgtttaaacaatgttccggaccattttgagagggaggataactgaaatattgttgtttgagttgttttcgggcaatttctgcaaaaaaatttgagtcacctctcaacgtccaaatgtactaatatttttacagatgcgccctggtcaatacctaataatcgtttccaaaaacacatacgacaattttttaatgaaggtgcattcatttctctattttgatttattttacaaggaaacgttgggaaatgggctgttatatacgaatatactttttttaacttttatattattatttataccaatatatattaaaaaaatcaccaaatattccgtactgaacattccatattattccatgaccaaagactggttaagactatattttgagttttagaaacattttcttatatgttaaagtttgttgtaagataagtatttaattagtgataatttttacagtctgatattctttgcgcagaataatttgatcatttttctgcttgaagatgtcatactgaagaatgaaactatagcataatgaaaaaaatgtaaaatactattttcttatattgttatgtcctaggttatggcagtggtagctgctagattaggttattttaaatttttacttaaatttttaattttaaacatacttgcacacactttttcttcaaactgttgtttttaatactattttagaaatattaagcgcctaaccaaattttttaaaaataattgtgatgtatatttcttgttttgta

SEQ ID NO: 1805 - DNA, 945 bp, Diabrotica virgifera
caattgttgctgttttgcgacaaaggtgactattttttgaatttccaaccggctctgtgttgtaggaagtttgattgcgcaacttttgtgtcagtacagcttttctcggaagtgaatactcttggggttgtaatcaagacgaagaaagaaatcgaatttttccttcattttttgatattttgattgtttaaacaatgttccggaccattttgagagggaggataactgaaatattgttgtttgagttgttttcgggcaatttctgcaaaaaaatttgagtcacctctcaacgtccaaatgtactaatatttttacagatgcgccctggtcaatacctaataatcgtttccaaaaacacatacgacaattttttaatgaaggtgcattcatttctctattttgatttattttacaaggaaacgttgggaaatgggctgttatatacgaatatactttttttaacttttatattattatttataccaatatatattaaaaaaatcaccaaatattccgtactgaacattccatattattccatgaccaaagactggttaagactatattttgagttttagaaacattttcttatatgttaaagtttgttgtaagataagtatttaattagtgataatttttacagtctgatattctttgcgcagaataatttgatcatttttctgcttgaagatgtcatactgaagaatgaaactatagcataatgaaaaaaatgtaaaatactattttcttatattgttatgtcctaggttatggcagtggtagctgctagattaggttattttaaatttttacttaaatttttaattttaaacatacttgcacacactttttcttcaaactgttgtttttaatactattttagaaatattaagcgcctaaccaaattttttaaaaataattgtgatgtatatttcttgttttgta

SEQ ID NO: 1806 - DNA, 753 bp, Diabrotica virgifera
aaggcaacgatttaatgttgaatttaaaaaaaaaaattggtcagttttgacaactgacatattttcgccactgagtgcattgccatctatgtatgtgaattctctagttacactcaatacgaattttgacaagaatggcatacctaataatcgtttccaaaaacacatacgacaattttttaatgaaggtgcattcatttctctattttgatttattttacaaggaaacgttgggaaatgggctgttatatacgaatatactttttttaacttttatattattatttataccaatatatattaaaaaaatcaccaaatattccgtactgaacattccatattattccatgaccaaagactggttaagactatattttgagttttagaaacattttcttatatgttaaagtttgttgtaagataagtatttaattagtgataatttttacagtctgatattctttgcgcagaataatttgatcatttttctgcttgaagatgtcatactgaagaatgaaactatagcataatgaaaaaaatgtaaaatactattttcttatattgttatgtcctaggttatggcagtggtagctgctagattaggttattttaaatttttacttaaatttttaattttaaacatacttgcacacactttttcttcaaactgttgtttttaatactattttagaaatattaagcgcctaaccaaattttttaaaaataattgtgatgtatatttcttgttttgta

SEQ ID NO: 1807 - DNA, 603 bp, Diabrotica virgifera
aagtgaggcaacagtgcgtcggtaattcgacactgacagtgacgtttatactatcaaaaacaataatttttatacacataggcgcgaaatgttgccaagtcagtgacgttcgatttcttgttataaaaaaatcgatttttagtagttccaatgtgacacaaaatctaggcagggataaaaaagtttatttgaagaaagtgtatttttttgtctttcttaatggcggtacaggctccttttttcaatattttatttagttatagagtaatttccacatactaacatatttctgaaattgggctctgtaccgccattctttattatattacgaatatgtgtgtcaaatatctcgacaaaatattcaaaattacagccgcaatcttggaccgcgtttgttgatacctgtttatcgctactgtatgctcttaaaaagtgtctacttaaaatgatacgatgaactattataattcatatgcttaatattaatatttataacttatttatatttcacataaggttactatgcctatggttcaaaccaaactcttttttcagtgcaaaattaatgatcattaattttgatgtcatacagggtgtttcata

SEQ ID NO: 1808 - DNA, 542 bp, Diabrotica virgifera
aagtgaggcaacagtgcgtcggtaattcgacactgacagtgacgtttatactatcaaaaacaataatttttatacacataggcgcgaaatgttgccaagtcagtgacgttcgatttcttgttataaaaaaatcgatttttagtagttccaatgtgacacaaaatctaggcagggataaaaaagtttatttgaagaaagtgtattttttgtctttcttaatggcggtacaggctccttttttcaatattttatttagttatagagtaatttccacatactaacatatttctgaaattgggctctgtaccgccattctttattatattacgaatatgtgtgccaaatatctcgacaaaatattcaaaattagagccgcaatcttggaacgcgtttgttgctacctgttgatcgctatcgctactgtttgcttttaatagcaaaacatagagaagtgctatatttaaaaatcggtttatcctttcctgaatgccctggtctatgtggaaacaatctataagtattatggacagtccaaataaaat

SEQ ID NO: 1809 - DNA, 2719 bp, Diabrotica virgifera
  SmartBlast Evalue=2E-19; Info=Reverse transcriptase n=2 Tax= Ostrinia nubilalis RepID=A4KWG0_OSTNU
taatggcggtacaggctcgtttttttaatattgtatttaattacagagtaatttccacatattaatatatttttcaaattgggccctgtaccgccattctttattttattacgaatacgtgtgccaaatatctcgaaaaaatattcaaaattacagccgcaatcttggaacgcgtttttgctacctgttgatcgctactgtatcacctttagcaaaaataaattttttcgggttcaaaaattgcaatttttcgattttatgttcaaccgcgtttatctcgaaaactatgtatcctacgaaaaaacttgtcagaacagttttggcttagaatgacccaaaaaatacaaaaaaaatgttttgttttgcgagaaatcgctgttatgtaattcctcaagttctttgtttataacaatcttatcgacatccggatcaactgttacccaacaaattcgtgttctacgggtcaagatacataaaaaaatcttgggtaagaccatctgaataaaggaggccgttgtacccccttggcgacaggactatgaatatctacctaaaaaaaattggcatttgtactgtagtcaggatttctgtacctaaacatagatttattacgaatttcattttcatgggaaacaacttttcacactttttttatgtatgacaacagtagattacttctcataggtacttacattgttaaaatttgtggtggctccaatttcgatgttctcataattttggcacggcttttaatggactttttcttggaattattcgctttatttgtcgtttgattaacttttcccatttcgttaaactattgataatatgttaaaaataaaatatcctcctaaatctttatactcgcattagaattcgaaatgtttttacgtaaaatatacttacctacctacatagaactgaactaaaacacaattaacaacaatctattatttcaaacaggccaacaacttatacaacaacaacaaaaatataataaataactatcaataaacactattttcctatgaaacaactataacgaattcttaaattaacacactactgcactggactgatatcaataaagatgacagaacaaattagagaaaatctgacgcaggtttgtcaaaatgacactgataatttctctatgttgcctaattagttatttagttataatatgttcgatttcttgttagaaataaaaaattttagtagttccaagattacacaaaatctaggcatgagataaaaaagtttatttgaagaaagtgtattttttgtctttcttaatggcggtacaggctccttttttcaatattttatttagttatagagtaatttccacatactaacatatttctgaaattgggctctgtaccgccattctttattatattacgaatatgtgtgccaaatatctcgacaaaatattcaaaattagagcagcaatattggaacgcgtttgctgctacctgttgctcgctactgtagcctcttaagattttgacctgatctgtataatctccatctattcggagcactgtgattgattccaataatgcaggttagctattattttcaagtctcttccgtcaatccctgacctcttcagcacttccatcatttgttcatgtcggacctataccaacggcgttcacaaatccaaactgattgggcgcaatttgtgcatagaataacttacaagaatttgtagttgtcaatttggtaggaagcgacttataagaaagttcaactcttgaaccatggacttgttgaaagtgcaacgttttttttaagaaaaaacagaactaagttagtttttctcagtttatcaaagaaccaaagtgtgtagaaaaatatataagtggagaagacttttatacatggagcgacagacagaattccaaatcactgataggaaggtttagtaaccattcataaattgcttatatttgactttaggtacaatccgacaagcgagagctggcgggtgaccttaatcgcgggtgtcacaaatgcgtggttgccgtatcaaaaacttagttgggatctgaaaattacattagtagatattattcactacgatgtgaactcctagccgacagcaatagaaatgagcatcccttccacttttcaatttgttctacgcgcaacccgccagcactcacttgtcggattgtaagtgtagaaatatagtcgaacatcgcatctcgccaggcacatcgccgaagaaacaatctaatacatttaagtagcagtgaacatagtggacacgtcgcaagacagagagacaacagatggacaaggaagatcttagagtggcggccaagggcggacaaacgaagtcgtggaagaccacctaccagatggaccgacgatatcaagagaatagcgacaaactggattgcagctgcccaggacagagaagggtggagacatcttgaggaggcctatgtccgacagtggacaaatttggctgtgtgatgatgatgatgatgatgatgatgaacatagtttagcatcgcacctcactacgttttgtagaacaaaataatttgtttttcaggatgcgatggtcgtagcaatgtgcctggcgaggtgcgatggtccactatgtttctagactaacatattacgaccacgttgtttctctccccgaatatcaggaagaagcaaaactaatccgacttgacaatcgaagtgtgaccttgcc

SEQ ID NO: 1810 - DNA, 2649 bp, Diabrotica virgifera
  SmartBlast Evalue=2E-19; Info=Reverse transcriptase n=2 Tax= Ostrinia nubilalis RepID=A4KWG0_OSTNU
taatggcggtacaggctcgtttttttaatattgtatttaattacagagtaatttccacatattaatatatttttcaaattgggccctgtaccgccattctttattttattacgaatacgtgtgccaaatatctcgaaaaaatattcaaaattacagccgcaatcttggaacgcgtttttgctacctgttgatcgctactgtatcacctttagcaaaaataaattttttcgggttcaaaaattgcaatttttcgattttatgttcaaccgcgtttatctcgaaaactatgtatcctacgaaaaaacttgtcagaacagttttggcttagaatgacccaaaaaatacaaaaaaaatgttttgttttgcgagaaatcgctgttatgtaattcctcaagttctttgtttataacaatcttatcgacatccggatcaactgttacccaacaaattcgtgttctacgggtcaagatacataaaaaaatcttgggtaagaccatctgaataaaggaggccgttgtacccccttggcgacaggactatgaatatctacctaaaaaaaattggcatttgtactgtagtcaggatttctgtacctaaacatagatttattacgaatttcattttcatgggaaacaacttttcacactttttttatgtatgacaacagtagattacttctcataggtacttacattgttaaaatttgtggtggctccaatttcgatgttctcataattttggcacggcttttaatggactttttcttggaattattcgctttatttgtcgtttgattaacttttcccatttcgttaaactattgataatatacttacctacctacatagaactgaactaaaacacaattaacaacaatctattatttcaaacaggccaacaacttatacaacaacaacaaaaatataataaataactatcaataaacactattttcctatgaaacaactataacgaattcttaaattaacacactactgcactggactgatatcaataaagatgacagaacaaattagagaaaatctgacgcaggtttgtcaaaatgacactgataatttctctatgttgcctaattagttatttagttataatatgttcgatttcttgttagaaataaaaaattttagtagttccaagattacacaaaatctaggcatgagataaaaaagtttatttgaagaaagtgtattttttgtctttcttaatggcggtacaggctccttttttcaatattttatttagttatagagtaatttccacatactaacatatttctgaaattgggctctgtaccgccattctttattatattacgaatatgtgtgccaaatatctcgacaaaatattcaaaattagagcagcaatattggaacgcgtttgctgctacctgttgctcgctactgtagcctcttaagattttgacctgatctgtataatctccatctattcggagcactgtgattgattccaataatgcaggttagctattattttcaagtctcttccgtcaatccctgacctcttcagcacttccatcatttgttcatgtcggacctataccaacggcgttcacaaatccaaactgattgggcgcaatttgtgcatagaataacttacaagaatttgtagttgtcaatttggtaggaagcgacttataagaaagttcaactcttgaaccatggacttgttgaaagtgcaacgttttttttaagaaaaaacagaactaagttagtttttctcagtttatcaaagaaccaaagtgtgtagaaaaatatataagtggagaagacttttatacatggagcgacagacagaattccaaatcactgataggaaggtttagtaaccattcataaattgcttatatttgactttaggtacaatccgacaagcgagagctggcgggtgaccttaatcgcgggtgtcacaaatgcgtggttgccgtatcaaaaacttagttgggatctgaaaattacattagtagatattattcactacgatgtgaactcctagccgacagcaatagaaatgagcatcccttccacttttcaatttgttctacgcgcaacccgccagcactcacttgtcggattgtaagtgtagaaatatagtcgaacatcgcatctcgccaggcacatcgccgaagaaacaatctaatacatttaagtagcagtgaacatagtggacacgtcgcaagacagagagacaacagatggacaaggaagatcttagagtggcggccaagggcggacaaacgaagtcgtggaagaccacctaccagatggaccgacgatatcaagagaatagcgacaaactggattgcagctgcccaggacagagaagggtggagacatcttgaggaggcctatgtccgacagtggacaaatttggctgtgtgatgatgatgatgatgatgatgatgaacatagtttagcatcgcacctcactacgttttgtagaacaaaataatttgtttttcaggatgcgatggtcgtagcaatgtgcctggcgaggtgcgatggtccactatgtttctagactaacatattacgaccacgttgtttctctccccgaatatcaggaagaagcaaaactaatccgacttgacaatcgaagtgtgaccttgcc

SEQ ID NO: 1811 - DNA, 1680 bp, Diabrotica virgifera
taatggcggtacaggctcgtttttttaatattgtatttaattacagagtaatttccacatattaatatatttttcaaattgggccctgtaccgccattctttattttattacgaatacgtgtgccaaatatctcgaaaaaatattcaaaattacagccgcaatcttggaacgcgtttttgctacctgttgatcgctactgtatcacctttagcaaaaataaattttttcgggttcaaaaattgcaatttttcgattttatgttcaaccgcgtttatctcgaaaactatgtatcctacgaaaaaacttgtcagaacagttttggcttagaatgacccaaaaaatacaaaaaaaatgttttgttttgcgagaaatcgctgttatgtaattcctcaagttctttgtttataacaatcttatcgacatccggatcaactgttacccaacaaattcgtgttctacgggtcaagatacataaaaaaatcttgggtaagaccatctgaataaaggaggccgttgtacccccttggcgacaggactatgaatatctacctaaaaaaaattggcatttgtactgtagtcaggatttctgtacctaaacatagatttattacgaatttcattttcatgggaaacaacttttcacactttttttatgtatgacaacagtagattacttctcataggtacttacattgttaaaatttgtggtggctccaatttcgatgttctcataattttggcacggcttttaatggactttttcttggaattattcgctttatttgtcgtttgattaacttttcccatttcgttaaactattgataatatgttaaaaataaaatatcctcctaaatctttatactcgcattagaattcgaaatgtttttacgtaaaatatacttacctacctacatagaactgaactaaaacacaattaacaacaatctattatttcaaacaggccaacaacttatacaacaacaacaaaaatataataaataactatcaataaacactattttcctatgaaacaactataacgaattcttaaattaacacactactgcactggactgatatcaataaagatgacagaacaaattagagaaaatctgacgcaggtttgtcaaaatgacactgataatttctctatgttgcctaattagttatttagttataatatgttcgatttcttgttagaaataaaaaattttagtagttccaagattacacaaaatctaggcatgagataaaaaagtttatttgaagaaagtgtatttttttgtctttcttaatggcggtacaggctccttttttcaatattttatttagttatagagtaatttccacatactaacatatttctgaaattgggctctgtaccgccattctttattatattacgaatatgtgtgtcaaatatctcgacaaaatattcaaaattacagccgcaatcttggaccgcgtttgttgatacctgtttatcgctactgtatgctcttaaaaagtgtctacttaaaatgatacgatgaactattataattcatatgcttaatattaatatttataacttatttatatttcacataaggttactatgcctatggttcaaaccaaactcttttttcagtgcaaaattaatgatcattaattttgatgtcatacagggtgtttcata

SEQ ID NO: 1812 - DNA, 1619 bp, Diabrotica virgifera
taatggcggtacaggctcgtttttttaatattgtatttaattacagagtaatttccacatattaatatatttttcaaattgggccctgtaccgccattctttattttattacgaatacgtgtgccaaatatctcgaaaaaatattcaaaattacagccgcaatcttggaacgcgtttttgctacctgttgatcgctactgtatcacctttagcaaaaataaattttttcgggttcaaaaattgcaatttttcgattttatgttcaaccgcgtttatctcgaaaactatgtatcctacgaaaaaacttgtcagaacagttttggcttagaatgacccaaaaaatacaaaaaaaatgttttgttttgcgagaaatcgctgttatgtaattcctcaagttctttgtttataacaatcttatcgacatccggatcaactgttacccaacaaattcgtgttctacgggtcaagatacataaaaaaatcttgggtaagaccatctgaataaaggaggccgttgtacccccttggcgacaggactatgaatatctacctaaaaaaaattggcatttgtactgtagtcaggatttctgtacctaaacatagatttattacgaatttcattttcatgggaaacaacttttcacactttttttatgtatgacaacagtagattacttctcataggtacttacattgttaaaatttgtggtggctccaatttcgatgttctcataattttggcacggcttttaatggactttttcttggaattattcgctttatttgtcgtttgattaacttttcccatttcgttaaactattgataatatgttaaaaataaaatatcctcctaaatctttatactcgcattagaattcgaaatgtttttacgtaaaatatacttacctacctacatagaactgaactaaaacacaattaacaacaatctattatttcaaacaggccaacaacttatacaacaacaacaaaaatataataaataactatcaataaacactattttcctatgaaacaactataacgaattcttaaattaacacactactgcactggactgatatcaataaagatgacagaacaaattagagaaaatctgacgcaggtttgtcaaaatgacactgataatttctctatgttgcctaattagttatttagttataatatgttcgatttcttgttagaaataaaaaattttagtagttccaagattacacaaaatctaggcatgagataaaaaagtttatttgaagaaagtgtattttttgtctttcttaatggcggtacaggctccttttttcaatattttatttagttatagagtaatttccacatactaacatatttctgaaattgggctctgtaccgccattctttattatattacgaatatgtgtgccaaatatctcgacaaaatattcaaaattagagccgcaatcttggaacgcgtttgttgctacctgttgatcgctatcgctactgtttgcttttaatagcaaaacatagagaagtgctatatttaaaaatcggtttatcctttcctgaatgccctggtctatgtggaaacaatctataagtattatggacagtccaaataaaat

SEQ ID NO: 1813 - DNA, 1610 bp, Diabrotica virgifera
taatggcggtacaggctcgtttttttaatattgtatttaattacagagtaatttccacatattaatatatttttcaaattgggccctgtaccgccattctttattttattacgaatacgtgtgccaaatatctcgaaaaaatattcaaaattacagccgcaatcttggaacgcgtttttgctacctgttgatcgctactgtatcacctttagcaaaaataaattttttcgggttcaaaaattgcaatttttcgattttatgttcaaccgcgtttatctcgaaaactatgtatcctacgaaaaaacttgtcagaacagttttggcttagaatgacccaaaaaatacaaaaaaaatgttttgttttgcgagaaatcgctgttatgtaattcctcaagttctttgtttataacaatcttatcgacatccggatcaactgttacccaacaaattcgtgttctacgggtcaagatacataaaaaaatcttgggtaagaccatctgaataaaggaggccgttgtacccccttggcgacaggactatgaatatctacctaaaaaaaattggcatttgtactgtagtcaggatttctgtacctaaacatagatttattacgaatttcattttcatgggaaacaacttttcacactttttttatgtatgacaacagtagattacttctcataggtacttacattgttaaaatttgtggtggctccaatttcgatgttctcataattttggcacggcttttaatggactttttcttggaattattcgctttatttgtcgtttgattaacttttcccatttcgttaaactattgataatatacttacctacctacatagaactgaactaaaacacaattaacaacaatctattatttcaaacaggccaacaacttatacaacaacaacaaaaatataataaataactatcaataaacactattttcctatgaaacaactataacgaattcttaaattaacacactactgcactggactgatatcaataaagatgacagaacaaattagagaaaatctgacgcaggtttgtcaaaatgacactgataatttctctatgttgcctaattagttatttagttataatatgttcgatttcttgttagaaataaaaaattttagtagttccaagattacacaaaatctaggcatgagataaaaaagtttatttgaagaaagtgtatttttttgtctttcttaatggcggtacaggctccttttttcaatattttatttagttatagagtaatttccacatactaacatatttctgaaattgggctctgtaccgccattctttattatattacgaatatgtgtgtcaaatatctcgacaaaatattcaaaattacagccgcaatcttggaccgcgtttgttgatacctgtttatcgctactgtatgctcttaaaaagtgtctacttaaaatgatacgatgaactattataattcatatgcttaatattaatatttataacttatttatatttcacataaggttactatgcctatggttcaaaccaaactcttttttcagtgcaaaattaatgatcattaattttgatgtcatacagggtgtttcata

SEQ ID NO: 1814 - DNA, 1642 bp, Diabrotica virgifera
  SmartBlast Evalue=1E-19; Info=Reverse transcriptase n=2 Tax= Ostrinia nubilalis RepID=A4KWG0_OSTNU
aagtgaggcaacagtgcgtcggtaattcgacactgacagtgacgtttatactatcaaaaacaataatttttatacacataggcgcgaaatgttgccaagtcagtgacgttcgatttcttgttataaaaaaatcgatttttagtagttccaatgtgacacaaaatctaggcagggataaaaaagtttatttgaagaaagtgtattttttgtctttcttaatggcggtacaggctccttttttcaatattttatttagttatagagtaatttccacatactaacatatttctgaaattgggctctgtaccgccattctttattatattacgaatatgtgtgccaaatatctcgacaaaatattcaaaattagagcagcaatattggaacgcgtttgctgctacctgttgctcgctactgtagcctcttaagattttgacctgatctgtataatctccatctattcggagcactgtgattgattccaataatgcaggttagctattattttcaagtctcttccgtcaatccctgacctcttcagcacttccatcatttgttcatgtcggacctataccaacggcgttcacaaatccaaactgattgggcgcaatttgtgcatagaataacttacaagaatttgtagttgtcaatttggtaggaagcgacttataagaaagttcaactcttgaaccatggacttgttgaaagtgcaacgttttttttaagaaaaaacagaactaagttagtttttctcagtttatcaaagaaccaaagtgtgtagaaaaatatataagtggagaagacttttatacatggagcgacagacagaattccaaatcactgataggaaggtttagtaaccattcataaattgcttatatttgactttaggtacaatccgacaagcgagagctggcgggtgaccttaatcgcgggtgtcacaaatgcgtggttgccgtatcaaaaacttagttgggatctgaaaattacattagtagatattattcactacgatgtgaactcctagccgacagcaatagaaatgagcatcccttccacttttcaatttgttctacgcgcaacccgccagcactcacttgtcggattgtaagtgtagaaatatagtcgaacatcgcatctcgccaggcacatcgccgaagaaacaatctaatacatttaagtagcagtgaacatagtggacacgtcgcaagacagagagacaacagatggacaaggaagatcttagagtggcggccaagggcggacaaacgaagtcgtggaagaccacctaccagatggaccgacgatatcaagagaatagcgacaaactggattgcagctgcccaggacagagaagggtggagacatcttgaggaggcctatgtccgacagtggacaaatttggctgtgtgatgatgatgatgatgatgatgatgaacatagtttagcatcgcacctcactacgttttgtagaacaaaataatttgtttttcaggatgcgatggtcgtagcaatgtgcctggcgaggtgcgatggtccactatgtttctagactaacatattacgaccacgttgtttctctccccgaatatcaggaagaagcaaaactaatccgacttgacaatcgaagtgtgaccttgcc

SEQ ID NO: 1815 - DNA, 1549 bp, Diabrotica virgifera
taatggcggtacaggctcgtttttttaatattgtatttaattacagagtaatttccacatattaatatatttttcaaattgggccctgtaccgccattctttattttattacgaatacgtgtgccaaatatctcgaaaaaatattcaaaattacagccgcaatcttggaacgcgtttttgctacctgttgatcgctactgtatcacctttagcaaaaataaattttttcgggttcaaaaattgcaatttttcgattttatgttcaaccgcgtttatctcgaaaactatgtatcctacgaaaaaacttgtcagaacagttttggcttagaatgacccaaaaaatacaaaaaaaatgttttgttttgcgagaaatcgctgttatgtaattcctcaagttctttgtttataacaatcttatcgacatccggatcaactgttacccaacaaattcgtgttctacgggtcaagatacataaaaaaatcttgggtaagaccatctgaataaaggaggccgttgtacccccttggcgacaggactatgaatatctacctaaaaaaaattggcatttgtactgtagtcaggatttctgtacctaaacatagatttattacgaatttcattttcatgggaaacaacttttcacactttttttatgtatgacaacagtagattacttctcataggtacttacattgttaaaatttgtggtggctccaatttcgatgttctcataattttggcacggcttttaatggactttttcttggaattattcgctttatttgtcgtttgattaacttttcccatttcgttaaactattgataatatacttacctacctacatagaactgaactaaaacacaattaacaacaatctattatttcaaacaggccaacaacttatacaacaacaacaaaaatataataaataactatcaataaacactattttcctatgaaacaactataacgaattcttaaattaacacactactgcactggactgatatcaataaagatgacagaacaaattagagaaaatctgacgcaggtttgtcaaaatgacactgataatttctctatgttgcctaattagttatttagttataatatgttcgatttcttgttagaaataaaaaattttagtagttccaagattacacaaaatctaggcatgagataaaaaagtttatttgaagaaagtgtattttttgtctttcttaatggcggtacaggctccttttttcaatattttatttagttatagagtaatttccacatactaacatatttctgaaattgggctctgtaccgccattctttattatattacgaatatgtgtgccaaatatctcgacaaaatattcaaaattagagccgcaatcttggaacgcgtttgttgctacctgttgatcgctatcgctactgtttgcttttaatagcaaaacatagagaagtgctatatttaaaaatcggtttatcctttcctgaatgccctggtctatgtggaaacaatctataagtattatggacagtccaaataaaat

SEQ ID NO: 1816 - DNA, 1174 bp, Diabrotica virgifera
taatggcggtacaggctcgtttttttaatattgtatttaattacagagtaatttccacatattaatatatttttcaaattgggccctgtaccgccattctttattttattacgaatacgtgtgccaaatatctcgaaaaaatattcaaaattacagccgcaatcttggaacgcgtttttgctacctgttgatcgctactgtatcacctttagcaaaaataaattttttcgggttcaaaaattgcaatttttcgattttatgttcaaccgcgtttatctcgaaaactatgtatcctacgaaaaaacttgtcagaacagttttggcttagaatgacccaaaaaatacaaaaaaaatgttttgttttgcgagaaatcgctgttatgtaattcctcaagttctttgtttataacaatcttatcgacatccggatcaactgttacccaacaaattcgtgttctacgggtcaagatacataaaaaaatcttgggtaagaccatctgaataaaggaggccgttgtacccccttggcgacaggactatgaatatctacctaaaaaaaattggcatttgtactgtagtcaggatttctgtacctaaacatagatttattacgaatttcattttcatgggaaacaacttttcacactttttttatgtatgacaacagtagattacttctcataggtacttacattgttaaaatttgtggtggctccaatttcgatgttctcataattttggcacggcttttaatggactttttcttggaattattcgctttatttgtcgtttgattaacttttcccatttcgttaaactattgataatatgttaaaaataaaatatcctcctaaatctttatactcgcattagaattcgaaatgtttttacgtaaaatatacttacctacctacatataactaaaactcacaattaacaacaatctatctttcaaagaggccaacaacttatacaacaacaaatatataataaattaactatcaagaaacactactttcctatgaaacaacaaaaacgaattcttaaattaacacactactgtactgaacagatatcgataaagatgacagaacagattagaaaaaatctgacgcaggtttgtcaaaatgacagtgataatttctctatgttgcctaattagttatttagttat

SEQ ID NO: 1817 - DNA, 1104 bp, Diabrotica virgifera
taatggcggtacaggctcgtttttttaatattgtatttaattacagagtaatttccacatattaatatatttttcaaattgggccctgtaccgccattctttattttattacgaatacgtgtgccaaatatctcgaaaaaatattcaaaattacagccgcaatcttggaacgcgtttttgctacctgttgatcgctactgtatcacctttagcaaaaataaattttttcgggttcaaaaattgcaatttttcgattttatgttcaaccgcgtttatctcgaaaactatgtatcctacgaaaaaacttgtcagaacagttttggcttagaatgacccaaaaaatacaaaaaaaatgttttgttttgcgagaaatcgctgttatgtaattcctcaagttctttgtttataacaatcttatcgacatccggatcaactgttacccaacaaattcgtgttctacgggtcaagatacataaaaaaatcttgggtaagaccatctgaataaaggaggccgttgtacccccttggcgacaggactatgaatatctacctaaaaaaaattggcatttgtactgtagtcaggatttctgtacctaaacatagatttattacgaatttcattttcatgggaaacaacttttcacactttttttatgtatgacaacagtagattacttctcataggtacttacattgttaaaatttgtggtggctccaatttcgatgttctcataattttggcacggcttttaatggactttttcttggaattattcgctttatttgtcgtttgattaacttttcccatttcgttaaactattgataatatacttacctacctacatataactaaaactcacaattaacaacaatctatctttcaaagaggccaacaacttatacaacaacaaatatataataaattaactatcaagaaacactactttcctatgaaacaacaaaaacgaattcttaaattaacacactactgtactgaacagatatcgataaagatgacagaacagattagaaaaaatctgacgcaggtttgtcaaaatgacagtgataatttctctatgttgcctaattagttatttagttat

SEQ ID NO: 1818 - DNA, 583 bp, Diabrotica virgifera
agtttgtgtatattcccacatgacgtatacgcgaatgtggtgcagtgggaaatcgcttcgactttcgtacggcgcgatacacgggaagtaggttcaagccccaatgcaagttatatattattttttttatagattttatgattgtaagtatattattatataatttttttcagaaaatacgtatttaattaaaatttttggcaacaattattgttcagaaatcatttgtggcatttttcaatgtgtttgtgtgtgttttattcttttatttttttaatttttggtattgttttaataaaaatttttggaaagtagtagagaaactgtttaaagtatattgatttcgttgaaatcatataatagaagtataacttcttacgtgcgtacaaagtacacacattctttttttaaggtacgaattttatttgaaaaaattttgtatctcttttagtttacgagccggagctttataacaattttttgcccactcggatcgaaatccaccctcgaaattcgtaatcagcagccaaaaatccataagaaaccgttgagtttgcccatcagagttgaaagggccacagtg

SEQ ID NO: 1819 - DNA, 442 bp, Diabrotica virgifera
agtttgtgtatattcccacatgacgtatacgcgaatgtggtgcagtgggaaatcgcttcgactttcgtacggcgcgatacacgggaagtaggttcaagccccaatgcaagttatatattattttttttatagattttatgattgtaagtatattattatataatttttttcagaaaatacgtatttaattaaaatttttggcaacaattattgttcagaaatcatttgtggcatttttcaatgtgtttgttgtgtgtgttttattcttttattattttaatttttggcactgttttaataaaaatgtttgagaagtagtaagtattaaaattagtttaatatttaaataaaatataaataaactgtttaaagtatattaatttcgttggaaaatataatagaagtataacttcttacgtgcgtacaaagtacacacacattc

SEQ ID NO: 1820 - DNA, 1953 bp, Diabrotica virgifera
  SmartBlast Evalue=2E-29; Info=Serine/threonine-protein phosphatase 2A regulatory subunit B' n=1 Tax=Camponotus floridanus RepID=E1ZV68_9HYME
caatttataggtaatggccattttgaaccaacatgttttttaaaggataatattgtgagcaagcattcttccgaatacatgtttttgagctgcatcgagtacattaacagggtgaagacgggaccgtttgctgaacattcgaatcaattgtggagtataagtggagtctctacgtggactaaaatcaacactggtcttattaaaatgtataaagcagaggtacttggcaagttccctcttgtgcagcacatatatttcggctcgatcttcacgttgaatttatttaagcctcctgcagttgtaagaccgagaactagttttcaagcccctcaaatgccaccaacgtgtcagtccacaatatctatgtctgcgaagacttcgctggatagcgtatctcgctctagtagcgatatcagtcaggtcataacatctagcagagatttgtctaatactggttccggtaggtcgccagttagtgaaaatattacgctggctagttttgcagacagcacaggaaatggtacgagtgattccgaccgacgcaggtcttctgtcggattcgcaacaaatagtgcgaatgaaatcaaggtggatgaaatacaaaggaatgattcgacctgaaacaaatattaataaatgcgagttttcagattttttgattatgtctgataaatgtatatttatgtattttaaaatttataataataaattattgctttaactttaagacagttacattttttaagtattttttgaagttatacttctttaggcgcgattgagattgagggtgaatttatattgatctgcgcgcatgcgcacaccgacagtttggtattagtctttatacgggctctgattgggtgttgaaatgatctgtcaataattgttcaatatggaggttatcggtaaacaaaaatgttgtataatatattagtttttattgttgtgaggacagaaataaaatcaaatttataattatagtgactttttaaatagttttgaaaagccacaggtacgtaattctaaatgtttcagttgtattccaataaaaaattatcttcatacctatttggaaaatgtaaaaaaaataatgtacttacctagtacttgctatgctatacccctagtaggcaatgctttaatttacataatctgattacgaacaaactttctacaaattttcatcaaaaagttgttcagtttgtgtatattcccacatgacgtaaacgcgaaagtggtgcagtttgaaatcgctgtgactctcgtacggcgggatacacgggaagtaggttcaagcccaatgtaagttatatcatttttttattttttttttatagattttatgattgtaagtacatatattattatataaattttttcagaaaatacgtatttaattaaaatttttggcaacaattattgttcagaaatcatttgtggcatttttcaatgtgtttgtgtgtgttttattcttttatttttttaatttttggtattgttttaataaaaatttttggaaagtagtagagaaactgtttaaagtatattgatttcgttgaaatcatataatagaagtataacttcttacgtgcgtacaaagtacacacacatcattttttttagttaaatttagtttgtaaatcggtgatatattattcatttataatgggttgcctacttcaatatgtaatttaccttatgtaattgtaatttttaacatgtcgaaaattacataggtatcgttttcgctcttagttaggttatggtcttttctaccacttgtttacttttgtattttcatttgttttctcaatgctttactgtgtttttgtttccattaaaaaaatcacaagaaagcgttaatgtaggactagaagatggtcctagcaagaggggaataatggagacatataagaaatctgtaatttctgttactatgaaatttaataa

SEQ ID NO: 1821 - DNA, 1795 bp, Diabrotica virgifera
  SmartBlast Evalue=2E-29; Info=Serine/threonine-protein phosphatase 2A regulatory subunit B' n=1 Tax=Camponotus floridanus RepID=E1ZV68_9HYME
caatttataggtaatggccattttgaaccaacatgttttttaaaggataatattgtgagcaagcattcttccgaatacatgtttttgagctgcatcgagtacattaacagggtgaagacgggaccgtttgctgaacattcgaatcaattgtggagtataagtggagtctctacgtggactaaaatcaacactggtcttattaaaatgtataaagcagaggtacttggcaagttccctcttgtgcagcacatatatttcggctcgatcttcacgttgaatttatttaagcctcctgcagttgtaagaccgagaactagttttcaagcccctcaaatgccaccaacgtgtcagtccacaatatctatgtctgcgaagacttcgctggatagcgtatctcgctctagtagcgatatcagtcaggtcataacatctagcagagatttgtctaatactggttccggtaggtcgccagttagtgaaaatattacgctggctagttttgcagacagcacaggaaatggtacgagtgattccgaccgacgcaggtcttctgtcggattcgcaacaaatagtgcgaatgaaatcaaggtggatgaaatacaaaggaatgattcgacctgaaacaaatattaataaatgcgagttttcagattttttgattatgtctgataaatgtatatttatgtattttaaaatttataataataaattattgctttaactttaagacagttacattttttaagtattttttgaagttatacttctttaggcgcgattgagattgagggtgaatttatattgatctgcgcgcatgcgcacaccgacagtttggtattagtctttatacgggctctgattgggtgttgaaatgatctgtcaataattgttcaatatggaggttatcggtaaacaaaaatgttgtataatatattagtttttattgttgtgaggacagaaataaaatcaaatttataattatagtgactttttaaatagttttgaaaagccacaggtacgtaattctaaatgtttcagttgtattccaataaaaaattatcttcatacctatttggaaaatgtaaaaaaaataatgtacttacctagtacttgctatgctatacccctagtaggcaatgctttaatttacataatctgattacgaacaaactttctacaaattttcatcaaaaagttgttcagtttgtgtatattcccacatgacgtaaacgcgaaagtggtgcagtttgaaatcgctgtgactctcgtacggcgggatacacgggaagtaggttcaagcccaatgtaagttatatcatttttttattttttttttatagattttatgattgtaagtacatatattattatataaattttttcagaaaatacgtatttaattaaaatttttggcaacaattattgttcagaaatcatttgtggcatttttcaatgtgtttgtgtgtgttttattcttttatttttttaatttttggtattgttttaataaaaatttttggaaagtagtagagaaactgtttaaagtatattgatttcgttgaaatcatataatagaagtataacttcttacgtgcgtacaaagtacacacattctttttttaaggtacgaattttatttgaaaaaattttgtatctcttttagtttacgagccggagctttataacaattttttgcccactcggatcgaaatccaccctcgaaattcgtaatcagcagccaaaaatccataagaaaccgttgagtttgcccatcagagttgaaagggccacagtg

SEQ ID NO: 1822 - DNA, 1743 bp, Diabrotica virgifera
ctagtaaaaaatatttaacaaatataatacactttgctcatttaaaatgtaataaaatataactatgctaatcaccatgtaaaaagtatgtcaaaaatagatactctaaatatattggcacttattttgtataatataaaagcgtcacccggtgtaaaatgtaaaaagctgcctaaaatatttatcttatataaaaaatacagtatcattcggatccgcaaaactgtttaaactaattatctttgtatgaaatggccgcgttataccatatcgaactagattttttatactactaactaaatgcgtgatgttgaaataatcagatcaaaatatcgaaattaacatatacactcaccggcacgaaaaacgggcaccccaaaaaatgggtctttttatgtctcgtatctcctaagcctgttgtccgatttaaacaattgttcaacatgttacagccccattccttagcaatatcgctgcaataatactgctgctagacaggtaaactttcactatataccgggtgtaccaatcaaacttgttttttgaagttatacttctttaggcgcgattgagattgagggtgaatttatattgatctgcgcgcatgcgcacaccgacagtttggtattagtctttatacgggctctgattgggtgttgaaatgatctgtcaataattgttcaatatggaggttatcggtaaacaaaaatgttgtataatatattagtttttattgttgtgaggacagaaataaaatcaaatttataattatagtgactttttaaatagttttgaaaagccacaggtacgtaattctaaatgtttcagttgtattccaataaaaaattatcttcatacctatttggaaaatgtaaaaaaaataatgtacttacctagtacttgctatgctatacccctagtaggcaatgctttaatttacataatctgattacgaacaaactttctacaaattttcatcaaaaagttgttcagtttgtgtatattcccacatgacgtaaacgcgaaagtggtgcagtttgaaatcgctgtgactctcgtacggcgggatacacgggaagtaggttcaagcccaatgtaagttatatcatttttttattttttttttatagattttatgattgtaagtacatatattattatataaattttttcagaaaatacgtatttaattaaaatttttggcaacaattattgttcagaaatcatttgtggcatttttcaatgtgtttgtgtgtgttttattcttttatttttttaatttttggtattgttttaataaaaatttttggaaagtagtagagaaactgtttaaagtatattgatttcgttgaaatcatataatagaagtataacttcttacgtgcgtacaaagtacacacacatcattttttttagttaaatttagtttgtaaatcggtgatatattattcatttataatgggttgcctacttcaatatgtaatttaccttatgtaattgtaatttttaacatgtcgaaaattacataggtatcgttttcgctcttagttaggttatggtcttttctaccacttgtttacttttgtattttcatttgttttctcaatgctttactgtgtttttgtttccattaaaaaaatcacaagaaagcgttaatgtaggactagaagatggtcctagcaagaggggaataatggagacatataagaaatctgtaatttctgttactatgaaatttaataa

SEQ ID NO: 1823 - DNA, 1654 bp, Diabrotica virgifera
  SmartBlast Evalue=1E-29; Info=Serine/threonine-protein phosphatase 2A regulatory subunit B' n=1 Tax=Camponotus floridanus RepID=E1ZV68_9HYME
caatttataggtaatggccattttgaaccaacatgttttttaaaggataatattgtgagcaagcattcttccgaatacatgtttttgagctgcatcgagtacattaacagggtgaagacgggaccgtttgctgaacattcgaatcaattgtggagtataagtggagtctctacgtggactaaaatcaacactggtcttattaaaatgtataaagcagaggtacttggcaagttccctcttgtgcagcacatatatttcggctcgatcttcacgttgaatttatttaagcctcctgcagttgtaagaccgagaactagttttcaagcccctcaaatgccaccaacgtgtcagtccacaatatctatgtctgcgaagacttcgctggatagcgtatctcgctctagtagcgatatcagtcaggtcataacatctagcagagatttgtctaatactggttccggtaggtcgccagttagtgaaaatattacgctggctagttttgcagacagcacaggaaatggtacgagtgattccgaccgacgcaggtcttctgtcggattcgcaacaaatagtgcgaatgaaatcaaggtggatgaaatacaaaggaatgattcgacctgaaacaaatattaataaatgcgagttttcagattttttgattatgtctgataaatgtatatttatgtattttaaaatttataataataaattattgctttaactttaagacagttacattttttaagtattttttgaagttatacttctttaggcgcgattgagattgagggtgaatttatattgatctgcgcgcatgcgcacaccgacagtttggtattagtctttatacgggctctgattgggtgttgaaatgatctgtcaataattgttcaatatggaggttatcggtaaacaaaaatgttgtataatatattagtttttattgttgtgaggacagaaataaaatcaaatttataattatagtgactttttaaatagttttgaaaagccacaggtacgtaattctaaatgtttcagttgtattccaataaaaaattatcttcatacctatttggaaaatgtaaaaaaaataatgtacttacctagtacttgctatgctatacccctagtaggcaatgctttaatttacataatctgattacgaacaaactttctacaaattttcatcaaaaagttgttcagtttgtgtatattcccacatgacgtaaacgcgaaagtggtgcagtttgaaatcgctgtgactctcgtacggcgggatacacgggaagtaggttcaagcccaatgtaagttatatcatttttttattttttttttatagattttatgattgtaagtacatatattattatataaattttttcagaaaatacgtatttaattaaaatttttggcaacaattattgttcagaaatcatttgtggcatttttcaatgtgtttgttgtgtgtgttttattcttttattattttaatttttggcactgttttaataaaaatgtttgagaagtagtaagtattaaaattagtttaatatttaaataaaatataaataaactgtttaaagtatattaatttcgttggaaaatataatagaagtataacttcttacgtgcgtacaaagtacacacacattc

SEQ ID NO: 1824 - DNA, 1585 bp, Diabrotica virgifera
ctagtaaaaaatatttaacaaatataatacactttgctcatttaaaatgtaataaaatataactatgctaatcaccatgtaaaaagtatgtcaaaaatagatactctaaatatattggcacttattttgtataatataaaagcgtcacccggtgtaaaatgtaaaaagctgcctaaaatatttatcttatataaaaaatacagtatcattcggatccgcaaaactgtttaaactaattatctttgtatgaaatggccgcgttataccatatcgaactagattttttatactactaactaaatgcgtgatgttgaaataatcagatcaaaatatcgaaattaacatatacactcaccggcacgaaaaacgggcaccccaaaaaatgggtctttttatgtctcgtatctcctaagcctgttgtccgatttaaacaattgttcaacatgttacagccccattccttagcaatatcgctgcaataatactgctgctagacaggtaaactttcactatataccgggtgtaccaatcaaacttgttttttgaagttatacttctttaggcgcgattgagattgagggtgaatttatattgatctgcgcgcatgcgcacaccgacagtttggtattagtctttatacgggctctgattgggtgttgaaatgatctgtcaataattgttcaatatggaggttatcggtaaacaaaaatgttgtataatatattagtttttattgttgtgaggacagaaataaaatcaaatttataattatagtgactttttaaatagttttgaaaagccacaggtacgtaattctaaatgtttcagttgtattccaataaaaaattatcttcatacctatttggaaaatgtaaaaaaaataatgtacttacctagtacttgctatgctatacccctagtaggcaatgctttaatttacataatctgattacgaacaaactttctacaaattttcatcaaaaagttgttcagtttgtgtatattcccacatgacgtaaacgcgaaagtggtgcagtttgaaatcgctgtgactctcgtacggcgggatacacgggaagtaggttcaagcccaatgtaagttatatcatttttttattttttttttatagattttatgattgtaagtacatatattattatataaattttttcagaaaatacgtatttaattaaaatttttggcaacaattattgttcagaaatcatttgtggcatttttcaatgtgtttgtgtgtgttttattcttttatttttttaatttttggtattgttttaataaaaatttttggaaagtagtagagaaactgtttaaagtatattgatttcgttgaaatcatataatagaagtataacttcttacgtgcgtacaaagtacacacattctttttttaaggtacgaattttatttgaaaaaattttgtatctcttttagtttacgagccggagctttataacaattttttgcccactcggatcgaaatccaccctcgaaattcgtaatcagcagccaaaaatccataagaaaccgttgagtttgcccatcagagttgaaagggccacagtg

SEQ ID NO: 1825 - DNA, 1444 bp, Diabrotica virgifera
ctagtaaaaaatatttaacaaatataatacactttgctcatttaaaatgtaataaaatataactatgctaatcaccatgtaaaaagtatgtcaaaaatagatactctaaatatattggcacttattttgtataatataaaagcgtcacccggtgtaaaatgtaaaaagctgcctaaaatatttatcttatataaaaaatacagtatcattcggatccgcaaaactgtttaaactaattatctttgtatgaaatggccgcgttataccatatcgaactagattttttatactactaactaaatgcgtgatgttgaaataatcagatcaaaatatcgaaattaacatatacactcaccggcacgaaaaacgggcaccccaaaaaatgggtctttttatgtctcgtatctcctaagcctgttgtccgatttaaacaattgttcaacatgttacagccccattccttagcaatatcgctgcaataatactgctgctagacaggtaaactttcactatataccgggtgtaccaatcaaacttgttttttgaagttatacttctttaggcgcgattgagattgagggtgaatttatattgatctgcgcgcatgcgcacaccgacagtttggtattagtctttatacgggctctgattgggtgttgaaatgatctgtcaataattgttcaatatggaggttatcggtaaacaaaaatgttgtataatatattagtttttattgttgtgaggacagaaataaaatcaaatttataattatagtgactttttaaatagttttgaaaagccacaggtacgtaattctaaatgtttcagttgtattccaataaaaaattatcttcatacctatttggaaaatgtaaaaaaaataatgtacttacctagtacttgctatgctatacccctagtaggcaatgctttaatttacataatctgattacgaacaaactttctacaaattttcatcaaaaagttgttcagtttgtgtatattcccacatgacgtaaacgcgaaagtggtgcagtttgaaatcgctgtgactctcgtacggcgggatacacgggaagtaggttcaagcccaatgtaagttatatcatttttttattttttttttatagattttatgattgtaagtacatatattattatataaattttttcagaaaatacgtatttaattaaaatttttggcaacaattattgttcagaaatcatttgtggcatttttcaatgtgtttgttgtgtgtgttttattcttttattattttaatttttggcactgttttaataaaaatgtttgagaagtagtaagtattaaaattagtttaatatttaaataaaatataaataaactgtttaaagtatattaatttcgttggaaaatataatagaagtataacttcttacgtgcgtacaaagtacacacacattc

SEQ ID NO: 1826 - DNA, 1398 bp, Diabrotica virgifera
  SmartBlast Evalue=1E-29; Info=Serine/threonine-protein phosphatase 2A regulatory subunit B' n=1 Tax=Camponotus floridanus RepID=E1ZV68_9HYME
caatttataggtaatggccattttgaaccaacatgttttttaaaggataatattgtgagcaagcattcttccgaatacatgtttttgagctgcatcgagtacattaacagggtgaagacgggaccgtttgctgaacattcgaatcaattgtggagtataagtggagtctctacgtggactaaaatcaacactggtcttattaaaatgtataaagcagaggtacttggcaagttccctcttgtgcagcacatatatttcggctcgatcttcacgttgaatttatttaagcctcctgcagttgtaagaccgagaactagttttcaagcccctcaaatgccaccaacgtgtcagtccacaatatctatgtctgcgaagacttcgctggatagcgtatctcgctctagtagcgatatcagtcaggtcataacatctagcagagatttgtctaatactggttccggtaggtcgccagttagtgaaaatattacgctggctagttttgcagacagcacaggaaatggtacgagtgattccgaccgacgcaggtcttctgtcggattcgcaacaaatagtgcgaatgaaatcaaggtggatgaaatacaaaggaatgattcgacctgaaacaaatattaataaatgcgagttttcagattttttgattatgtctgataaatgtatatttatgtattttaaaatttataataataaattattgctttaactttaagacagttacattttttaagtattttttgaagttatacttctttaggcgcgattgagattgagggtgaatttatattgatctgcgcgcatgcgcacaccgacagtttggtattagtctttatacgggctctgattgggtgttgaaatgatctgtcaataattgttcaatatggaggttatcggtaaacaaaaatgttgtataatatattagtttttattgttgtgaggacagaaataaaatcaaatttataattatagtgactttttaaatagttttgaaaagccacaggtacgtaattctaaatgtttcagttgtattccaataaaaaattatcttcatacctatttggaaaatgtaaaaaaaataatgtacttacctagtacttgctatgctatacccctagtaggcaatgctttaatttacataatctgattacgaacaaactttctacaaattttcatctaatgtatcgttttcttactctatatattgttgtattttaattcgacaaaaatcaaactaataaaaattcatataaacaaaatgtcaaaaagttgttcagtttgtgtatattccgacatgacgtatacgcgaaggtggtgcaatttgaaatcgcttcgactctcgtacagtgggatacacgggaagtaggttcaagcccaatgcaagtt

SEQ ID NO: 1827 - DNA, 1188 bp, Diabrotica virgifera
ctagtaaaaaatatttaacaaatataatacactttgctcatttaaaatgtaataaaatataactatgctaatcaccatgtaaaaagtatgtcaaaaatagatactctaaatatattggcacttattttgtataatataaaagcgtcacccggtgtaaaatgtaaaaagctgcctaaaatatttatcttatataaaaaatacagtatcattcggatccgcaaaactgtttaaactaattatctttgtatgaaatggccgcgttataccatatcgaactagattttttatactactaactaaatgcgtgatgttgaaataatcagatcaaaatatcgaaattaacatatacactcaccggcacgaaaaacgggcaccccaaaaaatgggtctttttatgtctcgtatctcctaagcctgttgtccgatttaaacaattgttcaacatgttacagccccattccttagcaatatcgctgcaataatactgctgctagacaggtaaactttcactatataccgggtgtaccaatcaaacttgttttttgaagttatacttctttaggcgcgattgagattgagggtgaatttatattgatctgcgcgcatgcgcacaccgacagtttggtattagtctttatacgggctctgattgggtgttgaaatgatctgtcaataattgttcaatatggaggttatcggtaaacaaaaatgttgtataatatattagtttttattgttgtgaggacagaaataaaatcaaatttataattatagtgactttttaaatagttttgaaaagccacaggtacgtaattctaaatgtttcagttgtattccaataaaaaattatcttcatacctatttggaaaatgtaaaaaaaataatgtacttacctagtacttgctatgctatacccctagtaggcaatgctttaatttacataatctgattacgaacaaactttctacaaattttcatctaatgtatcgttttcttactctatatattgttgtattttaattcgacaaaaatcaaactaataaaaattcatataaacaaaatgtcaaaaagttgttcagtttgtgtatattccgacatgacgtatacgcgaaggtggtgcaatttgaaatcgcttcgactctcgtacagtgggatacacgggaagtaggttcaagcccaatgcaagtt

SEQ ID NO: 1828 - DNA, 741 bp, Diabrotica virgifera
agtttgtgtatattcccacatgacgtatacgcgaatgtggtgcagtgggaaatcgcttcgactttcgtacggcgcgatacacgggaagtaggttcaagccccaatgcaagttatatattattttttttatagattttatgattgtaagtatattattatataatttttttcagaaaatacgtatttaattaaaatttttggcaacaattattgttcagaaatcatttgtggcatttttcaatgtgtttgtgtgtgttttattcttttatttttttaatttttggtattgttttaataaaaatttttggaaagtagtagagaaactgtttaaagtatattgatttcgttgaaatcatataatagaagtataacttcttacgtgcgtacaaagtacacacacatcattttttttagttaaatttagtttgtaaatcggtgatatattattcatttataatgggttgcctacttcaatatgtaatttaccttatgtaattgtaatttttaacatgtcgaaaattacataggtatcgttttcgctcttagttaggttatggtcttttctaccacttgtttacttttgtattttcatttgttttctcaatgctttactgtgtttttgtttccattaaaaaaatcacaagaaagcgttaatgtaggactagaagatggtcctagcaagaggggaataatggagacatataagaaatctgtaatttctgttactatgaaatttaataa

SEQ ID NO: 1829 - DNA, 5048 bp, Diabrotica virgifera
  SmartBlast Evalue=9E-66; Info=Reverse transcriptase n=1 Tax= Schistosoma japonicum RepID=C7C210_SCHJA
tagatttgtaaataaaatttttagattttgcaggtttgaacttttaattagatgtcgggttgtgtactgtagtaagagtgggttattttatagtaaaactgaataagctggtataaattcaagctctaattgggcattcaatgtatgtctagtagggtcctttaaagattttaaaatctcaaaatgttccaggttattcaggacgtggccctttttgcagatgtgaagaattttgaaatcaatgtccggattgaaattatggttggagttacggatatgttgggaaaaatgagactgtccagatgttgggcgctgtatgtatctaagatgttccttcaatctggtgtcgaacgatctaaaggttcttccgacgtaatatgacgagcaggtatggcatttaagctcataaactccacaacactcagatctatcacgactgtccttgttattcaagaaaaccaaacctaaatttgaattagttctaaaagaaatattacagtaatctttaaaaatatgagctaatttgtaagagaattgacctgtaaatgttaatgatctatatggttttggctcctgttcgactagaataggctgtgtatatactcgatgttctaaaattctatttgtttttttgtgtaaaattttatttactaagtccacagtataaccattattaactgctatttgttggataatttttaattctttgttaaatgaagttgtagtcaatgggatagagacaagcctgttgatgtaactataaaaagcagccagtttatgttgtatggggtggtgtgaatcggcagggataactgtacctgtatgggttggttttctataaataccaaagtcaatcgttccatttctgagtgtcaatgtaagatctaaaaagttcaaactctttgagtcattctgaatctctaaagtaaatttaatagtgtcatgtaaagtattgaggaaatctaagaaatcgtgaagaatgtcaattgtgccattccatattattaaagtatcgtcaacatacctagcgtaaaatttaatataatctgtaaatggattatttttcactattttattagattccaagtcatttagaaaaatatcagctaatatcggtgaaagaggagatcccatagctagtccgtccggttgcacatatgtggtgttgttgaaattaaagaaattctgactcagacacaaattcaaaagctctgtatactcaataatttgattaggatggtaattattattccacaagtctaaagcaacaatactgataacttcttgtgttggaatgttagtaaagagattagttatgtctaaggaaatcaataaatcttcattactaagattaacttctgtaattttatttgtcaaacttaagttgttagagactacataatcgaatttattgttgtaaaaggttttaaggaatttgtttaagtgagaagctaatgcatgagtgggagaatcagtaaaggataccactggtctgattggtatgttttcaaagacatcagtcttgtgtattttcatgagaccatagagtctgggaacgtttgctttagatggtaaaagtttctttttagtagtattatcaaaaacttcagtgattttattgatggctgttctaactttagtagtgaaagtattaatattgacagattttgttagaaattggttatctagtataaaattagtgactttttgatggtagtcttgggtgtgtaagacaactacagtgctgcctttatctgctttagtgactgtaaggttattttcactaattttcttatcaattgatttaatggtgtccttatattcattgagagggtttctgtgatagccctttctgttgttacaaatagcctccttttcttttttcagtaatactttcaaactgctcctaatttcttctgtgttttccagtggtattgattgtaagatactttcactctcaactccgagtagttctagatttctaagttgttgttttttagaagattgggggggattgaatttgaaacctttttggagtagagacagttcattatttgaaaatactacgttagagtaatttatgaaaggggtatagaatgtatgttgctcagagccatcgaaaatgttgtctgggtcagaagatatagatgtattaatactatgagtttgatcaggaagatcactaagactagtattggtagtaacgtttaataatcgttcagaagtatacaaatcagaatttgtaaaattagaaggtgttacaatataagagccattactgttactatccaccacaagttggtcattgttaagttgtgaaaacacagattgatttgacaaaataatattgttatttactctatgtgttataaatttaagtttcttgatcttatcatgaagtttcctatattgtctactcctatgaaaattaatagtcccatgtaaatcacgcatacattcatcaaactcgagcgctgtcattcttctatgtaagctattgtagattgtcttcagttgcaagtcaatggtgtagatatgttggtatagtttccgaatctcatccctaatgatggatctacccagaatttttacttgtttagccttcgttgcattgaagttaagttctcttagtctacctctagcataactaggcagcaggttgagacgtaaacattcgttgttataaaagatcttagatttttgtaacattttcttgatgttcagctccttgtaacggtgtagcaaagttgctagtcttgcattattcaaatattgaatgggttgcatatgtgagtccatattaaatatagtaatgaaacacagacttactcacaatcatttaattatactttgacgaccggtttcgatctctacaatatacagatcatcttcaggtcggcgttacaagtagttaaatgctacaataagagaaaacttgtgttagaccagtgtctgattgaagagatgttaatagaaagccaaatttaaaaaatttttataaaattttttgaaataaaggtttgcaactgttgacatttcagaatattggtatatacaaagtcaaacctatgagtaaaaatgctcataggcatgtatgtgcaaatgggtgcatacagtttgaatttgttgagattaaaatttttaaccattaaaaaacaaaataaacataaactgacttaaatatgcttccaaattcaaagtagtaataataaaagagatagtaatattgttctaatctacttacatgccgttacaaggattgcgttgcaacttagttgttgtcatattagtacgtccaaattatgctaattggtttgttgggatagtgatagggtaaacagacatgttacgtaggttaaaacacagtaagatttcaaatttggaattgatcctgaaggaagatgcgtatgtgaaacgggtgatgttttgttcgaatggagaaagacaatgctccaggagttgcgtattaattgtagcaaagtatgaaatgttattctaggatcttgtacaaatgtgatggtctaagctcgtagatgttatacgatgcgggcagaggtcaaagtataggacatgacaaataggaaattgttgtcataaattaatacaatttaagatatgttgttctcagtaaattaactgagggatgtcataagtataataatatcataatattatgaagtagtaagtgccatacactatgaaactatgaagtgtatagaaataaagggaaactagttagttaaatgaaaaaattattatcaaaacatcggttaagaaactgtaaattgaaaaatttcaaaaaggtaagaaattgataaaattaaagaatattttgtttgagctattgtataatgggatatgtacaaagaaaaagaaagaaacgaaatattaatggaagggtgtaggcacttacttgagaatagtttttaactaaataaataaattaacacataacacatagggtttaaaagcacaaagacataacaattattggtaaaaggtttttttaagggaggtagcactacatttccccaattactatttaacttagtttttacttcctaaattgaagtctagtttttgtgttttcaagagggaatattgacagtgtagacagatgtaggttatctgaaatgtcaaaacacttcttctcaaatgttgtacagtaattgcctattttaattaaatctcttagtaacataaagtatacagcattttcaaattttacaaaaaagatagttgttaatttatagcattaataacaaaatctaaactatatgtgtaaccactattgtgaaaaaatgttgtaacaataataaaagtacatgattaaaagataacagatgtattattctacattagtattcaagtagagaagaattaaagtagagaagaagtgttgagtttaagtgtaagtaggcagtgcataatctaacgtacaagcatatcacctgttgcataattgtagatgagtaagataaattgattagcctagtctatttaaatttagtaaatgaaaacagatataaaacgtgaaagttataacaaagacaaagaaaaagaaaaataaaagaaagttggttggtagtattgttaatattgcagtcgtggcaatgccacgtcaacgaggtcaaaggaagcggaatgtttaatgacaggtgtgtggagggaggtagggggggtgttaatttaaaagagaacctaaagtttgtttaaatcctatttgtatttaagtattggtgccaaccaacttcctcatgcgccataaatggtaagttataaatttaaagtatttaatagattaaaaggttttgataacttgtacaaaatgatcatgcacttccatatcggaacttattaaatttataaagctataatataaaatgtgtagtcttagtgaattacaaataatttagggtgacatttttatattgagaaacacgtgtttaatgtttaagaatattgcactgatcagactccgtattaaatgttcaaacggtcaggcaactatgagatattaacagaatgagctcaaatgccataccagc

SEQ ID NO: 1830 - DNA, 5024 bp, Diabrotica virgifera
  SmartBlast Evalue=9E-66; Info=Reverse transcriptase n=1 Tax= Schistosoma japonicum RepID=C7C210_SCHJA
atatcaccacgtggaaaagtgcagatggtaattgattgtccagtaatgaagctaagatgggaaaattggctgtgtactgagctacaaaatcatcaaattcaacaggaaacgaacaatggaaaatggatttgaataaaattaaaattagcgggattttggaaattaagagttattcaggacgtggccctttttgcagatgtgaagaattttgaaatcaatgtccggattgaaattatggttggagttacggatatgttgggaaaaatgagactgtccagatgttgggcgctgtatgtatctaagatgttccttcaatctggtgtcgaacgatctaaaggttcttccgacgtaatatgacgagcaggtatggcatttaagctcataaactccacaacactcagatctatcacgactgtccttgttattcaagaaaaccaaacctaaatttgaattagttctaaaagaaatattacagtaatctttaaaaatatgagctaatttgtaagagaattgacctgtaaatgttaatgatctatatggttttggctcctgttcgactagaataggctgtgtatatactcgatgttctaaaattctatttgtttttttgtgtaaaattttatttactaagtccacagtataaccattattaactgctatttgttggataatttttaattctttgttaaatgaagttgtagtcaatgggatagagacaagcctgttgatgtaactataaaaagcagccagtttatgttgtatggggtggtgtgaatcggcagggataactgtacctgtatgggttggttttctataaataccaaagtcaatcgttccatttctgagtgtcaatgtaagatctaaaaagttcaaactctttgagtcattctgaatctctaaagtaaatttaatagtgtcatgtaaagtattgaggaaatctaagaaatcgtgaagaatgtcaattgtgccattccatattattaaagtatcgtcaacatacctagcgtaaaatttaatataatctgtaaatggattatttttcactattttattagattccaagtcatttagaaaaatatcagctaatatcggtgaaagaggagatcccatagctagtccgtccggttgcacatatgtggtgttgttgaaattaaagaaattctgactcagacacaaattcaaaagctctgtatactcaataatttgattaggatggtaattattattccacaagtctaaagcaacaatactgataacttcttgtgttggaatgttagtaaagagattagttatgtctaaggaaatcaataaatcttcattactaagattaacttctgtaattttatttgtcaaacttaagttgttagagactacataatcgaatttattgttgtaaaaggttttaaggaatttgtttaagtgagaagctaatgcatgagtgggagaatcagtaaaggataccactggtctgattggtatgttttcaaagacatcagtcttgtgtattttcatgagaccatagagtctgggaacgtttgctttagatggtaaaagtttctttttagtagtattatcaaaaacttcagtgattttattgatggctgttctaactttagtagtgaaagtattaatattgacagattttgttagaaattggttatctagtataaaattagtgactttttgatggtagtcttgggtgtgtaagacaactacagtgctgcctttatctgctttagtgactgtaaggttattttcactaattttcttatcaattgatttaatggtgtccttatattcattgagagggtttctgtgatagccctttctgttgttacaaatagcctccttttcttttttcagtaatactttcaaactgctcctaatttcttctgtgttttccagtggtattgattgtaagatactttcactctcaactccgagtagttctagatttctaagttgttgttttttagaagattgggggggattgaatttgaaacctttttggagtagagacagttcattatttgaaaatactacgttagagtaatttatgaaaggggtatagaatgtatgttgctcagagccatcgaaaatgttgtctgggtcagaagatatagatgtattaatactatgagtttgatcaggaagatcactaagactagtattggtagtaacgtttaataatcgttcagaagtatacaaatcagaatttgtaaaattagaaggtgttacaatataagagccattactgttactatccaccacaagttggtcattgttaagttgtgaaaacacagattgatttgacaaaataatattgttatttactctatgtgttataaatttaagtttcttgatcttatcatgaagtttcctatattgtctactcctatgaaaattaatagtcccatgtaaatcacgcatacattcatcaaactcgagcgctgtcattcttctatgtaagctattgtagattgtcttcagttgcaagtcaatggtgtagatatgttggtatagtttccgaatctcatccctaatgatggatctacccagaatttttacttgtttagccttcgttgcattgaagttaagttctcttagtctacctctagcataactaggcagcaggttgagacgtaaacattcgttgttataaaagatcttagatttttgtaacattttcttgatgttcagctccttgtaacggtgtagcaaagttgctagtcttgcattattcaaatattgaatgggttgcatatgtgagtccatattaaatatagtaatgaaacacagacttactcacaatcatttaattatactttgacgaccggtttcgatctctacaatatacagatcatcttcaggtcggcgttacaagtagttaaatgctacaataagagaaaacttgtgttagaccagtgtctgattgaagagatgttaatagaaagccaaatttaaaaaatttttataaaattttttgaaataaaggtttgcaactgttgacatttcagaatattggtatatacaaagtcaaacctatgagtaaaaatgctcataggcatgtatgtgcaaatgggtgcatacagtttgaatttgttgagattaaaatttttaaccattaaaaaacaaaataaacataaactgacttaaatatgcttccaaattcaaagtagtaataataaaagagatagtaatattgttctaatctacttacatgccgttacaaggattgcgttgcaacttagttgttgtcatattagtacgtccaaattatgctaattggtttgttgggatagtgatagggtaaacagacatgttacgtaggttaaaacacagtaagatttcaaatttggaattgatcctgaaggaagatgcgtatgtgaaacgggtgatgttttgttcgaatggagaaagacaatgctccaggagttgcgtattaattgtagcaaagtatgaaatgttattctaggatcttgtacaaatgtgatggtctaagctcgtagatgttatacgatgcgggcagaggtcaaagtataggacatgacaaataggaaattgttgtcataaattaatacaatttaagatatgttgttctcagtaaattaactgagggatgtcataagtataataatatcataatattatgaagtagtaagtgccatacactatgaaactatgaagtgtatagaaataaagggaaactagttagttaaatgaaaaaattattatcaaaacatcggttaagaaactgtaaattgaaaaatttcaaaaaggtaagaaattgataaaattaaagaatattttgtttgagctattgtataatgggatatgtacaaagaaaaagaaagaaacgaaatattaatggaagggtgtaggcacttacttgagaatagtttttaactaaataaataaattaacacataacacatagggtttaaaagcacaaagacataacaattattggtaaaaggtttttttaagggaggtagcactacatttccccaattactatttaacttagtttttacttcctaaattgaagtctagtttttgtgttttcaagagggaatattgacagtgtagacagatgtaggttatctgaaatgtcaaaacacttcttctcaaatgttgtacagtaattgcctattttaattaaatctcttagtaacataaagtatacagcattttcaaattttacaaaaaagatagttgttaatttatagcattaataacaaaatctaaactatatgtgtaaccactattgtgaaaaaatgttgtaacaataataaaagtacatgattaaaagataacagatgtattattctacattagtattcaagtagagaagaattaaagtagagaagaagtgttgagtttaagtgtaagtaggcagtgcataatctaacgtacaagcatatcacctgttgcataattgtagatgagtaagataaattgattagcctagtctatttaaatttagtaaatgaaaacagatataaaacgtgaaagttataacaaagacaaagaaaaagaaaaataaaagaaagttggttggtagtattgttaatattgcagtcgtggcaatgccacgtcaacgaggtcaaaggaagcggaatgtttaatgacaggtgtgtggagggaggtagggggggtgttaatttaaaagagaacctaaagtttgtttaaatcctatttgtatttaagtattggtgccaaccaacttcctcatgcgccataaatggtaagttataaatttaaagtatttaatagattaaaaggttttgataacttgtacaaaatgatcatgcacttccatatcggaacttattaaatttataaagctataatataaaatgtgtagtcttagtgaattacaaataatttagggtgacatttttatattgagaaacacgtgtttaatgtttaagaatattgcactgatcagactccgtattaaatgttcaaacggtcaggcaactatgagatattaacagaatgagctcaaatgccataccagc

SEQ ID NO: 1831 - DNA, 5050 bp, Diabrotica virgifera
  SmartBlast Evalue=9E-66; Info=Reverse transcriptase n=1 Tax= Schistosoma japonicum RepID=C7C210_SCHJA
tagatttgtaaataaaatttttagattttgcaggtttgaacttttaattagatgtcgggttgtgtactgtagtaagagtgggttattttatagtaaaactgaataagctggtataaattcaagctctaattgggcattcaatgtatgtctagtagggtcctttaaagattttaaaatctcaaaatgttccaggttattcaggacgtggccctttttgcagatgtgaagaattttgaaatcaatgtccggattgaaattatggttggagttacggatatgttgggaaaaatgagactgtccagatgttgggcgctgtatgtatctaagatgttccttcaatctggtgtcgaacgatctaaaggttcttccgacgtaatatgacgagcaggtatggcatttaagctcataaactccacaacactcagatctatcacgactgtccttgttattcaagaaaaccaaacctaaatttgaattagttctaaaagaaatattacagtaatctttaaaaatatgagctaatttgtaagagaattgacctgtaaatgttaatgatctatatggttttggctcctgttcgactagaataggctgtgtatatactcgatgttctaaaattctatttgtttttttgtgtaaaattttatttactaagtccacagtataaccattattaactgctatttgttggataatttttaattctttgttaaatgaagttgtagtcaatgggatagagacaagcctgttgatgtaactataaaaagcagccagtttatgttgtatggggtggtgtgaatcggcagggataactgtacctgtatgggttggttttctataaataccaaagtcaatcgttccatttctgagtgtcaatgtaagatctaaaaagttcaaactctttgagtcattctgaatctctaaagtaaatttaatagtgtcatgtaaagtattgaggaaatctaagaaatcgtgaagaatgtcaattgtgccattccatattattaaagtatcgtcaacatacctagcgtaaaatttaatataatctgtaaatggattatttttcactattttattagattccaagtcatttagaaaaatatcagctaatatcggtgaaagaggagatcccatagctagtccgtccggttgcacatatgtggtgttgttgaaattaaagaaattctgactcagacacaaattcaaaagctctgtatactcaataatttgattaggatggtaattattattccacaagtctaaagcaacaatactgataacttcttgtgttggaatgttagtaaagagattagttatgtctaaggaaatcaataaatcttcattactaagattaacttctgtaattttatttgtcaaacttaagttgttagagactacataatcgaatttattgttgtaaaaggttttaaggaatttgtttaagtgagaagctaatgcatgagtgggagaatcagtaaaggataccactggtctgattggtatgttttcaaagacatcagtcttgtgtattttcatgagaccatagagtctgggaacgtttgctttagatggtaaaagtttctttttagtagtattatcaaaaacttcagtgattttattgatggctgttctaactttagtagtgaaagtattaatattgacagattttgttagaaattggttatctagtataaaattagtgactttttgatggtagtcttgggtgtgtaagacaactacagtgctgcctttatctgctttagtgactgtaaggttattttcactaattttcttatcaattgatttaatggtgtccttatattcattgagagggtttctgtgatagccctttctgttgttacaaatagcctccttttcttttttcagtaatactttcaaactgctcctaatttcttctgtgttttccagtggtattgattgtaagatactttcactctcaactccgagtagttctagatttctaagttgttgttttttagaagattgggggggattgaatttgaaacctttttggagtagagacagttcattatttgaaaatactacgttagagtaatttatgaaaggggtatagaatgtatgttgctcagagccatcgaaaatgttgtctgggtcagaagatatagatgtattaatactatgagtttgatcaggaagatcactaagactagtattggtagtaacgtttaataatcgttcagaagtatacaaatcagaatttgtaaaattagaaggtgttacaatataagagccattactgttactatccaccacaagttggtcattgttaagttgtgaaaacacagattgatttgacaaaataatattgttatttactctatgtgttataaatttaagtttcttgatcttatcatgaagtttcctatattgtctactcctatgaaaattaatagtcccatgtaaatcacgcatacattcatcaaactcgagcgctgtcattcttctatgtaagctattgtagattgtcttcagttgcaagtcaatggtgtagatatgttggtatagtttccgaatctcatccctaatgatggatctacccagaatttttacttgtttagccttcgttgcattgaagttaagttctcttagtctacctctagcataactaggcagcaggttgagacgtaaacattcgttgttataaaagatcttagatttttgtaacattttcttgatgttcagctccttgtaacggtgtagcaaagttgctagtcttgcattattcaaatattgaatgggttgcatatgtgagtccatattaaatatagtaatgaaacacagacttactcacaatcatttaattatactttgacgaccggtttcgatctctacaatatacagatcatcttcaggtcggcgttacaagtagttaaatgctacaataagagaaaacttgtgttagaccagtgtctgattgaagagatgttaatagaaagccaaatttaaaaaatttttataaaattttttgaaataaaggtttgcaactgttgacatttcagaatattggtatatacaaagtcaaacctatgagtaaaaatgctcataggcatgtatgtgcaaatgggtgcatacagtttgaatttgttgagattaaaatttttaaccattaaaaaacaaaataaacataaactgacttaaatatgcttccaaattcaaagtagtaataataaaagagatagtaatattgttctaatctacttacatgccgttacaaggattgcgttgcaacttagttgttgtcatattagtacgtccaaattatgctaattggtttgttgggatagtgatagggtaaacagacatgttacgtaggttaaaacacagtaagatttcgaatttggaatggatcctgaaggaagatgcgtatgtgaaacgggtgatgttttgttagaatggagaaagacaatgctccaggagttgcgtattaattgtagcaaagtatgaaatgttattctaggctcttgtacaaatgtgatggtcttagctcgtagatgttatacgatgcgggcagaggtcaaagcataggaaatgacaaataggaaaatgttgtcataaattaatctaatttaagatatgttgttctcagtaagttaactgagggatgtcataagtataataatatcataatattatgaagtagtaagtgccatacactgtgaaactatgaagtgtatagaaattaaaggaaagctagttagttaaatgaaaaaatattaatatcaaaacatcggttaagaaactttaaattgaaaaattgaaaaaggtaagaaattgataaaattaaagattattttgtttgagctattgtataatgggatatgtacaaagaaaaagaaagaaacgaaatattaatggaagggtgtaggcacttacttgagaatagtttttaactaaataaataaattaacacataacacatagggtttaaaagcacaaagacataacaattattggtaaaaggtttttttaagggaggtagcactacatttccccaattactatttaacttagtttttacttcctaaattgaagtctagtttttgtgttttcaagagggaatattgacagtgtagacagatgtaggttatctgaaatgtcaaaacacttcttctcaaatgttgtacagtaattgcctattttaattaaatctcttagtaacataaagtatacagcattttcaaattttacaaaaaagatagttgttaatttatagcattaataacaaaatctaaactatatgtgtaaccactattgtgaaaaaatgttgtaacaataataaaagtacatgattaaaagataacagatgtattattctacattagtattcaagtagagaagaattaaagtagagaagaagtgttgagtttaagtgtaagtaggcagtgcataatctaacgtacaagcatatcacctgttgcataattgtagatgagtaagataaattgattagcctagtctatttaaatttagtaaatgaaaacagatataaaacgtgaaagttataacaaagacaaagaaaaagaaaaataaaagaaagttggttggtagtattgttaatattgcagtcgtggcaatgccacgtcaacgaggtcaaaggaagcggaatgtttaatgacaggtgtgtggagggaggtagggggggtgttaatttaaaagagaacctaaagtttgtttaaatcctatttgtatttaagtattggtgccaaccaacttcctcatgcgccataaatggtaagttataaatttaaagtatttaatagattaaaaggttttgataacttgtacaaaatgatcatgcacttccatatcggaacttattaaatttataaagctataatataaaatgtgtagtcttagtgaattacaaataatttagggtgacatttttatattgagaaacacgtgtttaatgtttaagaatattgcactgatcagactccgtattaaatgttcaaacggtcaggcaactatgagatattaacagaatgagctcaaatgccataccagc

SEQ ID NO: 1832 - DNA, 5026 bp, Diabrotica virgifera
  SmartBlast Evalue=9E-66; Info=Reverse transcriptase n=1 Tax= Schistosoma japonicum RepID=C7C210_SCHJA
atatcaccacgtggaaaagtgcagatggtaattgattgtccagtaatgaagctaagatgggaaaattggctgtgtactgagctacaaaatcatcaaattcaacaggaaacgaacaatggaaaatggatttgaataaaattaaaattagcgggattttggaaattaagagttattcaggacgtggccctttttgcagatgtgaagaattttgaaatcaatgtccggattgaaattatggttggagttacggatatgttgggaaaaatgagactgtccagatgttgggcgctgtatgtatctaagatgttccttcaatctggtgtcgaacgatctaaaggttcttccgacgtaatatgacgagcaggtatggcatttaagctcataaactccacaacactcagatctatcacgactgtccttgttattcaagaaaaccaaacctaaatttgaattagttctaaaagaaatattacagtaatctttaaaaatatgagctaatttgtaagagaattgacctgtaaatgttaatgatctatatggttttggctcctgttcgactagaataggctgtgtatatactcgatgttctaaaattctatttgtttttttgtgtaaaattttatttactaagtccacagtataaccattattaactgctatttgttggataatttttaattctttgttaaatgaagttgtagtcaatgggatagagacaagcctgttgatgtaactataaaaagcagccagtttatgttgtatggggtggtgtgaatcggcagggataactgtacctgtatgggttggttttctataaataccaaagtcaatcgttccatttctgagtgtcaatgtaagatctaaaaagttcaaactctttgagtcattctgaatctctaaagtaaatttaatagtgtcatgtaaagtattgaggaaatctaagaaatcgtgaagaatgtcaattgtgccattccatattattaaagtatcgtcaacatacctagcgtaaaatttaatataatctgtaaatggattatttttcactattttattagattccaagtcatttagaaaaatatcagctaatatcggtgaaagaggagatcccatagctagtccgtccggttgcacatatgtggtgttgttgaaattaaagaaattctgactcagacacaaattcaaaagctctgtatactcaataatttgattaggatggtaattattattccacaagtctaaagcaacaatactgataacttcttgtgttggaatgttagtaaagagattagttatgtctaaggaaatcaataaatcttcattactaagattaacttctgtaattttatttgtcaaacttaagttgttagagactacataatcgaatttattgttgtaaaaggttttaaggaatttgtttaagtgagaagctaatgcatgagtgggagaatcagtaaaggataccactggtctgattggtatgttttcaaagacatcagtcttgtgtattttcatgagaccatagagtctgggaacgtttgctttagatggtaaaagtttctttttagtagtattatcaaaaacttcagtgattttattgatggctgttctaactttagtagtgaaagtattaatattgacagattttgttagaaattggttatctagtataaaattagtgactttttgatggtagtcttgggtgtgtaagacaactacagtgctgcctttatctgctttagtgactgtaaggttattttcactaattttcttatcaattgatttaatggtgtccttatattcattgagagggtttctgtgatagccctttctgttgttacaaatagcctccttttcttttttcagtaatactttcaaactgctcctaatttcttctgtgttttccagtggtattgattgtaagatactttcactctcaactccgagtagttctagatttctaagttgttgttttttagaagattgggggggattgaatttgaaacctttttggagtagagacagttcattatttgaaaatactacgttagagtaatttatgaaaggggtatagaatgtatgttgctcagagccatcgaaaatgttgtctgggtcagaagatatagatgtattaatactatgagtttgatcaggaagatcactaagactagtattggtagtaacgtttaataatcgttcagaagtatacaaatcagaatttgtaaaattagaaggtgttacaatataagagccattactgttactatccaccacaagttggtcattgttaagttgtgaaaacacagattgatttgacaaaataatattgttatttactctatgtgttataaatttaagtttcttgatcttatcatgaagtttcctatattgtctactcctatgaaaattaatagtcccatgtaaatcacgcatacattcatcaaactcgagcgctgtcattcttctatgtaagctattgtagattgtcttcagttgcaagtcaatggtgtagatatgttggtatagtttccgaatctcatccctaatgatggatctacccagaatttttacttgtttagccttcgttgcattgaagttaagttctcttagtctacctctagcataactaggcagcaggttgagacgtaaacattcgttgttataaaagatcttagatttttgtaacattttcttgatgttcagctccttgtaacggtgtagcaaagttgctagtcttgcattattcaaatattgaatgggttgcatatgtgagtccatattaaatatagtaatgaaacacagacttactcacaatcatttaattatactttgacgaccggtttcgatctctacaatatacagatcatcttcaggtcggcgttacaagtagttaaatgctacaataagagaaaacttgtgttagaccagtgtctgattgaagagatgttaatagaaagccaaatttaaaaaatttttataaaattttttgaaataaaggtttgcaactgttgacatttcagaatattggtatatacaaagtcaaacctatgagtaaaaatgctcataggcatgtatgtgcaaatgggtgcatacagtttgaatttgttgagattaaaatttttaaccattaaaaaacaaaataaacataaactgacttaaatatgcttccaaattcaaagtagtaataataaaagagatagtaatattgttctaatctacttacatgccgttacaaggattgcgttgcaacttagttgttgtcatattagtacgtccaaattatgctaattggtttgttgggatagtgatagggtaaacagacatgttacgtaggttaaaacacagtaagatttcgaatttggaatggatcctgaaggaagatgcgtatgtgaaacgggtgatgttttgttagaatggagaaagacaatgctccaggagttgcgtattaattgtagcaaagtatgaaatgttattctaggctcttgtacaaatgtgatggtcttagctcgtagatgttatacgatgcgggcagaggtcaaagcataggaaatgacaaataggaaaatgttgtcataaattaatctaatttaagatatgttgttctcagtaagttaactgagggatgtcataagtataataatatcataatattatgaagtagtaagtgccatacactgtgaaactatgaagtgtatagaaattaaaggaaagctagttagttaaatgaaaaaatattaatatcaaaacatcggttaagaaactttaaattgaaaaattgaaaaaggtaagaaattgataaaattaaagattattttgtttgagctattgtataatgggatatgtacaaagaaaaagaaagaaacgaaatattaatggaagggtgtaggcacttacttgagaatagtttttaactaaataaataaattaacacataacacatagggtttaaaagcacaaagacataacaattattggtaaaaggtttttttaagggaggtagcactacatttccccaattactatttaacttagtttttacttcctaaattgaagtctagtttttgtgttttcaagagggaatattgacagtgtagacagatgtaggttatctgaaatgtcaaaacacttcttctcaaatgttgtacagtaattgcctattttaattaaatctcttagtaacataaagtatacagcattttcaaattttacaaaaaagatagttgttaatttatagcattaataacaaaatctaaactatatgtgtaaccactattgtgaaaaaatgttgtaacaataataaaagtacatgattaaaagataacagatgtattattctacattagtattcaagtagagaagaattaaagtagagaagaagtgttgagtttaagtgtaagtaggcagtgcataatctaacgtacaagcatatcacctgttgcataattgtagatgagtaagataaattgattagcctagtctatttaaatttagtaaatgaaaacagatataaaacgtgaaagttataacaaagacaaagaaaaagaaaaataaaagaaagttggttggtagtattgttaatattgcagtcgtggcaatgccacgtcaacgaggtcaaaggaagcggaatgtttaatgacaggtgtgtggagggaggtagggggggtgttaatttaaaagagaacctaaagtttgtttaaatcctatttgtatttaagtattggtgccaaccaacttcctcatgcgccataaatggtaagttataaatttaaagtatttaatagattaaaaggttttgataacttgtacaaaatgatcatgcacttccatatcggaacttattaaatttataaagctataatataaaatgtgtagtcttagtgaattacaaataatttagggtgacatttttatattgagaaacacgtgtttaatgtttaagaatattgcactgatcagactccgtattaaatgttcaaacggtcaggcaactatgagatattaacagaatgagctcaaatgccataccagc

SEQ ID NO: 1833 - DNA, 5022 bp, Diabrotica virgifera
  SmartBlast Evalue=9E-66; Info=Reverse transcriptase n=1 Tax= Schistosoma japonicum RepID=C7C210_SCHJA
tagatttgtaaataaaatttttagattttgcaggtttgaacttttaattagatgtcgggttgtgtactgtagtaagagtgggttattttatagtaaaactgaataagctggtataaattcaagctctaattgggcattcaatgtatgtctagtagggtcctttaaagattttaaaatctcaaaatgttccaggttattcaggacgtggccctttttgcagatgtgaagaattttgaaatcaatgtccggattgaaattatggttggagttacggatatgttgggaaaaatgagactgtccagatgttgggcgctgtatgtatctaagatgttccttcaatctggtgtcgaacgatctaaaggttcttccgacgtaatatgacgagcaggtatggcatttaagctcataaactccacaacactcagatctatcacgactgtccttgttattcaagaaaaccaaacctaaatttgaattagttctaaaagaaatattacagtaatctttaaaaatatgagctaatttgtaagagaattgacctgtaaatgttaatgatctatatggttttggctcctgttcgactagaataggctgtgtatatactcgatgttctaaaattctatttgtttttttgtgtaaaattttatttactaagtccacagtataaccattattaactgctatttgttggataatttttaattctttgttaaatgaagttgtagtcaatgggatagagacaagcctgttgatgtaactataaaaagcagccagtttatgttgtatggggtggtgtgaatcggcagggataactgtacctgtatgggttggttttctataaataccaaagtcaatcgttccatttctgagtgtcaatgtaagatctaaaaagttcaaactctttgagtcattctgaatctctaaagtaaatttaatagtgtcatgtaaagtattgaggaaatctaagaaatcgtgaagaatgtcaattgtgccattccatattattaaagtatcgtcaacatacctagcgtaaaatttaatataatctgtaaatggattatttttcactattttattagattccaagtcatttagaaaaatatcagctaatatcggtgaaagaggagatcccatagctagtccgtccggttgcacatatgtggtgttgttgaaattaaagaaattctgactcagacacaaattcaaaagctctgtatactcaataatttgattaggatggtaattattattccacaagtctaaagcaacaatactgataacttcttgtgttggaatgttagtaaagagattagttatgtctaaggaaatcaataaatcttcattactaagattaacttctgtaattttatttgtcaaacttaagttgttagagactacataatcgaatttattgttgtaaaaggttttaaggaatttgtttaagtgagaagctaatgcatgagtgggagaatcagtaaaggataccactggtctgattggtatgttttcaaagacatcagtcttgtgtattttcatgagaccatagagtctgggaacgtttgctttagatggtaaaagtttctttttagtagtattatcaaaaacttcagtgattttattgatggctgttctaactttagtagtgaaagtattaatattgacagattttgttagaaattggttatctagtataaaattagtgactttttgatggtagtcttgggtgtgtaagacaactacagtgctgcctttatctgctttagtgactgtaaggttattttcactaattttcttatcaattgatttaatggtgtccttatattcattgagagggtttctgtgatagccctttctgttgttacaaatagcctccttttcttttttcagtaatactttcaaactgctcctaatttcttctgtgttttccagtggtattgattgtaagatactttcactctcaactccgagtagttctagatttctaagttgttgttttttagaagattgggggggattgaatttgaaacctttttggagtagagacagttcattatttgaaaatactacgttagagtaatttatgaaaggggtatagaatgtatgttgctcagagccatcgaaaatgttgtctgggtcagaagatatagatgtattaatactatgagtttgatcaggaagatcactaagactagtattggtagtaacgtttaataatcgttcagaagtatacaaatcagaatttgtaaaattagaaggtgttacaatataagagccattactgttactatccaccacaagttggtcattgttaagttgtgaaaacacagattgatttgacaaaataatattgttatttactctatgtgttataaatttaagtttcttgatcttatcatgaagtttcctatattgtctactcctatgaaaattaatagtcccatgtaaatcacgcatacattcatcaaactcgagcgctgtcattcttctatgtaagctattgtagattgtcttcagttgcaagtcaatggtgtagatatgttggtatagtttccgaatctcatccctaatgatggatctacccagaatttttacttgtttagccttcgttgcattgaagttaagttctcttagtctacctctagcataactaggcagcaggttgagacgtaaacattcgttgttataaaagatcttagatttttgtaacattttcttgatgttcagctccttgtaacggtgtagcaaagttgctagtcttgcattattcaaatattgaatgggttgcatatgtgagtccatattaaatatagtaatgaaacacagacttactcacaatcatttaattatactttgacgaccggtttcgatctctacaatatacagatcatcttcaggtcggcgttacaagtagttaaatgctacaataagagaaaacttgtgttagaccagtgtctgattgaagagatgttaatagaaagccaaatttaaaaaatttttataaaattttttgaaataaaggtttgcaactgttgacatttcagaatattggtatatacaaagtcaaacctatgagtaaaaatgctcataggcatgtatgtgcaaatgggtgcatacagtttgaatttgttgagattaaaatttttaaccattaaaaaacaaaataaacataaactgacttaaatatgcttccaaattcaaagtagtaataataaaagagatagtaatattgttctaatctacttacatgccgttacaaggattgcgttgcaacttagttgttgtcatattagtacgtccaaattatgctaattggtttgttgggatagtgatagggtaaacagacatgttacgtaggttaaaacacagtaagatttcaaatttggaattgatcctgaaggaagatgcgtatgtgaaacgggtgatgttttgttcgaatggagaaagacaatgctccaggagttgcgtattaattgtagcaaagtatgaaatgttattctaggatcttgtacaaatgtgatggtctaagctcgtagatgttatacgatgcgggcagaggtcaaagtataggacatgacaaataggaaattgttgtcataaattaatacaatttaagatatgttgttctcagtaaattaactgagggatgtcataagtataataatatcataatattatgaagtagtaagtgccatacactatgaaactatgaagtgtatagaaataaagggaaactagttagttaaatgaaaaaattattatcaaaacatcggttaagaaactgtaaattgaaaaatttcaaaaaggtaagaaattgataaaattaaagaatattttgtttgagctattgtataatgggatatgtacaaagaaaaagaaagaaacgaaatattaatggaagggtgtaggcacttacttgagaatagtttttaactaaataaataaattaacacataacacatagggtttaaaagcacaaagacataacaattattggtaaaaggtttttttaagggaggtagcactacatttccccaattactatttaacttagtttttacttcctaaattgaagtctagtttttgtgttttcaagagggaatattgacagtgtaggcagatgtaggttatctgaaatgtcaaaacacttcttctcaaatgttgtacagtagttgcctattttaattaaatctcttagtaacataaagtatacagcattttcaaattttacaaacaagatagttgttaatttatagcattaataacaaaatctaaactatatgtgtaaccactattgtgaaaaaactgttgtaacaataataaaaatacatgattaattattctacattagtattcaagtagagaagaattaaagtagagaagaagtgttgagtttaagtttaagtaggcagtgcataatctaacgtacaagcatatcacctgttgcataattgtagatgagtaagataaattgattagcctagtctatttaaatttagtaaatgaaaacagatataaaacttgaaagttataacgaagaaaaagaaaagaaagttggttggtagtattgttaatattgtagtcgtggcaatgccacgtcaacgaggtcaaaggaagcggaatgtttaatgacaggtgtgtggagggaggtagggggggtgttaatttaaaagagaacctaaagtttgtttaaatcctatttgtatttaagtattggtgccaaccaacttcctcatgcgccataaatggtaagttataaatttaaagtatttaatagattaaaaggttttgataacttgtacaaaatgatcatgcacttccatatcggaacttattaaatttataaagctataatataaaatgtgtagtcttagtgaattacaaataatttagggtgacatttttatattgagaaacacgtgtttaatgtttaagaatattgcactgatcagactccgtattaaatgttcaaacggtcaggcaactatgagatattaacagaatgagctcaaatgccataccagc

SEQ ID NO: 1834 - DNA, 4998 bp, Diabrotica virgifera
  SmartBlast Evalue=9E-66; Info=Reverse transcriptase n=1 Tax= Schistosoma japonicum RepID=C7C210_SCHJA
atatcaccacgtggaaaagtgcagatggtaattgattgtccagtaatgaagctaagatgggaaaattggctgtgtactgagctacaaaatcatcaaattcaacaggaaacgaacaatggaaaatggatttgaataaaattaaaattagcgggattttggaaattaagagttattcaggacgtggccctttttgcagatgtgaagaattttgaaatcaatgtccggattgaaattatggttggagttacggatatgttgggaaaaatgagactgtccagatgttgggcgctgtatgtatctaagatgttccttcaatctggtgtcgaacgatctaaaggttcttccgacgtaatatgacgagcaggtatggcatttaagctcataaactccacaacactcagatctatcacgactgtccttgttattcaagaaaaccaaacctaaatttgaattagttctaaaagaaatattacagtaatctttaaaaatatgagctaatttgtaagagaattgacctgtaaatgttaatgatctatatggttttggctcctgttcgactagaataggctgtgtatatactcgatgttctaaaattctatttgtttttttgtgtaaaattttatttactaagtccacagtataaccattattaactgctatttgttggataatttttaattctttgttaaatgaagttgtagtcaatgggatagagacaagcctgttgatgtaactataaaaagcagccagtttatgttgtatggggtggtgtgaatcggcagggataactgtacctgtatgggttggttttctataaataccaaagtcaatcgttccatttctgagtgtcaatgtaagatctaaaaagttcaaactctttgagtcattctgaatctctaaagtaaatttaatagtgtcatgtaaagtattgaggaaatctaagaaatcgtgaagaatgtcaattgtgccattccatattattaaagtatcgtcaacatacctagcgtaaaatttaatataatctgtaaatggattatttttcactattttattagattccaagtcatttagaaaaatatcagctaatatcggtgaaagaggagatcccatagctagtccgtccggttgcacatatgtggtgttgttgaaattaaagaaattctgactcagacacaaattcaaaagctctgtatactcaataatttgattaggatggtaattattattccacaagtctaaagcaacaatactgataacttcttgtgttggaatgttagtaaagagattagttatgtctaaggaaatcaataaatcttcattactaagattaacttctgtaattttatttgtcaaacttaagttgttagagactacataatcgaatttattgttgtaaaaggttttaaggaatttgtttaagtgagaagctaatgcatgagtgggagaatcagtaaaggataccactggtctgattggtatgttttcaaagacatcagtcttgtgtattttcatgagaccatagagtctgggaacgtttgctttagatggtaaaagtttctttttagtagtattatcaaaaacttcagtgattttattgatggctgttctaactttagtagtgaaagtattaatattgacagattttgttagaaattggttatctagtataaaattagtgactttttgatggtagtcttgggtgtgtaagacaactacagtgctgcctttatctgctttagtgactgtaaggttattttcactaattttcttatcaattgatttaatggtgtccttatattcattgagagggtttctgtgatagccctttctgttgttacaaatagcctccttttcttttttcagtaatactttcaaactgctcctaatttcttctgtgttttccagtggtattgattgtaagatactttcactctcaactccgagtagttctagatttctaagttgttgttttttagaagattgggggggattgaatttgaaacctttttggagtagagacagttcattatttgaaaatactacgttagagtaatttatgaaaggggtatagaatgtatgttgctcagagccatcgaaaatgttgtctgggtcagaagatatagatgtattaatactatgagtttgatcaggaagatcactaagactagtattggtagtaacgtttaataatcgttcagaagtatacaaatcagaatttgtaaaattagaaggtgttacaatataagagccattactgttactatccaccacaagttggtcattgttaagttgtgaaaacacagattgatttgacaaaataatattgttatttactctatgtgttataaatttaagtttcttgatcttatcatgaagtttcctatattgtctactcctatgaaaattaatagtcccatgtaaatcacgcatacattcatcaaactcgagcgctgtcattcttctatgtaagctattgtagattgtcttcagttgcaagtcaatggtgtagatatgttggtatagtttccgaatctcatccctaatgatggatctacccagaatttttacttgtttagccttcgttgcattgaagttaagttctcttagtctacctctagcataactaggcagcaggttgagacgtaaacattcgttgttataaaagatcttagatttttgtaacattttcttgatgttcagctccttgtaacggtgtagcaaagttgctagtcttgcattattcaaatattgaatgggttgcatatgtgagtccatattaaatatagtaatgaaacacagacttactcacaatcatttaattatactttgacgaccggtttcgatctctacaatatacagatcatcttcaggtcggcgttacaagtagttaaatgctacaataagagaaaacttgtgttagaccagtgtctgattgaagagatgttaatagaaagccaaatttaaaaaatttttataaaattttttgaaataaaggtttgcaactgttgacatttcagaatattggtatatacaaagtcaaacctatgagtaaaaatgctcataggcatgtatgtgcaaatgggtgcatacagtttgaatttgttgagattaaaatttttaaccattaaaaaacaaaataaacataaactgacttaaatatgcttccaaattcaaagtagtaataataaaagagatagtaatattgttctaatctacttacatgccgttacaaggattgcgttgcaacttagttgttgtcatattagtacgtccaaattatgctaattggtttgttgggatagtgatagggtaaacagacatgttacgtaggttaaaacacagtaagatttcaaatttggaattgatcctgaaggaagatgcgtatgtgaaacgggtgatgttttgttcgaatggagaaagacaatgctccaggagttgcgtattaattgtagcaaagtatgaaatgttattctaggatcttgtacaaatgtgatggtctaagctcgtagatgttatacgatgcgggcagaggtcaaagtataggacatgacaaataggaaattgttgtcataaattaatacaatttaagatatgttgttctcagtaaattaactgagggatgtcataagtataataatatcataatattatgaagtagtaagtgccatacactatgaaactatgaagtgtatagaaataaagggaaactagttagttaaatgaaaaaattattatcaaaacatcggttaagaaactgtaaattgaaaaatttcaaaaaggtaagaaattgataaaattaaagaatattttgtttgagctattgtataatgggatatgtacaaagaaaaagaaagaaacgaaatattaatggaagggtgtaggcacttacttgagaatagtttttaactaaataaataaattaacacataacacatagggtttaaaagcacaaagacataacaattattggtaaaaggtttttttaagggaggtagcactacatttccccaattactatttaacttagtttttacttcctaaattgaagtctagtttttgtgttttcaagagggaatattgacagtgtaggcagatgtaggttatctgaaatgtcaaaacacttcttctcaaatgttgtacagtagttgcctattttaattaaatctcttagtaacataaagtatacagcattttcaaattttacaaacaagatagttgttaatttatagcattaataacaaaatctaaactatatgtgtaaccactattgtgaaaaaactgttgtaacaataataaaaatacatgattaattattctacattagtattcaagtagagaagaattaaagtagagaagaagtgttgagtttaagtttaagtaggcagtgcataatctaacgtacaagcatatcacctgttgcataattgtagatgagtaagataaattgattagcctagtctatttaaatttagtaaatgaaaacagatataaaacttgaaagttataacgaagaaaaagaaaagaaagttggttggtagtattgttaatattgtagtcgtggcaatgccacgtcaacgaggtcaaaggaagcggaatgtttaatgacaggtgtgtggagggaggtagggggggtgttaatttaaaagagaacctaaagtttgtttaaatcctatttgtatttaagtattggtgccaaccaacttcctcatgcgccataaatggtaagttataaatttaaagtatttaatagattaaaaggttttgataacttgtacaaaatgatcatgcacttccatatcggaacttattaaatttataaagctataatataaaatgtgtagtcttagtgaattacaaataatttagggtgacatttttatattgagaaacacgtgtttaatgtttaagaatattgcactgatcagactccgtattaaatgttcaaacggtcaggcaactatgagatattaacagaatgagctcaaatgccataccagc

SEQ ID NO: 1835 - DNA, 5024 bp, Diabrotica virgifera
  SmartBlast Evalue=9E-66; Info=Reverse transcriptase n=1 Tax= Schistosoma japonicum RepID=C7C210_SCHJA
tagatttgtaaataaaatttttagattttgcaggtttgaacttttaattagatgtcgggttgtgtactgtagtaagagtgggttattttatagtaaaactgaataagctggtataaattcaagctctaattgggcattcaatgtatgtctagtagggtcctttaaagattttaaaatctcaaaatgttccaggttattcaggacgtggccctttttgcagatgtgaagaattttgaaatcaatgtccggattgaaattatggttggagttacggatatgttgggaaaaatgagactgtccagatgttgggcgctgtatgtatctaagatgttccttcaatctggtgtcgaacgatctaaaggttcttccgacgtaatatgacgagcaggtatggcatttaagctcataaactccacaacactcagatctatcacgactgtccttgttattcaagaaaaccaaacctaaatttgaattagttctaaaagaaatattacagtaatctttaaaaatatgagctaatttgtaagagaattgacctgtaaatgttaatgatctatatggttttggctcctgttcgactagaataggctgtgtatatactcgatgttctaaaattctatttgtttttttgtgtaaaattttatttactaagtccacagtataaccattattaactgctatttgttggataatttttaattctttgttaaatgaagttgtagtcaatgggatagagacaagcctgttgatgtaactataaaaagcagccagtttatgttgtatggggtggtgtgaatcggcagggataactgtacctgtatgggttggttttctataaataccaaagtcaatcgttccatttctgagtgtcaatgtaagatctaaaaagttcaaactctttgagtcattctgaatctctaaagtaaatttaatagtgtcatgtaaagtattgaggaaatctaagaaatcgtgaagaatgtcaattgtgccattccatattattaaagtatcgtcaacatacctagcgtaaaatttaatataatctgtaaatggattatttttcactattttattagattccaagtcatttagaaaaatatcagctaatatcggtgaaagaggagatcccatagctagtccgtccggttgcacatatgtggtgttgttgaaattaaagaaattctgactcagacacaaattcaaaagctctgtatactcaataatttgattaggatggtaattattattccacaagtctaaagcaacaatactgataacttcttgtgttggaatgttagtaaagagattagttatgtctaaggaaatcaataaatcttcattactaagattaacttctgtaattttatttgtcaaacttaagttgttagagactacataatcgaatttattgttgtaaaaggttttaaggaatttgtttaagtgagaagctaatgcatgagtgggagaatcagtaaaggataccactggtctgattggtatgttttcaaagacatcagtcttgtgtattttcatgagaccatagagtctgggaacgtttgctttagatggtaaaagtttctttttagtagtattatcaaaaacttcagtgattttattgatggctgttctaactttagtagtgaaagtattaatattgacagattttgttagaaattggttatctagtataaaattagtgactttttgatggtagtcttgggtgtgtaagacaactacagtgctgcctttatctgctttagtgactgtaaggttattttcactaattttcttatcaattgatttaatggtgtccttatattcattgagagggtttctgtgatagccctttctgttgttacaaatagcctccttttcttttttcagtaatactttcaaactgctcctaatttcttctgtgttttccagtggtattgattgtaagatactttcactctcaactccgagtagttctagatttctaagttgttgttttttagaagattgggggggattgaatttgaaacctttttggagtagagacagttcattatttgaaaatactacgttagagtaatttatgaaaggggtatagaatgtatgttgctcagagccatcgaaaatgttgtctgggtcagaagatatagatgtattaatactatgagtttgatcaggaagatcactaagactagtattggtagtaacgtttaataatcgttcagaagtatacaaatcagaatttgtaaaattagaaggtgttacaatataagagccattactgttactatccaccacaagttggtcattgttaagttgtgaaaacacagattgatttgacaaaataatattgttatttactctatgtgttataaatttaagtttcttgatcttatcatgaagtttcctatattgtctactcctatgaaaattaatagtcccatgtaaatcacgcatacattcatcaaactcgagcgctgtcattcttctatgtaagctattgtagattgtcttcagttgcaagtcaatggtgtagatatgttggtatagtttccgaatctcatccctaatgatggatctacccagaatttttacttgtttagccttcgttgcattgaagttaagttctcttagtctacctctagcataactaggcagcaggttgagacgtaaacattcgttgttataaaagatcttagatttttgtaacattttcttgatgttcagctccttgtaacggtgtagcaaagttgctagtcttgcattattcaaatattgaatgggttgcatatgtgagtccatattaaatatagtaatgaaacacagacttactcacaatcatttaattatactttgacgaccggtttcgatctctacaatatacagatcatcttcaggtcggcgttacaagtagttaaatgctacaataagagaaaacttgtgttagaccagtgtctgattgaagagatgttaatagaaagccaaatttaaaaaatttttataaaattttttgaaataaaggtttgcaactgttgacatttcagaatattggtatatacaaagtcaaacctatgagtaaaaatgctcataggcatgtatgtgcaaatgggtgcatacagtttgaatttgttgagattaaaatttttaaccattaaaaaacaaaataaacataaactgacttaaatatgcttccaaattcaaagtagtaataataaaagagatagtaatattgttctaatctacttacatgccgttacaaggattgcgttgcaacttagttgttgtcatattagtacgtccaaattatgctaattggtttgttgggatagtgatagggtaaacagacatgttacgtaggttaaaacacagtaagatttcgaatttggaatggatcctgaaggaagatgcgtatgtgaaacgggtgatgttttgttagaatggagaaagacaatgctccaggagttgcgtattaattgtagcaaagtatgaaatgttattctaggctcttgtacaaatgtgatggtcttagctcgtagatgttatacgatgcgggcagaggtcaaagcataggaaatgacaaataggaaaatgttgtcataaattaatctaatttaagatatgttgttctcagtaagttaactgagggatgtcataagtataataatatcataatattatgaagtagtaagtgccatacactgtgaaactatgaagtgtatagaaattaaaggaaagctagttagttaaatgaaaaaatattaatatcaaaacatcggttaagaaactttaaattgaaaaattgaaaaaggtaagaaattgataaaattaaagattattttgtttgagctattgtataatgggatatgtacaaagaaaaagaaagaaacgaaatattaatggaagggtgtaggcacttacttgagaatagtttttaactaaataaataaattaacacataacacatagggtttaaaagcacaaagacataacaattattggtaaaaggtttttttaagggaggtagcactacatttccccaattactatttaacttagtttttacttcctaaattgaagtctagtttttgtgttttcaagagggaatattgacagtgtaggcagatgtaggttatctgaaatgtcaaaacacttcttctcaaatgttgtacagtagttgcctattttaattaaatctcttagtaacataaagtatacagcattttcaaattttacaaacaagatagttgttaatttatagcattaataacaaaatctaaactatatgtgtaaccactattgtgaaaaaactgttgtaacaataataaaaatacatgattaattattctacattagtattcaagtagagaagaattaaagtagagaagaagtgttgagtttaagtttaagtaggcagtgcataatctaacgtacaagcatatcacctgttgcataattgtagatgagtaagataaattgattagcctagtctatttaaatttagtaaatgaaaacagatataaaacttgaaagttataacgaagaaaaagaaaagaaagttggttggtagtattgttaatattgtagtcgtggcaatgccacgtcaacgaggtcaaaggaagcggaatgtttaatgacaggtgtgtggagggaggtagggggggtgttaatttaaaagagaacctaaagtttgtttaaatcctatttgtatttaagtattggtgccaaccaacttcctcatgcgccataaatggtaagttataaatttaaagtatttaatagattaaaaggttttgataacttgtacaaaatgatcatgcacttccatatcggaacttattaaatttataaagctataatataaaatgtgtagtcttagtgaattacaaataatttagggtgacatttttatattgagaaacacgtgtttaatgtttaagaatattgcactgatcagactccgtattaaatgttcaaacggtcaggcaactatgagatattaacagaatgagctcaaatgccataccagc

SEQ ID NO: 1836 - DNA, 5000 bp, Diabrotica virgifera
  SmartBlast Evalue=9E-66; Info=Reverse transcriptase n=1 Tax= Schistosoma japonicum RepID=C7C210_SCHJA
atatcaccacgtggaaaagtgcagatggtaattgattgtccagtaatgaagctaagatgggaaaattggctgtgtactgagctacaaaatcatcaaattcaacaggaaacgaacaatggaaaatggatttgaataaaattaaaattagcgggattttggaaattaagagttattcaggacgtggccctttttgcagatgtgaagaattttgaaatcaatgtccggattgaaattatggttggagttacggatatgttgggaaaaatgagactgtccagatgttgggcgctgtatgtatctaagatgttccttcaatctggtgtcgaacgatctaaaggttcttccgacgtaatatgacgagcaggtatggcatttaagctcataaactccacaacactcagatctatcacgactgtccttgttattcaagaaaaccaaacctaaatttgaattagttctaaaagaaatattacagtaatctttaaaaatatgagctaatttgtaagagaattgacctgtaaatgttaatgatctatatggttttggctcctgttcgactagaataggctgtgtatatactcgatgttctaaaattctatttgtttttttgtgtaaaattttatttactaagtccacagtataaccattattaactgctatttgttggataatttttaattctttgttaaatgaagttgtagtcaatgggatagagacaagcctgttgatgtaactataaaaagcagccagtttatgttgtatggggtggtgtgaatcggcagggataactgtacctgtatgggttggttttctataaataccaaagtcaatcgttccatttctgagtgtcaatgtaagatctaaaaagttcaaactctttgagtcattctgaatctctaaagtaaatttaatagtgtcatgtaaagtattgaggaaatctaagaaatcgtgaagaatgtcaattgtgccattccatattattaaagtatcgtcaacatacctagcgtaaaatttaatataatctgtaaatggattatttttcactattttattagattccaagtcatttagaaaaatatcagctaatatcggtgaaagaggagatcccatagctagtccgtccggttgcacatatgtggtgttgttgaaattaaagaaattctgactcagacacaaattcaaaagctctgtatactcaataatttgattaggatggtaattattattccacaagtctaaagcaacaatactgataacttcttgtgttggaatgttagtaaagagattagttatgtctaaggaaatcaataaatcttcattactaagattaacttctgtaattttatttgtcaaacttaagttgttagagactacataatcgaatttattgttgtaaaaggttttaaggaatttgtttaagtgagaagctaatgcatgagtgggagaatcagtaaaggataccactggtctgattggtatgttttcaaagacatcagtcttgtgtattttcatgagaccatagagtctgggaacgtttgctttagatggtaaaagtttctttttagtagtattatcaaaaacttcagtgattttattgatggctgttctaactttagtagtgaaagtattaatattgacagattttgttagaaattggttatctagtataaaattagtgactttttgatggtagtcttgggtgtgtaagacaactacagtgctgcctttatctgctttagtgactgtaaggttattttcactaattttcttatcaattgatttaatggtgtccttatattcattgagagggtttctgtgatagccctttctgttgttacaaatagcctccttttcttttttcagtaatactttcaaactgctcctaatttcttctgtgttttccagtggtattgattgtaagatactttcactctcaactccgagtagttctagatttctaagttgttgttttttagaagattgggggggattgaatttgaaacctttttggagtagagacagttcattatttgaaaatactacgttagagtaatttatgaaaggggtatagaatgtatgttgctcagagccatcgaaaatgttgtctgggtcagaagatatagatgtattaatactatgagtttgatcaggaagatcactaagactagtattggtagtaacgtttaataatcgttcagaagtatacaaatcagaatttgtaaaattagaaggtgttacaatataagagccattactgttactatccaccacaagttggtcattgttaagttgtgaaaacacagattgatttgacaaaataatattgttatttactctatgtgttataaatttaagtttcttgatcttatcatgaagtttcctatattgtctactcctatgaaaattaatagtcccatgtaaatcacgcatacattcatcaaactcgagcgctgtcattcttctatgtaagctattgtagattgtcttcagttgcaagtcaatggtgtagatatgttggtatagtttccgaatctcatccctaatgatggatctacccagaatttttacttgtttagccttcgttgcattgaagttaagttctcttagtctacctctagcataactaggcagcaggttgagacgtaaacattcgttgttataaaagatcttagatttttgtaacattttcttgatgttcagctccttgtaacggtgtagcaaagttgctagtcttgcattattcaaatattgaatgggttgcatatgtgagtccatattaaatatagtaatgaaacacagacttactcacaatcatttaattatactttgacgaccggtttcgatctctacaatatacagatcatcttcaggtcggcgttacaagtagttaaatgctacaataagagaaaacttgtgttagaccagtgtctgattgaagagatgttaatagaaagccaaatttaaaaaatttttataaaattttttgaaataaaggtttgcaactgttgacatttcagaatattggtatatacaaagtcaaacctatgagtaaaaatgctcataggcatgtatgtgcaaatgggtgcatacagtttgaatttgttgagattaaaatttttaaccattaaaaaacaaaataaacataaactgacttaaatatgcttccaaattcaaagtagtaataataaaagagatagtaatattgttctaatctacttacatgccgttacaaggattgcgttgcaacttagttgttgtcatattagtacgtccaaattatgctaattggtttgttgggatagtgatagggtaaacagacatgttacgtaggttaaaacacagtaagatttcgaatttggaatggatcctgaaggaagatgcgtatgtgaaacgggtgatgttttgttagaatggagaaagacaatgctccaggagttgcgtattaattgtagcaaagtatgaaatgttattctaggctcttgtacaaatgtgatggtcttagctcgtagatgttatacgatgcgggcagaggtcaaagcataggaaatgacaaataggaaaatgttgtcataaattaatctaatttaagatatgttgttctcagtaagttaactgagggatgtcataagtataataatatcataatattatgaagtagtaagtgccatacactgtgaaactatgaagtgtatagaaattaaaggaaagctagttagttaaatgaaaaaatattaatatcaaaacatcggttaagaaactttaaattgaaaaattgaaaaaggtaagaaattgataaaattaaagattattttgtttgagctattgtataatgggatatgtacaaagaaaaagaaagaaacgaaatattaatggaagggtgtaggcacttacttgagaatagtttttaactaaataaataaattaacacataacacatagggtttaaaagcacaaagacataacaattattggtaaaaggtttttttaagggaggtagcactacatttccccaattactatttaacttagtttttacttcctaaattgaagtctagtttttgtgttttcaagagggaatattgacagtgtaggcagatgtaggttatctgaaatgtcaaaacacttcttctcaaatgttgtacagtagttgcctattttaattaaatctcttagtaacataaagtatacagcattttcaaattttacaaacaagatagttgttaatttatagcattaataacaaaatctaaactatatgtgtaaccactattgtgaaaaaactgttgtaacaataataaaaatacatgattaattattctacattagtattcaagtagagaagaattaaagtagagaagaagtgttgagtttaagtttaagtaggcagtgcataatctaacgtacaagcatatcacctgttgcataattgtagatgagtaagataaattgattagcctagtctatttaaatttagtaaatgaaaacagatataaaacttgaaagttataacgaagaaaaagaaaagaaagttggttggtagtattgttaatattgtagtcgtggcaatgccacgtcaacgaggtcaaaggaagcggaatgtttaatgacaggtgtgtggagggaggtagggggggtgttaatttaaaagagaacctaaagtttgtttaaatcctatttgtatttaagtattggtgccaaccaacttcctcatgcgccataaatggtaagttataaatttaaagtatttaatagattaaaaggttttgataacttgtacaaaatgatcatgcacttccatatcggaacttattaaatttataaagctataatataaaatgtgtagtcttagtgaattacaaataatttagggtgacatttttatattgagaaacacgtgtttaatgtttaagaatattgcactgatcagactccgtattaaatgttcaaacggtcaggcaactatgagatattaacagaatgagctcaaatgccataccagc

SEQ ID NO: 1837 - DNA, 494 bp, Diabrotica virgifera
gtatgagtaactaaaatttatatacttatatgtacttacttatatgtatttattaaataatattgagttaccaaaatagattatacctattttgaagcaccgcaaacaaaagagattatgtatgttctttagtcctagtactttattatcattcgtcttcatccttaacactgccacactgcatagatagatacatattttcgatttcatattttaccgttgtttcctaccctgatccattcaggtaagaaatggtcagaataagacaagacggggttaggggatatgtattgtggaagtggaataacaacatcggtgcaccggtgagtgttgccaaacggagggaaatttcactttttgcgggaattttcaacataaaaggtgataaagggaaaagttaactcaaaagggaatttttgttccagtccaaattgtaaaatattaaaaaaaatcaaaatatttgaaaataattaaacatatcttctcagattttg

SEQ ID NO: 1838 - DNA, 2226 bp, Diabrotica virgifera
aagcgggaaagtttggagaagaagtagatattggacagtatgtcaaccaaacaaacataaccgacctagaaaaagtaaatatgcctgagcctcaggcgcaaccgctgtaaaacataaaccagtataacaaaccgaaaacgcactaggtactactcacaaataaactaaaattaataaaggctaatgaacataaacgcataaaaaaataaattaataaaaatccttaccttaattctgtagtgaggtatccaacgatgtatccaattccaatgagaagaataaccagtaacgaattaactacgtgatcaaacaattgcaaacacaacgaaactaaaaattgcaagaagaaattggaagtaaatggaagcaaacggaaaccctaaaagagaaaaatagtattagaatatctccttgtatttacaccatcatgttttataaaactaaatctagaactaataagttaacctaaactgtcaaaatgacgtcgtctactacagcaactaataaattaacaaaattaaaaaccaaaaactgattgaaaatgacgtcagagaaataattctattttagtagcaatgtcaaataagaaaaaagatgaaaactaaattaatgtagatttcttcaaaatgacgtcagagcaacgattcaaattctatatcaaccaataagtaagaaaacaatagaagatcttatactaacctttggccagaagggttttccagggggtacatacacaaaaaactcttctacttcccacagagtatttccaacaataactaggtactatctacccctatctattttgtggtttaatgcctaataactgcaatagaacaataacaactctcagagaaacgaataaataaaaagctcggaaatcaaaaatgcacgtattgcagtgtttaagtaatcgaattagaattagacatacctgatgttctcttccttcagaatggtttcaggaatcgttacggcgtatctagaatggtgcttagaaaatatcatacggtgtgaacttgacaactacacaaaatgtacctacaacaacactacaatatgccaagttcaattagcataagttcaggccgatatccccaatgagggtgatttatccaagatcagttgcctgaaaactaatgttgcaagtacacacataacaatttcatgttcttagtagattcatagaacatacttttcagaaaaagtatatactaagaatatgcgtaattaccattgcgaatgtgcagagcacatactgagtatatactacattacagtacttaaacgttctatgtatatacttagaatgtactaccgcacttcttttcagtatatactaagaatatactttttagaacattccaaggacgtgctataaaccttctatgtgtatacttagaacatactaccgcacatctttttagtttataccaagaaggtactttttagaatattccaaggaagtgctataaaccttctatttatatacttagaacgtactaccgcacatctttgtatgggaagaatatatttttaagaatattctaagaaagtgctatcaagtgctatattgctcagaagtatgttttcagcatcacctaatctcatcttaggttctactggttctaccaaatacctattatatttacatattttaatggcaaatgagaatgtagttagtactacattctgcaatattacttaaaaagtaagtaggtacatatttataaattttagttatctatataaactattatattataatatttagctaaacgaaactatgtatgagtaactaaaatttatatacttatatgtacttacttatatgtatttattaaataatattaagttaccaaaatagattattactagtactttattatcattcgccttcatccttaacactgccacactgcatagatacatattttcgttttcatattttaccgttgtttcctaccctgatccattcatataagaaatggtcagaataagacaagacggggttagggggatatgtattgtggaagtggaataacaacatcggtgcaccgatgagtgttgccaaacggagggaatttcactttttgcgggaatttttaacataaaaggtgataaagggaaaagttaactcaaaagggaatttttgttccagtccaaattgaaaatattaaaaaaaatcaaaatatttgaaaataattaaacatatcttctcagattttg

SEQ ID NO: 1839 - DNA, 2244 bp, Diabrotica virgifera
aagcgggaaagtttggagaagaagtagatattggacagtatgtcaaccaaacaaacataaccgacctagaaaaagtaaatatgcctgagcctcaggcgcaaccgctgtaaaacataaaccagtataacaaaccgaaaacgcactaggtactactcacaaataaactaaaattaataaaggctaatgaacataaacgcataaaaaaataaattaataaaaatccttaccttaattctgtagtgaggtatccaacgatgtatccaattccaatgagaagaataaccagtaacgaattaactacgtgatcaaacaattgcaaacacaacgaaactaaaaattgcaagaagaaattggaagtaaatggaagcaaacggaaaccctaaaagagaaaaatagtattagaatatctccttgtatttacaccatcatgttttataaaactaaatctagaactaataagttaacctaaactgtcaaaatgacgtcgtctactacagcaactaataaattaacaaaattaaaaaccaaaaactgattgaaaatgacgtcagagaaataattctattttagtagcaatgtcaaataagaaaaaagatgaaaactaaattaatgtagatttcttcaaaatgacgtcagagcaacgattcaaattctatatcaaccaataagtaagaaaacaatagaagatcttatactaacctttggccagaagggttttccagggggtacatacacaaaaaactcttctacttcccacagagtatttccaacaataactaggtactatctacccctatctattttgtggtttaatgcctaataactgcaatagaacaataacaactctcagagaaacgaataaataaaaagctcggaaatcaaaaatgcacgtattgcagtgtttaagtaatcgaattagaattagacatacctgatgttctcttccttcagaatggtttcaggaatcgttacggcgtatctagaatggtgcttagaaaatatcatacggtgtgaacttgacaactacacaaaatgtacctacaacaacactacaatatgccaagttcaattagcataagttcaggccgatatccccaatgagggtgatttatccaagatcagttgcctgaaaactaatgttgcaagtacacacataacaatttcatgttcttagtagattcatagaacatacttttcagaaaaagtatatactaagaatatgcgtaattaccattgcgaatgtgcagagcacatactgagtatatactacattacagtacttaaacgttctatgtatatacttagaatgtactaccgcacttcttttcagtatatactaagaatatactttttagaacattccaaggacgtgctataaaccttctatttatatacttagaacgtactaccgcacatctgtttagtttatactaagaacgtactttttagaatattccaaggaagtgctataaaccttctatttatatacttagaacgtactactgcacatctttgtattagaagaatatatttctaaggatattctaagaaagtgctatcaagtgctatattgctcagaagtatgttttcagcatcacctaatctcatcttgggttcaatgagaatgtagttagtacctatattctgcaatattacttaaaaagtaagtacatatttataatttttagttatctatataaactattatagctaaactaaacttactaaatgtaagtacatatttataaattttagttatctatataaactattatattataatatttagctaaacgaaactatgtatgagtaactaaaatttatatacttatatgtacttacttatatgtatttattaaataatattaagttaccaaaatagattattactagtactttattatcattcgccttcatccttaacactgccacactgcatagatacatattttcgttttcatattttaccgttgtttcctaccctgatccattcatataagaaatggtcagaataagacaagacggggttagggggatatgtattgtggaagtggaataacaacatcggtgcaccgatgagtgttgccaaacggagggaatttcactttttgcgggaatttttaacataaaaggtgataaagggaaaagttaactcaaaagggaatttttgttccagtccaaattgaaaatattaaaaaaaatcaaaatatttgaaaataattaaacatatcttctcagattttg

SEQ ID NO: 1840 - DNA, 1866 bp, Diabrotica virgifera
aagcgggaaagtttggagaagaagtagatattggacagtatgtcaaccaaacaaacataaccgacctagaaaaagtaaatatgcctgagcctcaggcgcaaccgctgtaaaacataaaccagtataacaaaccgaaaacgcactaggtactactcacaaataaactaaaattaataaaggctaatgaacataaacgcataaaaaaataaattaataaaaatccttaccttaattctgtagtgaggtatccaacgatgtatccaattccaatgagaagaataaccagtaacgaattaactacgtgatcaaacaattgcaaacacaacgaaactaaaaattgcaagaagaaattggaagtaaatggaagcaaacggaaaccctaaaagagaaaaatagtattagaatatctccttgtatttacaccatcatgttttataaaactaaatctagaactaataagttaacctaaactgtcaaaatgacgtcgtctactacagcaactaataaattaacaaaattaaaaaccaaaaactgattgaaaatgacgtcagagaaataattctattttagtagcaatgtcaaataagaaaaaagatgaaaactaaattaatgtagatttcttcaaaatgacgtcagagcaacgattcaaattctatatcaaccaataagtaagaaaacaatagaagatcttatactaacctttggccagaagggttttccagggggtacatacacaaaaaactcttctacttcccacagagtatttccaacaataactaggtactatctacccctatctattttgtggtttaatgcctaataactgcaatagaacaataacaactctcagagaaacgaataaataaaaagctcggaaatcaaaaatgcacgtattgcagtgtttaagtaatcgaattagaattagacatacctgatgttctcttccttcagaatggtttcaggaatcgttacggcgtatctagaatggtgcttagaaaatatcatacggtgtgaacttgacaactacacaaaatgtacctacaacaacactacaatatgccaagttcaattagcataagttcaggccgatatccccaatgagggtgatttatccaagatcagttgcctgaaaactaatgttgcaagtacacacataacaatttcatgttcttagtagattcatagaacatacttttcagaaaaagtatatactaagaatatgcgtaattaccattgcgaatgtgcagagcacatactgagtatatactacattacagtacttaaacgttctatgtatatacttagaatgtactaccgcacttcttttcagtatatactaagaatatactttttagaacattccaaggacgtgctataaaccttctatgtgtatacttagaacatactaccgcacatctttttagtttataccaagaaggtactttttagaatattccaaggaagtgctataaaccttctatttatatacttagaacgtactaccgcacatctttgtatgggaagaatatatttttaagaatattctaagaaagtgctatcaagtgctatattgctcagaagtatgttttcagcatcacctaatctcatcttaggttctactggttctaccaaatacttattatatttacatattttaattgcaaatgagaatgtagttagtacctacattctacaatattacttaaaaagtaagtacatatttataaattttagtcatttatataaatcattatatatttagctaaactaaactattgcataagtaactaaaatttatataatacttatatgtacttacctattcaatgagttaccaaaatagattatattttatgtattttgaag

SEQ ID NO: 1841 - DNA, 1404 bp, Diabrotica virgifera
aattgtatgtagtaaataaaattaattattaaaatgcactactacaagcaaaatacaattaattaaatttacttttatataataattgcatatcatattaatattgtggggcaccatataatttttcttcttcattgacagtagatatatgaaatatacgtcaatttgacaatttcaattgacaatgaattatttaagaaagttgcaagatttcttcgctatttgcgcatgatcgtttctcgtagtacttgcacaaggcgaataagttaaatagtaatggaacagtaagttgcatattatgcgaggagtaataattattctggatacccacataacaatttcatgttcttagtagattcatagaacatacttttcagaaaaagtatatactaagaatatgcgtaattaccattgcgaatgtgcagagcacatactgagtatatactacattacagtacttaaacgttctatgtatatacttagaatgtactaccgcacttcttttcagtatatactaagaatatactttttagaacattccaaggacgtgctataaaccttctatgtgtatacttagaacatactaccgcacatctttttagtttataccaagaaggtactttttagaatattccaaggaagtgctataaaccttctatttatatacttagaacgtactaccgcacatctttgtatgggaagaatatatttttaagaatattctaagaaagtgctatcaagtgctatattgctcagaagtatgttttcagcatcacctaatctcatcttaggttctactggttctaccaaatacctattatatttacatattttaatggcaaatgagaatgtagttagtactacattctgcaatattacttaaaaagtaagtaggtacatatttataaattttagttatctatataaactattatattataatatttagctaaacgaaactatgtatgagtaactaaaatttatatacttatatgtacttacttatatgtatttattaaataatattaagttaccaaaatagattattactagtactttattatcattcgccttcatccttaacactgccacactgcatagatacatattttcgttttcatattttaccgttgtttcctaccctgatccattcatataagaaatggtcagaataagacaagacggggttagggggatatgtattgtggaagtggaataacaacatcggtgcaccgatgagtgttgccaaacggagggaatttcactttttgcgggaatttttaacataaaaggtgataaagggaaaagttaactcaaaagggaatttttgttccagtccaaattgaaaatattaaaaaaaatcaaaatatttgaaaataattaaacatatcttctcagattttg

SEQ ID NO: 1842 - DNA, 1422 bp, Diabrotica virgifera
aattgtatgtagtaaataaaattaattattaaaatgcactactacaagcaaaatacaattaattaaatttacttttatataataattgcatatcatattaatattgtggggcaccatataatttttcttcttcattgacagtagatatatgaaatatacgtcaatttgacaatttcaattgacaatgaattatttaagaaagttgcaagatttcttcgctatttgcgcatgatcgtttctcgtagtacttgcacaaggcgaataagttaaatagtaatggaacagtaagttgcatattatgcgaggagtaataattattctggatacccacataacaatttcatgttcttagtagattcatagaacatacttttcagaaaaagtatatactaagaatatgcgtaattaccattgcgaatgtgcagagcacatactgagtatatactacattacagtacttaaacgttctatgtatatacttagaatgtactaccgcacttcttttcagtatatactaagaatatactttttagaacattccaaggacgtgctataaaccttctatttatatacttagaacgtactaccgcacatctgtttagtttatactaagaacgtactttttagaatattccaaggaagtgctataaaccttctatttatatacttagaacgtactactgcacatctttgtattagaagaatatatttctaaggatattctaagaaagtgctatcaagtgctatattgctcagaagtatgttttcagcatcacctaatctcatcttgggttcaatgagaatgtagttagtacctatattctgcaatattacttaaaaagtaagtacatatttataatttttagttatctatataaactattatagctaaactaaacttactaaatgtaagtacatatttataaattttagttatctatataaactattatattataatatttagctaaacgaaactatgtatgagtaactaaaatttatatacttatatgtacttacttatatgtatttattaaataatattaagttaccaaaatagattattactagtactttattatcattcgccttcatccttaacactgccacactgcatagatacatattttcgttttcatattttaccgttgtttcctaccctgatccattcatataagaaatggtcagaataagacaagacggggttagggggatatgtattgtggaagtggaataacaacatcggtgcaccgatgagtgttgccaaacggagggaatttcactttttgcgggaatttttaacataaaaggtgataaagggaaaagttaactcaaaagggaatttttgttccagtccaaattgaaaatattaaaaaaaatcaaaatatttgaaaataattaaacatatcttctcagattttg

SEQ ID NO: 1843 - DNA, 1339 bp, Diabrotica virgifera
gttttgtaagattagatatttcgtagaataggtcgattaattgctaaatcaatcaaagaatactgatcaaagagtctatattacgtaagatgtaaatttaaacaatgtagctatatagctgtttttttttgcttagcttgattttttatttattttttaactaatgtactccgatacataatctgttagataatatccattatgtccatttatgtctatgcctaaaatgtttcaatcaatttgttgtaaattatccgtcatcccacataacaatttcatgttcttagtagattcatagaacatacttttcagaaaaagtatatactaagaatatgcgtaattaccattgcgaatgtgcagagcacatactgagtatatactacattacagtacttaaacgttctatgtatatacttagaatgtactaccgcacttcttttcagtatatactaagaatatactttttagaacattccaaggacgtgctataaaccttctatgtgtatacttagaacatactaccgcacatctttttagtttataccaagaaggtactttttagaatattccaaggaagtgctataaaccttctatttatatacttagaacgtactaccgcacatctttgtatgggaagaatatatttttaagaatattctaagaaagtgctatcaagtgctatattgctcagaagtatgttttcagcatcacctaatctcatcttaggttctactggttctaccaaatacctattatatttacatattttaatggcaaatgagaatgtagttagtactacattctgcaatattacttaaaaagtaagtaggtacatatttataaattttagttatctatataaactattatattataatatttagctaaacgaaactatgtatgagtaactaaaatttatatacttatatgtacttacttatatgtatttattaaataatattaagttaccaaaatagattattactagtactttattatcattcgccttcatccttaacactgccacactgcatagatacatattttcgttttcatattttaccgttgtttcctaccctgatccattcatataagaaatggtcagaataagacaagacggggttagggggatatgtattgtggaagtggaataacaacatcggtgcaccgatgagtgttgccaaacggagggaatttcactttttgcgggaatttttaacataaaaggtgataaagggaaaagttaactcaaaagggaatttttgttccagtccaaattgaaaatattaaaaaaaatcaaaatatttgaaaataattaaacatatcttctcagattttg

SEQ ID NO: 1844 - DNA, 1357 bp, Diabrotica virgifera
gttttgtaagattagatatttcgtagaataggtcgattaattgctaaatcaatcaaagaatactgatcaaagagtctatattacgtaagatgtaaatttaaacaatgtagctatatagctgtttttttttgcttagcttgattttttatttattttttaactaatgtactccgatacataatctgttagataatatccattatgtccatttatgtctatgcctaaaatgtttcaatcaatttgttgtaaattatccgtcatcccacataacaatttcatgttcttagtagattcatagaacatacttttcagaaaaagtatatactaagaatatgcgtaattaccattgcgaatgtgcagagcacatactgagtatatactacattacagtacttaaacgttctatgtatatacttagaatgtactaccgcacttcttttcagtatatactaagaatatactttttagaacattccaaggacgtgctataaaccttctatttatatacttagaacgtactaccgcacatctgtttagtttatactaagaacgtactttttagaatattccaaggaagtgctataaaccttctatttatatacttagaacgtactactgcacatctttgtattagaagaatatatttctaaggatattctaagaaagtgctatcaagtgctatattgctcagaagtatgttttcagcatcacctaatctcatcttgggttcaatgagaatgtagttagtacctatattctgcaatattacttaaaaagtaagtacatatttataatttttagttatctatataaactattatagctaaactaaacttactaaatgtaagtacatatttataaattttagttatctatataaactattatattataatatttagctaaacgaaactatgtatgagtaactaaaatttatatacttatatgtacttacttatatgtatttattaaataatattaagttaccaaaatagattattactagtactttattatcattcgccttcatccttaacactgccacactgcatagatacatattttcgttttcatattttaccgttgtttcctaccctgatccattcatataagaaatggtcagaataagacaagacggggttagggggatatgtattgtggaagtggaataacaacatcggtgcaccgatgagtgttgccaaacggagggaatttcactttttgcgggaatttttaacataaaaggtgataaagggaaaagttaactcaaaagggaatttttgttccagtccaaattgaaaatattaaaaaaaatcaaaatatttgaaaataattaaacatatcttctcagattttg

SEQ ID NO: 1845 - DNA, 1044 bp, Diabrotica virgifera
aattgtatgtagtaaataaaattaattattaaaatgcactactacaagcaaaatacaattaattaaatttacttttatataataattgcatatcatattaatattgtggggcaccatataatttttcttcttcattgacagtagatatatgaaatatacgtcaatttgacaatttcaattgacaatgaattatttaagaaagttgcaagatttcttcgctatttgcgcatgatcgtttctcgtagtacttgcacaaggcgaataagttaaatagtaatggaacagtaagttgcatattatgcgaggagtaataattattctggatacccacataacaatttcatgttcttagtagattcatagaacatacttttcagaaaaagtatatactaagaatatgcgtaattaccattgcgaatgtgcagagcacatactgagtatatactacattacagtacttaaacgttctatgtatatacttagaatgtactaccgcacttcttttcagtatatactaagaatatactttttagaacattccaaggacgtgctataaaccttctatgtgtatacttagaacatactaccgcacatctttttagtttataccaagaaggtactttttagaatattccaaggaagtgctataaaccttctatttatatacttagaacgtactaccgcacatctttgtatgggaagaatatatttttaagaatattctaagaaagtgctatcaagtgctatattgctcagaagtatgttttcagcatcacctaatctcatcttaggttctactggttctaccaaatacttattatatttacatattttaattgcaaatgagaatgtagttagtacctacattctacaatattacttaaaaagtaagtacatatttataaattttagtcatttatataaatcattatatatttagctaaactaaactattgcataagtaactaaaatttatataatacttatatgtacttacctattcaatgagttaccaaaatagattatattttatgtattttgaag

SEQ ID NO: 1846 - DNA, 979 bp, Diabrotica virgifera
gttttgtaagattagatatttcgtagaataggtcgattaattgctaaatcaatcaaagaatactgatcaaagagtctatattacgtaagatgtaaatttaaacaatgtagctatatagctgtttttttttgcttagcttgattttttatttattttttaactaatgtactccgatacataatctgttagataatatccattatgtccatttatgtctatgcctaaaatgtttcaatcaatttgttgtaaattatccgtcatcccacataacaatttcatgttcttagtagattcatagaacatacttttcagaaaaagtatatactaagaatatgcgtaattaccattgcgaatgtgcagagcacatactgagtatatactacattacagtacttaaacgttctatgtatatacttagaatgtactaccgcacttcttttcagtatatactaagaatatactttttagaacattccaaggacgtgctataaaccttctatgtgtatacttagaacatactaccgcacatctttttagtttataccaagaaggtactttttagaatattccaaggaagtgctataaaccttctatttatatacttagaacgtactaccgcacatctttgtatgggaagaatatatttttaagaatattctaagaaagtgctatcaagtgctatattgctcagaagtatgttttcagcatcacctaatctcatcttaggttctactggttctaccaaatacttattatatttacatattttaattgcaaatgagaatgtagttagtacctacattctacaatattacttaaaaagtaagtacatatttataaattttagtcatttatataaatcattatatatttagctaaactaaactattgcataagtaactaaaatttatataatacttatatgtacttacctattcaatgagttaccaaaatagattatattttatgtattttgaag

SEQ ID NO: 1847 - DNA, 557 bp, Diabrotica virgifera
caaaatatttttattttgtaataaataattttctcatttgttatcaatacattataatggtgtaaataaaaaattattgattggcgtaaggtttatgttatttatgtctgtttactattaataatattggctatgagcaggtatgtttggttgtgtagtaatttccagtcacgtctagcaacctaacttcccaaaaaaaattaccaacgtcactagacagttgtgtctcagatccactatatgcttatttcaataatatacttttttttaatttgagatagcaaaaaaatctaaccagattgagcaaaatgagttatatttttaaattcaaaaggaatgtaaccgagaaggcgtggacgaagatcgcaaaagaagtaaatgatacaggtaagaaaaaatgtattttttaacacagtaaaaaatctatatttccttattataaatatataaaatttatgcatatttccattgaaatattgatcattgtggcattagaaagtagatagctagagattttcgtggtttcattaccattgtcgttaagcgatatccatccc

SEQ ID NO: 1848 - DNA, 1970 bp, Diabrotica virgifera
attcaaggaatgtttaaaatgctgacaggactttcctgggacatttaggggacatttactgaaatattttcgctcaacacaagatttgtcatgatttgtgtttttgtaagattgatttttagtataacttgtagggaggctaggtatagtttctccagttgcgatactgcatcatcgatgctgtcagcaaaaagaacaatatcgtcaacgaacctcaagcgactaagtatttctccgttgacattcattcctttttcattcagatttgcgttcttgcaaatgctctattaatgttgtaagcacttacttgtaatacttgttgtagatctgtcgatctgttaattccgacgttgaagtatttcttgagaggtagactgccagctatctctccatctttttggtggtctccccggtggacgcttgcctgctggttttccttctagagcaattcttggtagtctgtgctcctccattctttttacatgactgaaccattctcttcgtctttgcctgccccatctgactacatcttgcacgccacattgttccctgatgatgttgtttcgtattctatctcttcttgtcttccctgctattgctcttagtgtcttcatttcggctgttcgtagcatgcttttggttttattggtgtcttcatttgattcaatgccataggtcataacaggtctgatgcaagttttataaattctaactttgctgtccattctcatatatgggttattccagaccacatctctcaaacatccggacaagacagcggccttgttgtaaacaatgttgtaaacaattttggtgaaattgtgtctccctgtcgcactccccgttttattttagaagcatttattttaaatgcttcttcttcttcgtgcgactaggattactcctgtttgtctgcctcttattctgtttcagttgttgttgactgtacattgtctttccaccttttcggcggccttccaacgggtcttctgctatacggcttgttgtttttacagatgttcgctaatctatctggttccattcggtttacatgttcgttccagtttttctttcttgtttttatccacctgttaatattttgaattttgcatcgttctcgtatacttttgttactttgtctgtctcttaatgatatgcccgctattgatcttaatactttcatttcaatattgttgatcattccattgtaatggtgtaaataaataattattattgattgccgtaaggtttatcttatttatgtctgtttactattaataatattggctatgagcaggtatgtttggttgtgtagtaatttccagtcacgtctagcaacctaacttcccaaaaaaaattaccaacgtcactagacagttgtgtctcagattagcgaatcaactttactaaattattttaatatacttttttaacttaaaataacgtaacgtaaagtaaaaatatatacgtagatgataatgtaatgatttataatttataatgtaaacaatgtaaataaatatatattggcagatatcctcaaatctataaatgcacttacttaaaacggtgtattaaaaccacttttaccactaatattcaaattaaatataattttatttaaatatattatttttttcacactgtttattttcaatatgtaagtaaatgaaagattaagcaactaacttcagactgttgcttatttctgtaggtgtgcgcgcgcatcgcgaaaattcactcttcaacagttttcccaatcgcacctaaagaagtatacctaactgaaaaaaatttagtaaacgatgattccaaaaatgcaaaccatttttgttagtaaatatttttgagcaggggcttctaaatacttggcatcaagttattttagaagaccttgatctcaatcctattacaaagtcatttgtatttgaatggcgtccttccatttttgagatttaactagcatactg

SEQ ID NO: 1849 - DNA, 1880 bp, Diabrotica virgifera
caagaccatcgtcacattcgtttgaatcatctctatgtagtggaaacgttacaggatgttgggatgttgtctggagtttatggagactgacggagttgtaaccttgtgtttttccaaaaagtcttgcaccaggtttgatgaatgtgctggcgcattatcgttatgaagaaaactttatctcaaaaatgtggtcggctttttttagaacttcttcttcttatacttgttgttgtagatctgtcgatctgttaattccgacgttgaagtatttcttgagaggtagactgccagctatctctccatctttttggtggtctccccggtggacgcttgcctgctggttttccttctagagcaattcttggtagtctgtgctcctccattctttttacatgactgaaccattctcttcgtctttgcctgccccatctgactacatcttgcacgccacattgttccctgatgatgttgtttcgtattctatctcttcttgtcttccctgctattgctcttagtgtcttcatttcggctgttcgtagcatgcttttggttttattggtgtcttcatttgattcaatgccataggtcataacaggtctgatgcaagttttataaattctaactttgctgtccattctcatatatgggttattccagaccacatctctcaaacatccggacaagacagcggccttgttgtaaacaatgttgtaaacaattttggtgaaattgtgtctccctgtcgcactccccgttttattttagaagcatttattttaaatgcttcttcttcttcgtgcgactaggattactcctgtttgtctgcctcttattctgtttcagttgttgttgactgtacattgtctttccaccttttcggcggccttccaacgggtcttctgctatacggcttgttgtttttacagatgttcgctaatctatctggttccattcggtttacatgttcgttccagtttttctttcttgtttttatccacctgttaatattttgaattttgcatcgttctcgtatacttttgttactttgtctgtctcttaatgatatgcccgctattgatcttaatactttcatttcaatattgttgatcattccattgtaatggtgtaaataaataattattattgattgccgtaaggtttatcttatttatgtctgtttactattaataatattggctatgagcaggtatgtttggttgtgtagtaatttccagtcacgtctagcaacctaacttcccaaaaaaaattaccaacgtcactagacagttgtgtctcagattagcgaatcaactttactaaattattttaatatacttttttaacttaaaataacgtaacgtaaagtaaaaatatatacgtagatgataatgtaatgatttataatttataatgtaaacaatgtaaataaatatatattggcagatatcctcaaatctataaatgcacttacttaaaacggtgtattaaaaccacttttaccactaatattcaaattaaatataattttatttaaatatattatttttttcacactgtttattttcaatatgtaagtaaatgaaagattaagcaactaacttcagactgttgcttatttctgtaggtgtgcgcgcgcatcgcgaaaattcactcttcaacagttttcccaatcgcacctaaagaagtatacctaactgaaaaaaatttagtaaacgatgattccaaaaatgcaaaccatttttgttagtaaatatttttgagcaggggcttctaaatacttggcatcaagttattttagaagaccttgatctcaatcctattacaaagtcatttgtatttgaatggcgtccttccatttttgagatttaactagcatactg

SEQ ID NO: 1850 - DNA, 1714 bp, Diabrotica virgifera
attcaaggaatgtttaaaatgctgacaggactttcctgggacatttaggggacatttactgaaatattttcgctcaacacaagatttgtcatgatttgtgtttttgtaagattgatttttagtataacttgtagggaggctaggtatagtttctccagttgcgatactgcatcatcgatgctgtcagcaaaaagaacaatatcgtcaacgaacctcaagcgactaagtatttctccgttgacattcattcctttttcattcagatttgcgttcttgcaaatgctctattaatgttgtaagcacttacttgtaatacttgttgtagatctgtcgatctgttaattccgacgttgaagtatttcttgagaggtagactgccagctatctctccatctttttggtggtctccccggtggacgcttgcctgctggttttccttctagagcaattcttggtagtctgtgctcctccattctttttacatgactgaaccattctcttcgtctttgcctgccccatctgactacatcttgcacgccacattgttccctgatgatgttgtttcgtattctatctcttcttgtcttccctgctattgctcttagtgtcttcatttcggctgttcgtagcatgcttttggttttattggtgtcttcatttgattcaatgccataggtcataacaggtctgatgcaagttttataaattctaactttgctgtccattctcatatatgggttattccagaccacatctctcaaacatccggacaagacagcggccttgttgtaaacaatgttgtaaacaattttggtgaaattgtgtctccctgtcgcactccccgttttattttagaagcatttattttaaatgcttcttcttcttcgtgcgactaggattactcctgtttgtctgcctcttattctgtttcagttgttgttgactgtacattgtctttccaccttttcggcggccttccaacgggtcttctgctatacggcttgttgtttttacagatgttcgctaatctatctggttccattcggtttacatgttcgttccagtttttctttcttgtttttatccacctgttaatattttgaattttgcatcgttctcgtatacttttgttactttgtctgtctcttaatgatatgcccgctattgatcttaatactttcatttcaatattgttgatcattccattgtaatggtgtaaataaataattattattgattgccgtaaggtttatcttatttatgtctgtttactattaataatattggctatgagcaggtatgtttggttgtgtagtaatttccagtcacgtctagcaacctaacttcccaaaaaaaattaccaacgtcactagacagttgtgtctcagatccactatatgcttatttcaataatatacttttttttaatttgagatagcaaaaaaatctaaccagattgagcaaaatgagttatatttttaaattcaaaaggaatgtaaccgagaaggcgtggacgaagatcgcaaaagaagtaaatgatacaggtaagaaaaaatgtattttttaacacagtaaaaaatctatatttccttattataaatatataaaatttatgcatatttccattgaaatattgatcattgtggcattagaaagtagatagctagagattttcgtggtttcattaccattgtcgttaagcgatatccatccc

SEQ ID NO: 1851 - DNA, 1624 bp, Diabrotica virgifera
caagaccatcgtcacattcgtttgaatcatctctatgtagtggaaacgttacaggatgttgggatgttgtctggagtttatggagactgacggagttgtaaccttgtgtttttccaaaaagtcttgcaccaggtttgatgaatgtgctggcgcattatcgttatgaagaaaactttatctcaaaaatgtggtcggctttttttagaacttcttcttcttatacttgttgttgtagatctgtcgatctgttaattccgacgttgaagtatttcttgagaggtagactgccagctatctctccatctttttggtggtctccccggtggacgcttgcctgctggttttccttctagagcaattcttggtagtctgtgctcctccattctttttacatgactgaaccattctcttcgtctttgcctgccccatctgactacatcttgcacgccacattgttccctgatgatgttgtttcgtattctatctcttcttgtcttccctgctattgctcttagtgtcttcatttcggctgttcgtagcatgcttttggttttattggtgtcttcatttgattcaatgccataggtcataacaggtctgatgcaagttttataaattctaactttgctgtccattctcatatatgggttattccagaccacatctctcaaacatccggacaagacagcggccttgttgtaaacaatgttgtaaacaattttggtgaaattgtgtctccctgtcgcactccccgttttattttagaagcatttattttaaatgcttcttcttcttcgtgcgactaggattactcctgtttgtctgcctcttattctgtttcagttgttgttgactgtacattgtctttccaccttttcggcggccttccaacgggtcttctgctatacggcttgttgtttttacagatgttcgctaatctatctggttccattcggtttacatgttcgttccagtttttctttcttgtttttatccacctgttaatattttgaattttgcatcgttctcgtatacttttgttactttgtctgtctcttaatgatatgcccgctattgatcttaatactttcatttcaatattgttgatcattccattgtaatggtgtaaataaataattattattgattgccgtaaggtttatcttatttatgtctgtttactattaataatattggctatgagcaggtatgtttggttgtgtagtaatttccagtcacgtctagcaacctaacttcccaaaaaaaattaccaacgtcactagacagttgtgtctcagatccactatatgcttatttcaataatatacttttttttaatttgagatagcaaaaaaatctaaccagattgagcaaaatgagttatatttttaaattcaaaaggaatgtaaccgagaaggcgtggacgaagatcgcaaaagaagtaaatgatacaggtaagaaaaaatgtattttttaacacagtaaaaaatctatatttccttattataaatatataaaatttatgcatatttccattgaaatattgatcattgtggcattagaaagtagatagctagagattttcgtggtttcattaccattgtcgttaagcgatatccatccc

SEQ ID NO: 1852 - DNA, 1442 bp, Diabrotica virgifera
  SmartBlast Evalue=2E-11; Info=Endonuclease-reverse transcriptase n=1 Tax=Bombyx mori RepID=D7F165_BOMMO
attcaaggaatgtttaaaatgctgacaggactttcctgggacatttaggggacatttactgaaatattttcgctcaacacaagatttgtcatgatttgtgtttttgtaagattgatttttagtataacttgtagggaggctaggtatagtttctccagttgcgatactgcatcatcgatgctgtcagcaaaaagaacaatatcgtcaacgaacctcaagcgactaagtatttctccgttgacattcattcctttttcattcagatttgcgttcttgcaaatgctctattaatgttgtaagcacttacttgtaatacttgttgtagatctgtcgatctgttaattccgacgttgaagtatttcttgagaggtagactgccagctatctctccatctttttggtggtctccccggtggacgcttgcctgctggttttccttctagagcaattcttggtagtctgtgctcctccattctttttacatgactgaaccattctcttcgtctttgcctgccccatctgactacatcttgcacgccacattgttccctgatgatgttgtttcgtattctatctcttcttgtcttccctgctattgctcttagtgtcttcatttcggctgttcgtagcatgcttttggttttattggtgtcttcatttgattcaatgccataggtcataacaggtctgatgcaagttttataaattctaactttgctgtccattctcatatatgggttattccagaccacatctctcaaacatccggacaagacagcggccttgttaatttgtcctcttaggtctctggctgggtcatgataacttgataagtctacacctagatatttgaactggtttagctgttctatgggtttcccctctaccacgagcttgcatctaattgggtctttcgcaatggtaatgcattttgttttctgcgtggatatgttcatgttgagtcgtcgacatgcttgatagaatcgataaagttgtctttgtaggtcatcctcgtcctctgcaatcagggctgcatcatccgcatagcacactatactgattctactgtgaccgagtctgtatcctagttgtagcgattccacattttctattatttcatccattagcatattgaatagaaatggactgaggctgtcttcctgcctgattttccctggtgttggtatgtttgccgtagtggtgtcgtttgttttaatttttatcgagttgttattgttcatttattttatgacttcaacaatgtttgccagtatcctttttgattcattttctgtaacatattgccaagtctgactatgtcaaatgctttcgttaggtcttcttcttcttaaagttccatctcctatcggaggttggatatcataatggctatggtcactttgttggctgctgctctgaacagttgtaatgaactacgagtt

SEQ ID NO: 1853 - DNA, 1352 bp, Diabrotica virgifera
  SmartBlast Evalue=2E-11; Info=Endonuclease-reverse transcriptase n=1 Tax=Bombyx mori RepID=D7F165_BOMMO
caagaccatcgtcacattcgtttgaatcatctctatgtagtggaaacgttacaggatgttgggatgttgtctggagtttatggagactgacggagttgtaaccttgtgtttttccaaaaagtcttgcaccaggtttgatgaatgtgctggcgcattatcgttatgaagaaaactttatctcaaaaatgtggtcggctttttttagaacttcttcttcttatacttgttgttgtagatctgtcgatctgttaattccgacgttgaagtatttcttgagaggtagactgccagctatctctccatctttttggtggtctccccggtggacgcttgcctgctggttttccttctagagcaattcttggtagtctgtgctcctccattctttttacatgactgaaccattctcttcgtctttgcctgccccatctgactacatcttgcacgccacattgttccctgatgatgttgtttcgtattctatctcttcttgtcttccctgctattgctcttagtgtcttcatttcggctgttcgtagcatgcttttggttttattggtgtcttcatttgattcaatgccataggtcataacaggtctgatgcaagttttataaattctaactttgctgtccattctcatatatgggttattccagaccacatctctcaaacatccggacaagacagcggccttgttaatttgtcctcttaggtctctggctgggtcatgataacttgataagtctacacctagatatttgaactggtttagctgttctatgggtttcccctctaccacgagcttgcatctaattgggtctttcgcaatggtaatgcattttgttttctgcgtggatatgttcatgttgagtcgtcgacatgcttgatagaatcgataaagttgtctttgtaggtcatcctcgtcctctgcaatcagggctgcatcatccgcatagcacactatactgattctactgtgaccgagtctgtatcctagttgtagcgattccacattttctattatttcatccattagcatattgaatagaaatggactgaggctgtcttcctgcctgattttccctggtgttggtatgtttgccgtagtggtgtcgtttgttttaatttttatcgagttgttattgttcatttattttatgacttcaacaatgtttgccagtatcctttttgattcattttctgtaacatattgccaagtctgactatgtcaaatgctttcgttaggtcttcttcttcttaaagttccatctcctatcggaggttggatatcataatggctatggtcactttgttggctgctgctctgaacagttgtaatgaactacgagtt

SEQ ID NO: 1854 - DNA, 950 bp, Diabrotica virgifera
attcaaggaatgtttaaaatgctgacaggactttcctgggacatttaggggacatttactgaaatattttcgctcaacacaagatttgtcatgatttgtgtttttgtaagattgatttttagtataacttgtagggaggctaggtatagtttctccagttgcgatactgcatcatcgatgctgtcagcaaaaagaacaatatcgtcaacgaacctcaagcgactaagtatttctccgttgacattcattcctttttcattcagatttgcgttcttgcaaatgctctattaatgttgtaagcacttacttgtaatacttgttgtagatctgtcgatctgttaattccgacgttgaagtatttcttgagaggtagactgccagctatctctccatctttttggtggtctccccggtggacgcttgcctgctggttttccttctagagcaattcttggtagtctgtgctcctccattctttttacatgactgaaccattctcttcgtctttgcctgccccatctgactacatcttgcacgccacattgttccctgatgatgttgtttcgtattctatctcttcttgtcttccctgctattgctcttagtgtcttcatttcgctgttcgtagcatgcttttggttttattggtgtcttcatttgattcaatgccataggtcataacaggtctgatgcaagttttataaattctaactttgctgtccattctcatatatgggttattccagaccacatctctcaaacatccggacaagacagcggccttgttaatttgtcctcttaggtctctggctgggtcatgataacttgataactctacgcctagatatttgaactggtttagctgttctatgggtttcccctccctctaccactagcttgcatgatgaaatctatatttagtaatattgtaacaatgcattatttaatag

SEQ ID NO: 1855 - DNA, 860 bp, Diabrotica virgifera
caagaccatcgtcacattcgtttgaatcatctctatgtagtggaaacgttacaggatgttgggatgttgtctggagtttatggagactgacggagttgtaaccttgtgtttttccaaaaagtcttgcaccaggtttgatgaatgtgctggcgcattatcgttatgaagaaaactttatctcaaaaatgtggtcggctttttttagaacttcttcttcttatacttgttgttgtagatctgtcgatctgttaattccgacgttgaagtatttcttgagaggtagactgccagctatctctccatctttttggtggtctccccggtggacgcttgcctgctggttttccttctagagcaattcttggtagtctgtgctcctccattctttttacatgactgaaccattctcttcgtctttgcctgccccatctgactacatcttgcacgccacattgttccctgatgatgttgtttcgtattctatctcttcttgtcttccctgctattgctcttagtgtcttcatttcgctgttcgtagcatgcttttggttttattggtgtcttcatttgattcaatgccataggtcataacaggtctgatgcaagttttataaattctaactttgctgtccattctcatatatgggttattccagaccacatctctcaaacatccggacaagacagcggccttgttaatttgtcctcttaggtctctggctgggtcatgataacttgataactctacgcctagatatttgaactggtttagctgttctatgggtttcccctccctctaccactagcttgcatgatgaaatctatatttagtaatattgtaacaatgcattatttaatag

SEQ ID NO: 1856 - DNA, 813 bp, Diabrotica virgifera
caaaatatttttattttgtaataaataattttctcatttgttatcaatacattataatggtgtaaataaaaaattattgattggcgtaaggtttatgttatttatgtctgtttactattaataatattggctatgagcaggtatgtttggttgtgtagtaatttccagtcacgtctagcaacctaacttcccaaaaaaaattaccaacgtcactagacagttgtgtctcagattagcgaatcaactttactaaattattttaatatacttttttaacttaaaataacgtaacgtaaagtaaaaatatatacgtagatgataatgtaatgatttataatttataatgtaaacaatgtaaataaatatatattggcagatatcctcaaatctataaatgcacttacttaaaacggtgtattaaaaccacttttaccactaatattcaaattaaatataattttatttaaatatattatttttttcacactgtttattttcaatatgtaagtaaatgaaagattaagcaactaacttcagactgttgcttatttctgtaggtgtgcgcgcgcatcgcgaaaattcactcttcaacagttttcccaatcgcacctaaagaagtatacctaactgaaaaaaatttagtaaacgatgattccaaaaatgcaaaccatttttgttagtaaatatttttgagcaggggcttctaaatacttggcatcaagttattttagaagaccttgatctcaatcctattacaaagtcatttgtatttgaatggcgtccttccatttttgagatttaactagcatactg

SEQ ID NO: 1857 - DNA, 5509 bp, Diabrotica virgifera
  SmartBlast Evalue=1E-114; Info="Beta-1,3-Galactosyltransferase n=1 Tax=Culex quinquefasciatus RepID=B0W718_CULQU"
gttttgactattaacgcccaagtattaatttgcaacggtaccgtgaaaaaagttttgatggtttcattcatgcgggaaagaagcactttttgtttgattgccggtgttgtagtgggttttacggtagcttttatagtcctagcgcctagtactatctacaaagacaacctaaaacatttgagacaggtaatccatagtcatggacatagcgatggacatcatcacgatttccacaacgaagatgaaatggatgatgttgacgttgtaggggaggtaggggaacacggagaaaatgacacgttccacctaatgacagattcgtccctagcagaatctcttaagaaaaaggttagagtattatgttgggttatgactggaccagacaaccatgagaaaaaagcaaaacatgtcaaggcaacatggggaaagagatgtaacactttattattcatgagttcaaaagcagatccaaatctaccagcaataccattgaacgtaagtgaaggaagaaataatctctgggctaagaccaaagctgcttttaaatatgtttacgataatcacataaatgaccatgattggtttatgaaagcggacgatgatacgtatgtgatagtggaaaatctgcggtatatgttgctaccattaagtcccgatacaccaatttactatggttgccgatttaagccgtacgtttcacaaggatacatgagtgggggagcaggttatatactaagtagagaagcgttaaaacgatttgttgagaaagcgctgccagacaaagggaagtgtagacaagataatgaaggcgcagaagatgtagaaatgggaaaatgtttatcagcagtagacgtggccgcaggtgatggtcgagatcccgagctcagaggaagattttttccttttgcccccagccatcacttaattcctggacatgtcgataaaaatttttggtactggaaatatatttattataatgaaactcagggaatggattgttgttccgataacgctgtatctttccattacatcgagcctagtatgatgtacgccatggaatatatgatatatcatttgcgaccatttggaattgcctataagccagcattaccagaaaatcttgacacgataaatagagatactgccgattgataaaatttaacagaatattaggcattattaaggcaggttactgttaataagatacccagataattctgcaactgtacaagtgtcaaaagaagaaatataaaaaataaattaaattcttaaaataatttaataccttataatagtggttaaacatggccagcaagcttacaatttatgataatattccaaagtctctctatcattgactttcctttcctatgtctactttttgataaatttttgcaattgaatgaagtttgttggttaagatttcgtatactaccttttcttagatttctggtacaagtagacgaatttctttcagttttatgaattattatttttacatttttcccactatcatcatcatcatcatcaatcagccaatcgcgtccactgctggacataggcctccctcagccttttccagtgttctctcactgggcgcttgtagccagttttccactactctttttatattgtcggttcatttagtcggtagtcttctttggcttcttttgtagtttctgggcttccattccatgattcgtcttgtccactgtccatcttgtgttctagctaggtgccctgcccagttccacttaagcgtcgtagctctttcgatgatgtcttgaactcctgatatttgcctgatttgttggtttgttatgtggtctcgaaggctcacgttcagcattgcacgttccatggctcgttgtgtaactcttagtttatttgcggatttttgcgttagtgttaaagtctatgctccataaatttgtcaattgtacaggcaaaatacattggttataaacctttcgcttgagacgcataaaaattgaactttttagaatatggcttagtttgccaaatgctgcccatatcaggcctattcgcctctgtattcttcgtgtttttgattgtctgtgcttattttgatctcgtctcccagatatttgtgtctgtttgttatattatagtattattgtcaatagatgagaagttattggtttaacgaccactcgtacgatatcaatcaaatggattgataaggggatctctccacattctctatttcattttattgtcaatagttatgtttccaatcattaccagatttgtcataagtttagttttctcagtttatttttaatcctgctttctcagacagagttttcagcgaatgtatcatggaaactgtatcttgcaagttatctaagattaatgcatcatccgcaagcctcagatgatttaatctttctccattgatctctctttctctattgatgcctatatatcttgccttgagtattcttaaatattgactctagaattaaagctaccttgaacaattttggtgaaatattgtctccttttttcccactatagtacaaatcaaaattgaacattgtattaaatggttatttgaatccgaatattcaatatgtgcataattgcactgcaaataagtttcgattttgcacagtatttaaataatttacaaactttggtttgatgcaataaacaagtagtgactcgtttattgtgaatttaattctctattgagttgtcgatacatgtaactgtttggctcttcttccaccaccgcaacgtaactacaactcgactgcaatgcaactcatcatcatcatcaatggcgttacaactcttcgttagtctttgccgcgtttacaattgccttccatatttgtcggtcctgtgccactatttcccattgtctcaatcccattttctccagatcttctttgacttcatctttccaccgttttataggccgtactacagacgttcttccatctggcccttctcagaacacatagtttataaggcgattgtcgttactgcgtatcacaagccctgcccatctgagtatattggtctttatatatctgactagattttcctttccgaatagagactctaactcgttaatgtatcttcgcctccattcctttgtcacgctgtctccgcaaagaccatatattattattcgaagaattttacgtgcccacactagcaatttatttacttctcttttttagcgtccatgtttcgcttccatacgcgactgctggtcgtattatagtcttatatatctggattttttacctcgtgaaacaagttttgacttcatgactgacaagccagttgaatcgcgatgagttgcgtgtcaattcgttttaggccgcgtttcagttgcgttggtgagaggactttgtgctaaaagcgcgtgtccgactcctagttgactgtatggcaattataacgtgactatatatgcagtagacttgcaatagggaacttgcacatttttttattacataataatgttcagttttgtataaaaatgagatttccaaaatttcgcgcttcaaaaactcataatagcttagaagtacaaatttaaagtcttcggtatcttaaaatagttcaaacgacccgtgacgtcacagagtttaactatatggttccgtttatggttatatttaggaatattcttcttcttcttctttagtttattggcctccacctacttgggtatttgtccagctcgtcgtcgaggaataaaggaaaaatatttacattctaatgacgtttatcgtatgtcattgtaataaatatataccagtttgttaaaattggagtttgatacagtttttgaagtaaatgaaagaaggtttactattgaaaataaaaccattttgtaaaagtacaagttttctatgaatagttcaaacgatcaaaaacacttgtaacgtcaaataactgtattttctactgacgtttataatgtctaatttaaaattatgctttttctcatgagcatctttcagtgtgccacagtttttcgatttcattctaacgcattaaattgtatgtgacagaaaaaaacgcacgtcggtgattacatttcatcggtgacatttataacatttattctagttgtcaatagatggcgctataataaaaaaaaattatttacgaattatgtaatattatatctacgaatataatctgtacaatttataaaagactatacaaatcaaagaaaataccattttataaatgcaataaacacaattgatttgtttttatgccaaattgcaaataaaatgtgacaactgtcagatttaactaaaatgtcatgtcactataatgtatattatcacggacttacctttttttctatcatttgtgacgcactgaaaaatgctcatgaaaagaagcgtatacatacgattggtgtagaatgtaaacatacaaccccgtgacgtcacgacgcgtttttggctggctggtataagttgaatttttagtcgtctttaggggccaaacgaaagacaaacaaaacttttttatctttgatacatgttctaaattatgttctgttatgatttatactattttttcgaatttaaaattttatgcaagttccttattgacttgcgacggtaaacgacgagccttagggcgaatgtggctttcctctgaaaactatacattttttaagaaatcagcatcttattcaaaccatgacaaatactgtccatgcagttgcataagcatctcaagatgtatgtatgtataagatgtttattgctaaaattatagtttcgtatcagactggtataaaaagtacttagataaatacaaaggctgttatactttagcgtattgaatgtaaacatctatggatgtatgcatgcatgaattacgagtgtatgtatgtatcacatctttcaaaagttgtgcatcacctaaaagtatgctcattttcatagttgattgtttcatgaacacctttttttagatttttgtttggtatttatatagtttgggtaaaggtttactcaaacctcttttttgtactcatgccgggtggaagaaaataaatatttttcgtatgttaagcttgagacaccctgtatgaaagacatggtacaagacggtacaagtgtaagtatacatcgaaatcctattgcagtcttatcttttgtgaacattttgtttgatgactgtccctgatatctttagaaacaaagaaaatagacggttttattttttaacatgtgttttaaccgaaacaaaagtttgagaaaccctgtagagaggaaaaggtatggtaaaataaaaaaaaacttagcggaatccgttaatctgtttaagaaagaatcaactatgaaagtgagcatgattttggctgatgcataacttttgaatataatgtgtattattatgtatatagtgtagatatcaaactaaatgttacagaagaattgtattttattgtatcgcagtgattttttaaaaaagaataaagcgattcttgttacaa

SEQ ID NO: 1858 - DNA, 4703 bp, Diabrotica virgifera
  SmartBlast Evalue=1E-114; Info="Beta-1,3-Galactosyltransferase n=1 Tax=Culex quinquefasciatus RepID=B0W718_CULQU"
gttttgactattaacgcccaagtattaatttgcaacggtaccgtgaaaaaagttttgatggtttcattcatgcgggaaagaagcactttttgtttgattgccggtgttgtagtgggttttacggtagcttttatagtcctagcgcctagtactatctacaaagacaacctaaaacatttgagacaggtaatccatagtcatggacatagcgatggacatcatcacgatttccacaacgaagatgaaatggatgatgttgacgttgtaggggaggtaggggaacacggagaaaatgacacgttccacctaatgacagattcgtccctagcagaatctcttaagaaaaaggttagagtattatgttgggttatgactggaccagacaaccatgagaaaaaagcaaaacatgtcaaggcaacatggggaaagagatgtaacactttattattcatgagttcaaaagcagatccaaatctaccagcaataccattgaacgtaagtgaaggaagaaataatctctgggctaagaccaaagctgcttttaaatatgtttacgataatcacataaatgaccatgattggtttatgaaagcggacgatgatacgtatgtgatagtggaaaatctgcggtatatgttgctaccattaagtcccgatacaccaatttactatggttgccgatttaagccgtacgtttcacaaggatacatgagtgggggagcaggttatatactaagtagagaagcgttaaaacgatttgttgagaaagcgctgccagacaaagggaagtgtagacaagataatgaaggcgcagaagatgtagaaatgggaaaatgtttatcagcagtagacgtggccgcaggtgatggtcgagatcccgagctcagaggaagattttttccttttgcccccagccatcacttaattcctggacatgtcgataaaaatttttggtactggaaatatatttattataatgaaactcagggaatggattgttgttccgataacgctgtatctttccattacatcgagcctagtatgatgtacgccatggaatatatgatatatcatttgcgaccatttggaattgcctataagccagcattaccagaaaatcttgacacgataaatagagatactgccgattgataaaatttaacagaatattaggcattattaaggcaggttactgttaataagatacccagataattctgcaactgtacaagtgtcaaaagaagaaatataaaaaataaattaaattcttaaaataatttaataccttataatagtggttaaacatggccagcaagcttacaatttatgataatattccaaagtctctctatcattgactttcctttcctatgtctactttttgataaatttttgcaattgaatgaagtttgttggttaagatttcgtatactaccttttcttagatttctggtacaagtagacgaatttctttcagttttatgaattattatttttacatttttcccactatcatcatcatcatcatcaatcagccaatcgcgtccactgctggacataggcctccctcagccttttccagtgttctctcactgggcgcttgtagccagttttccactactctttttatattgtcggttcatttagtcggtagtcttctttggcttcttttgtagtttctgggcttccattccatgattcgtcttgtccactgtccatcttgtgttctagctaggtgccctgcccagttccacttaagcgtcgtagctctttcgatgatgtcttgaactcctgatatttgcctgatttgttggtttgttatgtggtctcgaaggctcacgttcagcattgcacgttccatggctcgttgtgtaactcttagtttatttgcggatttttgcgttagtgttaaagtctatgctccataaatttgtcaattgtacaggcaaaatacattggttataaacctttcgcttgagacgcataaaaattgaactttttagaatatggcttagtttgccaaatgctgcccatatcaggcctattcgcctctgtattcttcgtgtttttgattgtctgtgcttattttgatctcgtctcccagatatttgtgtctgtttgttatattatagtattattgtcaatagatgagaagttattggtttaacgaccactcgtacgatatcaatcaaatggattgataaggggatctctccacattctctatttcattttattgtcaatagttatgtttccaatcattaccagatttgtcataagtttagttttctcagtttatttttaatcctgctttctcagacagagttttcagcgaatgtatcatggaaactgtatcttgcaagttatctaagattaatgcatcatccgcaagcctcagatgatttaatctttctccattgatctctctttctctattgatgcctatatatcttgccttgagtattcttaaatattgactctagaattaaagctaccttgaacaattttggtgaaatattgtctccttttttcccactatagtacaaatcaaaattgaacattgtattaaatggttatttgaatccgaatattcaatatgtgcataattgcactgcaaataagtttcgattttgcacagtatttaaataatttacaaactttggtttgatgcaataaacaagtagtgactcgtttattgtgaatttaattctctattgagttgtcgatacatgtaactgtttggctcttcttccaccaccgcaacgtaactacaactcgactgcaatgcaactcatcatcatcatcaatggcgttacaactcttcgttagtctttgccgcgtttacaattgccttccatatttgtcggtcctgtgccactatttcccattgtctcaatcccattttctccagatcttctttgacttcatctttccaccgttttataggccgtactacagacgttcttccatctggcccttctcagaacacatagtttataaggcgattgtcgttactgcgtatcacaagccctgcccatctgagtatattggtctttatatatctgactagattttcctttccgaatagagactctaactcgttaatgtatcttcgcctccattcctttgtcacgctgtctccgcaaagaccatatattattattcgaagaattttacgtgcccacactagcaatttatttacttctcttttttagcgtccatgtttcgcttccatacgcgactgctggtcgtattatagtcttatatatctggattttttacctcgtgaaacaagttttgacttcatgactgacaagccagttgaatcgcgatgagttgcgtgtcaattcgttttaggccgcgtttcagttgcgttggtgagaggactttgtgctaaaagcgcgtgtccgactcctagttgactgtatggcaattataacgtgactatatatgcagtagacttgcaatagggaacttgcacatttttttattacataataatgttcagttttgtataaaaatgagatttccaaaatttcgcgcttcaaaaactcataatagcttagaagtacaaatttaaagtcttcggtatcttaaaatagttcaaacgacccgtgacgtcacagagtttaactatatggttccgtttatggttatatttaggaatattcttcttcttcttctttagtttattggcctccacctacttgggtatttgtccagctcgtcgtcgaggaataaaggaaaaatatttacattctaatgacgtttatcgtatgtcattgtaataaatatataccagtttgttaaaattggagtttgatacagtttttgaagtaaatgaaagaaggtttactattgaaaataaaaccattttgtaaaagtacaagttttctatgaatagttcaaacgatcaaaaacacttgtaacgtcaaataactgtattttctactgacgtttataatgtctaatttaaaattatgctttttctcatgagcatctttcagtgtgccacagtttttcgatttcattctaacgcattaaattgtatgtgacagaaaaaaacgcacgtcggtgattacatttcatcggtgacatttataacatttattctagttgtcaatagatggcgctataataaaaaaaaattatttacgaattatgtaatattatatctacgaatataatctgtacaatttataaaagactatacaaatcaaagaaaataccattttataaatgcaataaacacaattgatttgtttttatgccaaattgcaaataaaatgtgacaactgtcagatttaactaaaatgtcatgtcactataatgtatattatcacggacttacctttttttctatcatttgtgacgcactgaaaaatgctcatgaaaagaagcgtatacatacgattggtgtagaatgtaaacatacaaccccgtgacgtcacgacgcgtttttggctggctggtataagttgaatttttagtcgtctttaggggccaaacgaaagacaaacaaaacttttttatctttgatacatgttctaaattatgttctgttatgatttatactattttttcgaatttaaaattttttgcaagttccctattatagaatgtaattttccttacaataaattgtggctaaaatcccatattataaagcattacctataaaacattactctaaaacgcacttt

SEQ ID NO: 1859 - DNA, 4091 bp, Diabrotica virgifera
  SmartBlast Evalue=1E-114; Info="Beta-1,3-Galactosyltransferase n=1 Tax=Culex quinquefasciatus RepID=B0W718_CULQU"
gttttgactattaacgcccaagtattaatttgcaacggtaccgtgaaaaaagttttgatggtttcattcatgcgggaaagaagcactttttgtttgattgccggtgttgtagtgggttttacggtagcttttatagtcctagcgcctagtactatctacaaagacaacctaaaacatttgagacaggtaatccatagtcatggacatagcgatggacatcatcacgatttccacaacgaagatgaaatggatgatgttgacgttgtaggggaggtaggggaacacggagaaaatgacacgttccacctaatgacagattcgtccctagcagaatctcttaagaaaaaggttagagtattatgttgggttatgactggaccagacaaccatgagaaaaaagcaaaacatgtcaaggcaacatggggaaagagatgtaacactttattattcatgagttcaaaagcagatccaaatctaccagcaataccattgaacgtaagtgaaggaagaaataatctctgggctaagaccaaagctgcttttaaatatgtttacgataatcacataaatgaccatgattggtttatgaaagcggacgatgatacgtatgtgatagtggaaaatctgcggtatatgttgctaccattaagtcccgatacaccaatttactatggttgccgatttaagccgtacgtttcacaaggatacatgagtgggggagcaggttatatactaagtagagaagcgttaaaacgatttgttgagaaagcgctgccagacaaagggaagtgtagacaagataatgaaggcgcagaagatgtagaaatgggaaaatgtttatcagcagtagacgtggccgcaggtgatggtcgagatcccgagctcagaggaagattttttccttttgcccccagccatcacttaattcctggacatgtcgataaaaatttttggtactggaaatatatttattataatgaaactcagggaatggattgttgttccgataacgctgtatctttccattacatcgagcctagtatgatgtacgccatggaatatatgatatatcatttgcgaccatttggaattgcctataagccagcattaccagaaaatcttgacacgataaatagagatactgccgattgataaaatttaacagaatattaggcattattaaggcaggttactgttaataagatacccagataattctgcaactgtacaagtgtcaaaagaagaaatataaaaaataaattaaattcttaaaataatttaataccttataatagtggttaaacatggccagcaagcttacaatttatgataatattccaaagtctctctatcattgactttcctttcctatgtctactttttgataaatttttgcaattgaatgaagtttgttggttaagatttcgtatactaccttttcttagatttctggtacaagtagacgaatttctttcagttttatgaattattatttttacatttttcccactatcatcatcatcatcatcaatcagccaatcgcgtccactgctggacataggcctccctcagccttttccagtgttctctcactgggcgcttgtagccagttttccactactctttttatattgtcggttcatttagtcggtagtcttctttggcttcttttgtagtttctgggcttccattccatgattcgtcttgtccactgtccatcttgtgttctagctaggtgccctgcccagttccacttaagcgtcgtagctctttcgatgatgtcttgaactcctgatatttgcctgatttgttggtttgttatgtggtctcgaaggctcacgttcagcattgcacgttccatggctcgttgtgtaactcttagtttatttgcggatttttgcgttagtgttaaagtctatgctccataaatttgtcaattgtacaggcaaaatacattggttataaacctttcgcttgagacgcataaaaattgaactttttagaatatggcttagtttgccaaatgctgcccatatcaggcctattcgcctctgtattcttcgtgtttttgattgtctgtgcttattttgatctcgtctcccagatatttgtgtctgtttgttatattatagtattattgtcaatagatgagaagttattggtttaacgaccactcgtacgatatcaatcaaatggattgataaggggatctctccacattctctatttcattttattgtcaatagttatgtttccaatcattaccagatttgtcataagtttagttttctcagtttatttttaatcctgctttctcagacagagttttcagcgaatgtatcatggaaactgtatcttgcaagttatctaagattaatgcatcatccgcaagcctcagatgatttaatctttctccattgatctctctttctctattgatgcctatatatcttgccttgagtattcttaaatattgactctagaattaaagctaccttgaacaattttggtgaaatattgtctccttttttcccactatagtacaaatcaaaattgaacattgtattaaatggttatttgaatccgaatattcaatatgtgcataattgcactgcaaataagtttcgattttgcacagtatttaaataatttacaaactttggtttgatgcaataaacaagtagtgactcgtttattgtgaatttaattctctattgagttgtcgatacatgtaactgtttggctcttcttccaccaccgcaacgtaactacaactcgactgcaatgcaactcatcatcatcatcaatggcgttacaactcttcgttagtctttgccgcgtttacaattgccttccatatttgtcggtcctgtgccactatttcccattgtctcaatcccattttctccagatcttctttgacttcatctttccaccgttttataggccgtactacagacgttcttccatctggcccttctcagaacacatagtttataaggcgattgtcgttactgcgtatcacaagccctgcccatctgagtatattggtctttatatatctgactagattttcctttccgaatagagactctaactcgttaatgtatcttcgcctccattcctttgtcacgctgtctccgcaaagaccatatattattattcgaagaattttacgtgcccacactagcaatttatttacttctcttttttagcgtccatgtttcgcttccatacgcgactgctggtcgtattatagtcttatatatctggattttttacctcgtgaaacaagttttgacttcatgactgacaagccagttgaatcgcgatgagttgcgtgtcaattcgttttaggccgcgtttcagttgcgttggtgagaggactttgtgctaaaagcgcgtgtccgactcctagttgactgtatggcaattataacgtgactatatatgcagtagacttgcaatagggaacttgcacatttttttattacataataatgttcagttttgtataaaaatgagatttccaaaatttcgcgcttcaaaaactcataatagcttagaagtacaaatttaaagtcttcggtatcttaaaatagttcaaacgacccgtgacgtcacagagtttaactatatggttccgtttatggttatatttaggtatattcttcttcttcttctttaatttattggcctccacctacttgggtatttggccagctcgtcgtcgcggaataaaggaaaaatatttatattctaatgacatttatcgtttgtcattgtaataatatataccagtgtgttgagattggagtttgatatagttattgaaggaaaggaaagaaggtttactatggaaaataaaaccattttgtaaaagtacacattttctatgaatagttcaaacgatcaaaaacacttgtaataacgtaacatagctgtattttctactgacgtttatgatgtcttatttaaaattatatacaattttgttttctttgttggtgcaaaatgtaaacacataaccggatgacgtcacgacgcgttttgggctggctggaatttgaatttttaatcgtctttagggg

SEQ ID NO: 1860 - DNA, 2208 bp, Diabrotica virgifera
tatatgtactatgtacaggttcttgttgatactctctaatagatgaatccgtttacagtacggactccataaatgtcaaatgcaagaataattgttttgtcatatcgttaaaatctgtttactgctgctaatatctgcaatcagcgatgttacactaagatcttaatagggaacttgctcatttttttattgcataataatattcagttttgtataaaaatgagatttccaaaatttcgcgcttcaaaaactcataatagcttagaagtacaaatttaaagtcttcggtatcttaaaatagttcaaacgacccgtgacgtcacagagtttaactatatggttccgtttatggttatatttaggaatattcttcttcttcttctttagtttattggcctccacctacttgggtatttgtccagctcgtcgtcgaggaataaaggaaaaatatttacattctaatgacgtttatcgtatgtcattgtaataaatatataccagtttgttaaaattggagtttgatacagtttttgaagtaaatgaaagaaggtttactattgaaaataaaaccattttgtaaaagtacaagttttctatgaatagttcaaacgatcaaaaacacttgtaacgtcaaataactgtattttctactgacgtttataatgtctaatttaaaattatgctttttctcatgagcatctttcagtgtgccacagtttttcgatttcattctaacgcattaaattgtatgtgacagaaaaaaacgcacgtcggtgattacatttcatcggtgacatttataacatttattctagttgtcaatagatggcgctataataaaaaaaaattatttacgaattatgtaatattatatctacgaatataatctgtacaatttataaaagactatacaaatcaaagaaaataccattttataaatgcaataaacacaattgatttgtttttatgccaaattgcaaataaaatgtgacaactgtcagatttaactaaaatgtcatgtcactataatgtatattatcacggacttacctttttttctatcatttgtgacgcactgaaaaatgctcatgaaaagaagcgtatacatacgattggtgtagaatgtaaacatacaaccccgtgacgtcacgacgcgtttttggctggctggtataagttgaatttttagtcgtctttaggggccaaacgaaagacaaacaaaacttttttatctttgatacatgttctaaattatgttctgttatgatttatactattttttcgaatttaaaattttatgcaagttccttattgacttgcgacggtaaacgacgagccttagggcgaatgtggctttcctctgaaaactatacattttttaagaaatcagcatcttattcaaaccatgacaaatactgtccatgcagttgcataagcatctcaagatgtatgtatgtataagatgtttattgctaaaattatagtttcgtatcagactggtataaaaagtacttagataaatacaaaggctgttatactttagcgtattgaatgtaaacatctatggatgtatgcatgcatgaattacgagtgtatgtatgtatcacatctttcaaaagttgtgcatcacctaaaagtatgctcattttcatagttgattgtttcatgaacacctttttttagatttttgtttggtatttatatagtttgggtaaaggtttactcaaacctcttttttgtactcatgccgggtggaagaaaataaatatttttcgtatgttaagcttgagacaccctgtatgaaagacatggtacaagacggtacaagtgtaagtatacatcgaaatcctattgcagtcttatcttttgtgaacattttgtttgatgactgtccctgatatctttagaaacaaagaaaatagacggttttattttttaacatgtgttttaaccgaaacaaaagtttgagaaaccctgtagagaggaaaaggtatggtaaaataaaaaaaaacttagcggaatccgttaatctgtttaagaaagaatcaactatgaaagtgagcatgattttggctgatgcataacttttgaatataatgtgtattattatgtatatagtgtagatatcaaactaaatgttacagaagaattgtattttattgtatcgcagtgattttttaaaaaagaataaagcgattcttgttacaa

SEQ ID NO: 1861 - DNA, 2047 bp, Diabrotica virgifera
  SmartBlast Evalue=1E-114; Info="Beta-1,3-Galactosyltransferase n=1 Tax=Culex quinquefasciatus RepID=B0W718_CULQU"
gttttgactattaacgcccaagtattaatttgcaacggtaccgtgaaaaaagttttgatggtttcattcatgcgggaaagaagcactttttgtttgattgccggtgttgtagtgggttttacggtagcttttatagtcctagcgcctagtactatctacaaagacaacctaaaacatttgagacaggtaatccatagtcatggacatagcgatggacatcatcacgatttccacaacgaagatgaaatggatgatgttgacgttgtaggggaggtaggggaacacggagaaaatgacacgttccacctaatgacagattcgtccctagcagaatctcttaagaaaaaggttagagtattatgttgggttatgactggaccagacaaccatgagaaaaaagcaaaacatgtcaaggcaacatggggaaagagatgtaacactttattattcatgagttcaaaagcagatccaaatctaccagcaataccattgaacgtaagtgaaggaagaaataatctctgggctaagaccaaagctgcttttaaatatgtttacgataatcacataaatgaccatgattggtttatgaaagcggacgatgatacgtatgtgatagtggaaaatctgcggtatatgttgctaccattaagtcccgatacaccaatttactatggttgccgatttaagccgtacgtttcacaaggatacatgagtgggggagcaggttatatactaagtagagaagcgttaaaacgatttgttgagaaagcgctgccagacaaagggaagtgtagacaagataatgaaggcgcagaagatgtagaaatgggaaaatgtttatcagcagtagacgtggccgcaggtgatggtcgagatcccgagctcagaggaagattttttccttttgcccccagccatcacttaattcctggacatgtcgataaaaatttttggtactggaaatatatttattataatgaaactcagggaatggattgttgttccgataacgctgtatctttccattacatcgagcctagtatgatgtacgccatggaatatatgatatatcatttgcgaccatttggaattgcctataagccagcattaccagaaaatcttgacacgataaatagagatactgccgattgataaaatttaacagaatattaggcattattaaggcaggttactgttaataagatacccagataattctgcaactgtacaagtgtcaaaagaagaaatataaaaaataaattaaattcttaaaataatttaataccttataatagtggttaaacatggccagcaagcttacaatttatgataatattccaaagtctctctatcattgactttcctttcctatgtctactttttgataaatttttgcaattgaatgaagtttgttggttaagatttcgtatactaccttttcttagatttctggtacaagtagacgaatttctttcagttttatgaattattatttttacatttttcccactatcatcatcatcatcatcaatcagccaatcgcgtccactgctggacataggcctccctcagccttttccagtgttctctcactgtgccgcttttagccagttttccgctactctttttatatcgtcggtccttttagtcggtggtcatcctcggcttcttttctaatttctgggcctccattccatgattcgtagtatccaccgtccatcttgtgttctagctaagtatcctgtccagttccactacgcgtcgtagttatttcgatgacgtcttgaactcctgatcgctgcctgatttgttggtttgttatgtgatctcgaaagctctcacgttcagcattgcacgttccattgctcgttgtgtaactctgagtttatttgcggatttttcgtaaatgtaaaagcctctgctctataagtttgtacatacaaaacacattggttataaacatttcgcttgagaaatatgggaattgaactttttagaatatggcttaatttgccaaatgctgcccatataaggcctattcgcctct

SEQ ID NO: 1862 - DNA, 1751 bp, Diabrotica virgifera
ctcgtcgtcgaggaataaaggaaaaatatttatattctaatgacgtttatcgtatgtcattgtaataaatatataccagtttgttaaaattggagtttgatacagtttttgaaggaaatgaaagaaggtttactattgaaaataaaaccattttgtaaaagtacaagttttctatgaatagttcaaacgatcaaaaacgtttataatgtctaatttaaaattatgctttttctcatgagcatctttcagtgtgccacagtttttcgatttcattctaacgcattaaattgtatgtgacagaaaaaaacgcacgtcggtgattacatttcatcggtgacatttataacatttattctagttgtcaatagatggcgctataataaaaaaaaattatttacgaattatgtaatattatatctacgaatataatctgtacaatttataaaagactatacaaatcaaagaaaataccattttataaatgcaataaacacaattgatttgtttttatgccaaattgcaaataaaatgtgacaactgtcagatttaactaaaatgtcatgtcactataatgtatattatcacggacttacctttttttctatcatttgtgacgcactgaaaaatgctcatgaaaagaagcgtatacatacgattggtgtagaatgtaaacatacaaccccgtgacgtcacgacgcgtttttggctggctggtataagttgaatttttagtcgtctttaggggccaaacgaaagacaaacaaaacttttttatctttgatacatgttctaaattatgttctgttatgatttatactattttttcgaatttaaaattttatgcaagttccttattgacttgcgacggtaaacgacgagccttagggcgaatgtggctttcctctgaaaactatacattttttaagaaatcagcatcttattcaaaccatgacaaatactgtccatgcagttgcataagcatctcaagatgtatgtatgtataagatgtttattgctaaaattatagtttcgtatcagactggtataaaaagtacttagataaatacaaaggctgttatactttagcgtattgaatgtaaacatctatggatgtatgcatgcatgaattacgagtgtatgtatgtatcacatctttcaaaagttgtgcatcacctaaaagtatgctcattttcatagttgattgtttcatgaacacctttttttagatttttgtttggtatttatatagtttgggtaaaggtttactcaaacctcttttttgtactcatgccgggtggaagaaaataaatatttttcgtatgttaagcttgagacaccctgtatgaaagacatggtacaagacggtacaagtgtaagtatacatcgaaatcctattgcagtcttatcttttgtgaacattttgtttgatgactgtccctgatatctttagaaacaaagaaaatagacggttttattttttaacatgtgttttaaccgaaacaaaagtttgagaaaccctgtagagaggaaaaggtatggtaaaataaaaaaaaacttagcggaatccgttaatctgtttaagaaagaatcaactatgaaagtgagcatgattttggctgatgcataacttttgaatataatgtgtattattatgtatatagtgtagatatcaaactaaatgttacagaagaattgtattttattgtatcgcagtgattttttaaaaaagaataaagcgattcttgttacaa

SEQ ID NO: 1863 - DNA, 1402 bp, Diabrotica virgifera
tatatgtactatgtacaggttcttgttgatactctctaatagatgaatccgtttacagtacggactccataaatgtcaaatgcaagaataattgttttgtcatatcgttaaaatctgtttactgctgctaatatctgcaatcagcgatgttacactaagatcttaatagggaacttgctcatttttttattgcataataatattcagttttgtataaaaatgagatttccaaaatttcgcgcttcaaaaactcataatagcttagaagtacaaatttaaagtcttcggtatcttaaaatagttcaaacgacccgtgacgtcacagagtttaactatatggttccgtttatggttatatttaggaatattcttcttcttcttctttagtttattggcctccacctacttgggtatttgtccagctcgtcgtcgaggaataaaggaaaaatatttacattctaatgacgtttatcgtatgtcattgtaataaatatataccagtttgttaaaattggagtttgatacagtttttgaagtaaatgaaagaaggtttactattgaaaataaaaccattttgtaaaagtacaagttttctatgaatagttcaaacgatcaaaaacacttgtaacgtcaaataactgtattttctactgacgtttataatgtctaatttaaaattatgctttttctcatgagcatctttcagtgtgccacagtttttcgatttcattctaacgcattaaattgtatgtgacagaaaaaaacgcacgtcggtgattacatttcatcggtgacatttataacatttattctagttgtcaatagatggcgctataataaaaaaaaattatttacgaattatgtaatattatatctacgaatataatctgtacaatttataaaagactatacaaatcaaagaaaataccattttataaatgcaataaacacaattgatttgtttttatgccaaattgcaaataaaatgtgacaactgtcagatttaactaaaatgtcatgtcactataatgtatattatcacggacttacctttttttctatcatttgtgacgcactgaaaaatgctcatgaaaagaagcgtatacatacgattggtgtagaatgtaaacatacaaccccgtgacgtcacgacgcgtttttggctggctggtataagttgaatttttagtcgtctttaggggccaaacgaaagacaaacaaaacttttttatctttgatacatgttctaaattatgttctgttatgatttatactattttttcgaatttaaaattttttgcaagttccctattatagaatgtaattttccttacaataaattgtggctaaaatcccatattataaagcattacctataaaacattactctaaaacgcacttt

SEQ ID NO: 1864 - DNA, 945 bp, Diabrotica virgifera
ctcgtcgtcgaggaataaaggaaaaatatttatattctaatgacgtttatcgtatgtcattgtaataaatatataccagtttgttaaaattggagtttgatacagtttttgaaggaaatgaaagaaggtttactattgaaaataaaaccattttgtaaaagtacaagttttctatgaatagttcaaacgatcaaaaacgtttataatgtctaatttaaaattatgctttttctcatgagcatctttcagtgtgccacagtttttcgatttcattctaacgcattaaattgtatgtgacagaaaaaaacgcacgtcggtgattacatttcatcggtgacatttataacatttattctagttgtcaatagatggcgctataataaaaaaaaattatttacgaattatgtaatattatatctacgaatataatctgtacaatttataaaagactatacaaatcaaagaaaataccattttataaatgcaataaacacaattgatttgtttttatgccaaattgcaaataaaatgtgacaactgtcagatttaactaaaatgtcatgtcactataatgtatattatcacggacttacctttttttctatcatttgtgacgcactgaaaaatgctcatgaaaagaagcgtatacatacgattggtgtagaatgtaaacatacaaccccgtgacgtcacgacgcgtttttggctggctggtataagttgaatttttagtcgtctttaggggccaaacgaaagacaaacaaaacttttttatctttgatacatgttctaaattatgttctgttatgatttatactattttttcgaatttaaaattttttgcaagttccctattatagaatgtaattttccttacaataaattgtggctaaaatcccatattataaagcattacctataaaacattactctaaaacgcacttt

SEQ ID NO: 1865 - DNA, 790 bp, Diabrotica virgifera
tatatgtactatgtacaggttcttgttgatactctctaatagatgaatccgtttacagtacggactccataaatgtcaaatgcaagaataattgttttgtcatatcgttaaaatctgtttactgctgctaatatctgcaatcagcgatgttacactaagatcttaatagggaacttgctcatttttttattgcataataatattcagttttgtataaaaatgagatttccaaaatttcgcgcttcaaaaactcataatagcttagaagtacaaatttaaagtcttcggtatcttaaaatagttcaaacgacccgtgacgtcacagagtttaactatatggttccgtttatggttatatttaggtatattcttcttcttcttctttaatttattggcctccacctacttgggtatttggccagctcgtcgtcgcggaataaaggaaaaatatttatattctaatgacatttatcgtttgtcattgtaataatatataccagtgtgttgagattggagtttgatatagttattgaaggaaaggaaagaaggtttactatggaaaataaaaccattttgtaaaagtacacattttctatgaatagttcaaacgatcaaaaacacttgtaataacgtaacatagctgtattttctactgacgtttatgatgtcttatttaaaattatatacaattttgttttctttgttggtgcaaaatgtaaacacataaccggatgacgtcacgacgcgttttgggctggctggaatttgaatttttaatcgtctttagggg

SEQ ID NO: 1866 - DNA, 6059 bp, Diabrotica virgifera
  SmartBlast Evalue=0; Info="2-oxoglutarate dehydrogenase, putative n=1 Tax=Pediculus humanus corporis RepID=E0W368_PEDHC"
ccaaaatcattctagatcgaaaggggatagcagtggctagttttgtggtgctatagtgatttaacatcataatttaaaagaaaaaaagtaaaaaagaaacatgcatcgaacactaagcaccatggctggtccaaccggccaaaaatttgcaacttggttattagcaaaaaacgtaccctgtataacgaattcaccaactagaagttacaacgttcctgcagcttctgaaccgttcttaaacggaagctccggccagtatgtggaagatatgtacaatgcttggttggtcgacccctccagtgtccatgcgtcctgggattcattttttcgaaattcttctcaaggaggcgccgggtaccaagcaccaccgtctttagcacctttaggaaagaatgagctaccagtcacctcatttttgccagccttggccggatccaccggtcttggagccgcaccgatcagcgaaaaggtcatcgacgaccacttggcggttcaggctatcatcagaagttaccaagctcgcggccattttatcgcaaaattggatcccttgggtatcatgttcactgaccgaaatagtaccgtatccgaaggggccggctccccacccgacgtgatcacgaggcaacacaaattagaggaaaccgatatggatcgagtatttaaattgccatcaacgacatttatcggtggaaaagagaaatccttgcctttgagagaaatattgagacgactagagttaacctactgcagacatataggtgttgaattcatgttcatcaacagtttggagcagtgcaactggatccgacagcgactagagactcctggcgttacagatctgacacccgaaaataaacgactcattttggcaaggttgacgagagctcatggattcgaatcgttcttggcaagaaagtactcttccgaaaaacgtttcggactggaggggtgcgaaatcctcatacctgcaatgaaaactgtgatagataagtcaacagacttaggtgtagaaagtatagttatgggtatgccccacaggggtcgtcttaatgtattagctaacgtttgccgcaaacccttgcatcaactgtttacccaattcgctggcttgcaatctgccgatgatggttctggtgatgtcaaataccacttgggcacatacattgaaagattgaaccgtgtcacaaacaaaaatataagactggctgtagtagcaaacccctctcatttggaaactgtcgatcctgttgcccaaggaaaaactagagccgaacagttctacagaggcgacggagaaggcaaaaaggttatgtccatactcttacacggtgatgctgcattctctggccaaggtgttgtattcgaaactatgcacttgtcagaactaccagattacacaactcacggcaccgtccatattgttgttaacaatcaaattggtttcaccactgatcctcgtttctccagatcttcaccatattgtacagatgttgctcgtgtagttaacgcaccaatattccacgtcaacgcagacgatccagaaagtgttattcacgtatgtaacatcgctgcagaatggagagcaactttccataaagacgtcatcatcgatttggtatgctatcgtaggaatggacataacgaaattgacgagccgatgttcacacagccccttatgtacagaaagatcaaacagaccaaaccctgcatagataaatacgctgaacaactaatcaccgaaggaattgttaacgaagacgaagtgaagtctgttaaagcgaaatacgacaaaatctgcgatgaagctttcgaaagagctcaacaagaaacccatatcaaatacaaggattggatcgacagtccctggtcaggtttctttgaaggaaaagaccccttgaaagtcaaccccaccggagttaacgaagacaccttggtacatattggaaaacgattttctgctccaccaccaaacgctactgaattcattatccacaaaggtattgaacgtattctcaaatccagaatggaaatggttgaaaatagaattgctgattgggctcttggtgaagccatggctttcggttccttgttgaaggaaggtatccacgttagattgtctggtcaagacgttgagagaggcactttctcacacagacatcacgttctgcatcatcaaactgttgataaggctacataccgcccattgtgcaacttatatcctgatcaagcaccttacacagtctgcaacagctccctctctgaatatggtgtactcggttttgaactcggctattctatgaccaatcccaacgctctagtgatatgggaagctcaatttggagatttctgcaataccgctcaatgtattgttgaccagatgttgtctagcggacaagctaagtgggtacgtcaaaccggtttggttatgttgttgcctcacggaatggaaggtcaaggtcctgaacactccagcgctcgtttggaacgtttcttgcaaatgtcctcagacgaccccgactacttcccacctgaaagcgacgactttgccgttcgtcaacttcacgatatcaactggatcgtcgccaactgcactacaccggccaatctcttccacatcctcagaagacaaatagctttgcctttcagaaaacccttgatcatcatgacccccaagagcttgttacgtcatcctgaagctaggagctcgttcgatgacatgaacgaaggaacagaattccagagaattattcccgagagcggacctgcatcaaagaacccagaaggtgtcgaaagattgctgttctgtaccggaaaagtgtactttgatgtcttgaaagccatcaaagagaagggattggagagtaagatcgctatgacacgtgttgaacaacttactcctttcccattcgatttattgaagcaagaatgtgctaaatatccaaatgctcagatttcttggctgcaagaagaacacaagaaccaaggagcctggaattatgtccaaccaagattcgagaccactttgtctggacaaagagctattaactacgtcggcagaccctgcgccgccagtaccgcaaccggtagcaaaaacgcgcatttgaaagaagttgcccaactactagcagacgctacaagactgtaaacagcaaggttttctaaagaacttgttcacaaagtattagatctacgacactatcctacgagtttcttgtaatcaaaatgattgtagatgacttgaaaatttttgaaacaatattttacctaaagaaatgcactgttttgcgaagagttgtcagatatctttgacacttaaatatgctgtgtttttttatttattgaaggggtgaaaacagttggtaggattataatggcgcccgtaaatataatgaatttttcagtcttataataatatgtctgagtatatttttctaatagattattgttgtacttaaacttatgggactattagatatttttattatttgtttgctaaaattaaaatctttagaagatatatttaacaacttaaaataagggagaaatacgttaataagagtaataagggagaacgagtaaatcatctaaaatatgcagacgctatgatatcaataggcaatagaataaacgaattacaggggaggatctagagcagtggcgtaccgatagatcagcgggccctggtttgagttgggatgcgggtccacccgcccagtaaaaactcacattgtataacacgagtatcgaacatctagcctattgtattgggattatttttttttgacccaccgtataaaacttgcattgaatatctcagtttccgaatttctgcaagtttgtagtttacctaccacttattcatggatcgtgctaatataaaaaaatacaagtgtttgagttagcacgttaggcaggcaccggaggttattctttaaacaaggacttcggcaagcaggtaaaacgagcaaggccttacaaaagcgttccctgtgtttcttaaaagttttaatttcatatttttttatgaatagttattcttcgtttttattaataagtaggtacgtacacgtaggtagtaaaatttaaatttattaaagttacatttcgtagtgtgtacttgtgtagttcaaaatgtccccgtcaaatatgaaacaaaagaagcaaaaggcgctttagagcaggcccctgcgaggcccgggccctggttccgcggaaccatgctcagtacgccactgatctagagaactcttaaaattagctacaggtggatgttattgatcaattttctggaatgagctttcaagaaagagaaggctctcagtctaatagttccgaagctaccggctattttggtttcagtcgaataaggcaatacaataatggagagtacttaattttcccggagtggatcaggctaccaaatactgtgaccattgcatatagcaagtatttcagtatcttatgaacaaatgttaaattagacttctaaacttcgatgacagaagacgtttacttaataatgcgttatgtgacttgaatatgccttataggaataaggtgacacgaatgaaagacatctcttcgctaaagatcttaacaccaaaagttatgtaatatatcatgttcgtactaaattcgctgtgggatagcttctctagaaaaaaagattatatacgctactcgtaccaattttaaatttgatccctttattgatttaccttcaaaatatttcatgtaattccttaatactatccttatatacttattatatatgtatcttcttctacggcactagagcccaaattgagctttggcctccacctttgattatttgtggctgctcttctccatacacggactcctaaaatgcttgtgcgtcgctgcttactgtgtcttcccagcgcttactttgctttccaaccggtctttttccctgcattctagcattcagtgctctttttggtatcatatcctctcccattcttatcacatgtccgacccattgcaatctttgtattctaatgaagtctgacaggggttgataaagctgtctctttccctgcattctagcattcagtgctctttttggtatcatatcctctcccattcttatcacatgtccggcccattgcaatctttgtatattaatgaagtctgacaggggtgttttctcataaagttgataacgctcgttgttgtatcgaattctgaagatttatgatatatctaacgtattccttttaagcctagtaattctgccaacaagtttaatttttacttaatgtatatttaattttttgtaattcggtgattgaaacgtttatgacaactcttcaaccatgtaattatgtatatagcacatattatgtagttgtttataatatttagtgcagattgtgaaggaaggcaaaccaaataactcgttttaccagacgtttttataggacaatgttttatcacgctgaaataagacataccaaaaatgctgtttctcttaaaataaaaacccgcacatctttagtaaaagagcatgatcttgaaacgctcaaaaatggacagaagaaatttgaattgatgattttttcaaatctgaagaaaaatctatgaatttgtgatgatctagattaattagagctccgtatttagagaacgaaacttgaattgatgatttttttttcaaatctgaagaaaaatatatgaatttgtgatgatctagattaattagagcttcatatttagttcaaatgaactatcacaaatttggaagaatttgacgttgaaaaattgagccgatattggtatacagctcttgtaataatgttgcatatatctttcattcttctacactattgaacgtagttttttaacacgtctggatctttatatatatatttattaatgcaaatgtacagtatatgtgatgtaaaataatatctgaaaatatcttttgcttttcaagtattttaataaatcatataattttaaatttagtataagtatttattgtatggacgtatataatgcttggatatggttgaatgaaagttttgttccaa

SEQ ID NO: 1867 - DNA, 6041 bp, Diabrotica virgifera
  SmartBlast Evalue=0; Info=oxoglutarate (alpha-ketoglutarate) dehydrogenase (lipoamide) n=1 Tax=Nasonia vitripennis RepID= UPI0001A46DD6
ccaaaatcattctagatcgaaaggggatagcagtggctagttttgtggtgctatagtgatttaacatcataatttaaaagaaaaaaagtaaaaaagaaacatgcatcgaacactaagcaccatggctggtccaaccggccaaaaatttgcaacttggttattagcaaaaaacgtaccctgtataacgaattcaccaactagaagttacaacgttcctgcagcttctgaaccgttcttaaacggaagctccggccagtatgtggaagatatgtacaatgcttggttggtcgacccctccagtgtccatgcgtcctgggattcattttttcgaaattcttctcaaggaggcgccgggtaccaagcaccaccgtctttagcacctttaggaaagaatgagctaccagtcacctcatttttgccagccttggccggatccaccggtcttggagccgcaccgatcagcgaaaaggtcatcgacgaccacttggcggttcaggctatcatcagaagttaccaaattcgaggacatcacatagctaagttggatccccttggtattaacagcgcagatctggacgatcagacgccacaagagttggtgtacaaaaactacaactttgaggaaaccgatatggatcgagtatttaaattgccatcaacgacatttatcggtggaaaagagaaatccttgcctttgagagaaatattgagacgactagagttaacctactgcagacatataggtgttgaattcatgttcatcaacagtttggagcagtgcaactggatccgacagcgactagagactcctggcgttacagatctgacacccgaaaataaacgactcattttggcaaggttgacgagagctcatggattcgaatcgttcttggcaagaaagtactcttccgaaaaacgtttcggactggaggggtgcgaaatcctcatacctgcaatgaaaactgtgatagataagtcaacagacttaggtgtagaaagtatagttatgggtatgccccacaggggtcgtcttaatgtattagctaacgtttgccgcaaacccttgcatcaactgtttacccaattcgctggcttgcaatctgccgatgatggttctggtgatgtcaaataccacttgggcacatacattgaaagattgaaccgtgtcacaaacaaaaatataagactggctgtagtagcaaacccctctcatttggaaactgtcgatcctgttgcccaaggaaaaactagagccgaacagttctacagaggcgacggagaaggcaaaaaggttatgtccatactcttacacggtgatgctgcattctctggccaaggtgttgtattcgaaactatgcacttgtcagaactaccagattacacaactcacggcaccgtccatattgttgttaacaatcaaattggtttcaccactgatcctcgtttctccagatcttcaccatattgtacagatgttgctcgtgtagttaacgcaccaatattccacgtcaacgcagacgatccagaaagtgttattcacgtatgtaacatcgctgcagaatggagagcaactttccataaagacgtcatcatcgatttggtatgctatcgtaggaatggacataacgaaattgacgagccgatgttcacacagccccttatgtacagaaagatcaaacagaccaaaccctgcatagataaatacgctgaacaactaatcaccgaaggaattgttaacgaagacgaagtgaagtctgttaaagcgaaatacgacaaaatctgcgatgaagctttcgaaagagctcaacaagaaacccatatcaaatacaaggattggatcgacagtccctggtcaggtttctttgaaggaaaagaccccttgaaagtcaaccccaccggagttaacgaagacaccttggtacatattggaaaacgattttctgctccaccaccaaacgctactgaattcattatccacaaaggtattgaacgtattctcaaatccagaatggaaatggttgaaaatagaattgctgattgggctcttggtgaagccatggctttcggttccttgttgaaggaaggtatccacgttagattgtctggtcaagacgttgagagaggcactttctcacacagacatcacgttctgcatcatcaaactgttgataaggctacataccgcccattgtgcaacttatatcctgatcaagcaccttacacagtctgcaacagctccctctctgaatatggtgtactcggttttgaactcggctattctatgaccaatcccaacgctctagtgatatgggaagctcaatttggagatttctgcaataccgctcaatgtattgttgaccagatgttgtctagcggacaagctaagtgggtacgtcaaaccggtttggttatgttgttgcctcacggaatggaaggtcaaggtcctgaacactccagcgctcgtttggaacgtttcttgcaaatgtcctcagacgaccccgactacttcccacctgaaagcgacgactttgccgttcgtcaacttcacgatatcaactggatcgtcgccaactgcactacaccggccaatctcttccacatcctcagaagacaaatagctttgcctttcagaaaacccttgatcatcatgacccccaagagcttgttacgtcatcctgaagctaggagctcgttcgatgacatgaacgaaggaacagaattccagagaattattcccgagagcggacctgcatcaaagaacccagaaggtgtcgaaagattgctgttctgtaccggaaaagtgtactttgatgtcttgaaagccatcaaagagaagggattggagagtaagatcgctatgacacgtgttgaacaacttactcctttcccattcgatttattgaagcaagaatgtgctaaatatccaaatgctcagatttcttggctgcaagaagaacacaagaaccaaggagcctggaattatgtccaaccaagattcgagaccactttgtctggacaaagagctattaactacgtcggcagaccctgcgccgccagtaccgcaaccggtagcaaaaacgcgcatttgaaagaagttgcccaactactagcagacgctacaagactgtaaacagcaaggttttctaaagaacttgttcacaaagtattagatctacgacactatcctacgagtttcttgtaatcaaaatgattgtagatgacttgaaaatttttgaaacaatattttacctaaagaaatgcactgttttgcgaagagttgtcagatatctttgacacttaaatatgctgtgtttttttatttattgaaggggtgaaaacagttggtaggattataatggcgcccgtaaatataatgaatttttcagtcttataataatatgtctgagtatatttttctaatagattattgttgtacttaaacttatgggactattagatatttttattatttgtttgctaaaattaaaatctttagaagatatatttaacaacttaaaataagggagaaatacgttaataagagtaataagggagaacgagtaaatcatctaaaatatgcagacgctatgatatcaataggcaatagaataaacgaattacaggggaggatctagagcagtggcgtaccgatagatcagcgggccctggtttgagttgggatgcgggtccacccgcccagtaaaaactcacattgtataacacgagtatcgaacatctagcctattgtattgggattatttttttttgacccaccgtataaaacttgcattgaatatctcagtttccgaatttctgcaagtttgtagtttacctaccacttattcatggatcgtgctaatataaaaaaatacaagtgtttgagttagcacgttaggcaggcaccggaggttattctttaaacaaggacttcggcaagcaggtaaaacgagcaaggccttacaaaagcgttccctgtgtttcttaaaagttttaatttcatatttttttatgaatagttattcttcgtttttattaataagtaggtacgtacacgtaggtagtaaaatttaaatttattaaagttacatttcgtagtgtgtacttgtgtagttcaaaatgtccccgtcaaatatgaaacaaaagaagcaaaaggcgctttagagcaggcccctgcgaggcccgggccctggttccgcggaaccatgctcagtacgccactgatctagagaactcttaaaattagctacaggtggatgttattgatcaattttctggaatgagctttcaagaaagagaaggctctcagtctaatagttccgaagctaccggctattttggtttcagtcgaataaggcaatacaataatggagagtacttaattttcccggagtggatcaggctaccaaatactgtgaccattgcatatagcaagtatttcagtatcttatgaacaaatgttaaattagacttctaaacttcgatgacagaagacgtttacttaataatgcgttatgtgacttgaatatgccttataggaataaggtgacacgaatgaaagacatctcttcgctaaagatcttaacaccaaaagttatgtaatatatcatgttcgtactaaattcgctgtgggatagcttctctagaaaaaaagattatatacgctactcgtaccaattttaaatttgatccctttattgatttaccttcaaaatatttcatgtaattccttaatactatccttatatacttattatatatgtatcttcttctacggcactagagcccaaattgagctttggcctccacctttgattatttgtggctgctcttctccatacacggactcctaaaatgcttgtgcgtcgctgcttactgtgtcttcccagcgcttactttgctttccaaccggtctttttccctgcattctagcattcagtgctctttttggtatcatatcctctcccattcttatcacatgtccgacccattgcaatctttgtattctaatgaagtctgacaggggttgataaagctgtctctttccctgcattctagcattcagtgctctttttggtatcatatcctctcccattcttatcacatgtccggcccattgcaatctttgtatattaatgaagtctgacaggggtgttttctcataaagttgataacgctcgttgttgtatcgaattctgaagatttatgatatatctaacgtattccttttaagcctagtaattctgccaacaagtttaatttttacttaatgtatatttaattttttgtaattcggtgattgaaacgtttatgacaactcttcaaccatgtaattatgtatatagcacatattatgtagttgtttataatatttagtgcagattgtgaaggaaggcaaaccaaataactcgttttaccagacgtttttataggacaatgttttatcacgctgaaataagacataccaaaaatgctgtttctcttaaaataaaaacccgcacatctttagtaaaagagcatgatcttgaaacgctcaaaaatggacagaagaaatttgaattgatgattttttcaaatctgaagaaaaatctatgaatttgtgatgatctagattaattagagctccgtatttagagaacgaaacttgaattgatgatttttttttcaaatctgaagaaaaatatatgaatttgtgatgatctagattaattagagcttcatatttagttcaaatgaactatcacaaatttggaagaatttgacgttgaaaaattgagccgatattggtatacagctcttgtaataatgttgcatatatctttcattcttctacactattgaacgtagttttttaacacgtctggatctttatatatatatttattaatgcaaatgtacagtatatgtgatgtaaaataatatctgaaaatatcttttgcttttcaagtattttaataaatcatataattttaaatttagtataagtatttattgtatggacgtatataatgcttggatatggttgaatgaaagttttgttccaa

SEQ ID NO: 1868 - DNA, 5889 bp, Diabrotica virgifera
  SmartBlast Evalue=0; Info="2-oxoglutarate dehydrogenase, putative n=1 Tax=Pediculus humanus corporis RepID=E0W368_PEDHC"
ccaaaatcattctagatcgaaaggggatagcagtggctagttttgtggtgctatagtgatttaacatcataatttaaaagaaaaaaagtaaaaaagaaacatgcatcgaacactaagcaccatggctggtccaaccggccaaaaatttgcaacttggttattagcaaaaaacgtaccctgtataacgaattcaccaactagaagttacaacgttcctgcagcttctgaaccgttcttaaacggaagctccggccagtatgtggaagatatgtacaatgcttggttggtcgacccctccagtgtccatgcgtcctgggattcattttttcgaaattcttctcaaggaggcgccgggtaccaagcaccaccgtctttagcacctttaggaaagaatgagctaccagtcacctcatttttgccagccttggccggatccaccggtcttggagccgcaccgatcagcgaaaaggtcatcgacgaccacttggcggttcaggctatcatcagaagttaccaagctcgcggccattttatcgcaaaattggatcccttgggtatcatgttcactgaccgaaatagtaccgtatccgaaggggccggctccccacccgacgtgatcacgaggcaacacaaattagaggaaaccgatatggatcgagtatttaaattgccatcaacgacatttatcggtggaaaagagaaatccttgcctttgagagaaatattgagacgactagagttaacctactgcagacatataggtgttgaattcatgttcatcaacagtttggagcagtgcaactggatccgacagcgactagagactcctggcgttacagatctgacacccgaaaataaacgactcattttggcaaggttgacgagagctcatggattcgaatcgttcttggcaagaaagtactcttccgaaaaacgtttcggactggaggggtgcgaaatcctcatacctgcaatgaaaactgtgatagataagtcaacagacttaggtgtagaaagtatagttatgggtatgccccacaggggtcgtcttaatgtattagctaacgtttgccgcaaacccttgcatcaactgtttacccaattcgctggcttgcaatctgccgatgatggttctggtgatgtcaaataccacttgggcacatacattgaaagattgaaccgtgtcacaaacaaaaatataagactggctgtagtagcaaacccctctcatttggaaactgtcgatcctgttgcccaaggaaaaactagagccgaacagttctacagaggcgacggagaaggcaaaaaggttatgtccatactcttacacggtgatgctgcattctctggccaaggtgttgtattcgaaactatgcacttgtcagaactaccagattacacaactcacggcaccgtccatattgttgttaacaatcaaattggtttcaccactgatcctcgtttctccagatcttcaccatattgtacagatgttgctcgtgtagttaacgcaccaatattccacgtcaacgcagacgatccagaaagtgttattcacgtatgtaacatcgctgcagaatggagagcaactttccataaagacgtcatcatcgatttggtatgctatcgtaggaatggacataacgaaattgacgagccgatgttcacacagccccttatgtacagaaagatcaaacagaccaaaccctgcatagataaatacgctgaacaactaatcaccgaaggaattgttaacgaagacgaagtgaagtctgttaaagcgaaatacgacaaaatctgcgatgaagctttcgaaagagctcaacaagaaacccatatcaaatacaaggattggatcgacagtccctggtcaggtttctttgaaggaaaagaccccttgaaagtcaaccccaccggagttaacgaagacaccttggtacatattggaaaacgattttctgctccaccaccaaacgctactgaattcattatccacaaaggtattgaacgtattctcaaatccagaatggaaatggttgaaaatagaattgctgattgggctcttggtgaagccatggctttcggttccttgttgaaggaaggtatccacgttagattgtctggtcaagacgttgagagaggcactttctcacacagacatcacgttctgcatcatcaaactgttgataaggctacataccgcccattgtgcaacttatatcctgatcaagcaccttacacagtctgcaacagctccctctctgaatatggtgtactcggttttgaactcggctattctatgaccaatcccaacgctctagtgatatgggaagctcaatttggagatttctgcaataccgctcaatgtattgttgaccagatgttgtctagcggacaagctaagtgggtacgtcaaaccggtttggttatgttgttgcctcacggaatggaaggtcaaggtcctgaacactccagcgctcgtttggaacgtttcttgcaaatgtcctcagacgaccccgactacttcccacctgaaagcgacgactttgccgttcgtcaacttcacgatatcaactggatcgtcgccaactgcactacaccggccaatctcttccacatcctcagaagacaaatagctttgcctttcagaaaacccttgatcatcatgacccccaagagcttgttacgtcatcctgaagctaggagctcgttcgatgacatgaacgaaggaacagaattccagagaattattcccgagagcggacctgcatcaaagaacccagaaggtgtcgaaagattgctgttctgtaccggaaaagtgtactttgatgtcttgaaagccatcaaagagaagggattggagagtaagatcgctatgacacgtgttgaacaacttactcctttcccattcgatttattgaagcaagaatgtgctaaatatccaaatgctcagatttcttggctgcaagaagaacacaagaaccaaggagcctggaattatgtccaaccaagattcgagaccactttgtctggacaaagagctattaactacgtcggcagaccctgcgccgccagtaccgcaaccggtagcaaaaacgcgcatttgaaagaagttgcccaactactagcagacgctacaagactgtaaacagcaaggttttctaaagaacttgttcacaaagtattagatctacgacactatcctacgagtttcttgtaatcaaaatgattgtagatgacttgaaaatttttgaaacaatattttacctaaagaaatgcactgttttgcgaagagttgtcagatatctttgacacttaaatatgctgtgtttttttatttattgaaggggtgaaaacagttggtaggattataatggcgcccgtaaatataatgaatttttcagtcttataataatatgtctgagtatatttttctaatagattattgttgtacttaaacttatgggactattagatatttttattatttgtttgctaaaattaaaatctttagaagatatatttaacaacttaaaataagggagaaatacgttaataagagtaataagggagaacgagtaaatcatctaaaatatgcagacgctatgatatcaataggcaatagaataaacgaattacaggggaggatctagagcagtggcgtaccgatagatcagcgggccctggtttgagttgggatgcgggtccacccgcccagtaaaaactcacattgtataacacgagtatcgaacatctagcctattgtattgggattatttttttttgacccaccgtataaaacttgcattgaatatctcagtttccgaatttctgcaagtttgtagtttacctaccacttattcatggatcgtgctaatataaaaaaatacaagtgtttgagttagcacgttaggcaggcaccggaggttattctttaaacaaggacttcggcaagcaggtaaaacgagcaaggccttacaaaagcgttccctgtgtttcttaaaagttttaatttcatatttttttatgaatagttattcttcgtttttattaataagtaggtacgtacacgtaggtagtaaaatttaaatttattaaagttacatttcgtagtgtgtacttgtgtagttcaaaatgtccccgtcaaatatgaaacaaaagaagcaaaaggcgctttagagcaggcccctgcgaggcccgggccctggttccgcggaaccatgctcagtacgccactgatctagagaactcttaaaattagctacaggtggatgttattgatcaattttctggaatgagctttcaagaaagagaaggctctcagtctaatagttccgaagctaccggctattttggtttcagtcgaataaggcaatacaataatggagagtacttaattttcccggagtggatcaggctaccaaatactgtgaccatttcatatagcaagtatttcagtatcttatgaacaaatgttaaatcagacttctaagcttcgatgacagaagacgtttacttagtaatgcgttatatgacttgaatatgtcttataggaataaggtgacacgaatgaaagacatctcttcgataaagatcttaacaccaaaagtttagcttctctagaaaaaagattctatacgctactcatactaattttaaatttgattcctttattgattcaccttcaaaatatttcatgtaattcgttaatactttccttatatacttattatatatcttcttctacggcactagagcccaaaatgagccttggcctccacctttgattatttgtggctgctcttctccatacacggactcttaaaatgcttgtgcgtcgctgcttactgtgtctttccagctcttactttgctttccaaccggtcttttccctgcattctagcgttcagtgctctttttggtatcctatcatctcccattcttatcacatgtccggtccattgcaatctttgtattttaatgaagtctgacaggggtgttttcttataaagttgataaagctcgttgttttatcgaattctgaagatttattatatatctaacgtattccttttaagcctagtaattctgccaacaagtttaatttttacttaatgtatatttaattttttgtaattcggtgattgaaacgtttatgacaactcttcaaccatgtaattatgtatatagcacatattatgtagttgtttataatatttagtgcagattgtgaaggaaggcaaaccaaataactcgttttaccagacgtttttataggacaatgttttatcacgctgaaataagacataccaaaaatgctgtttctcttaaaataaaaacccgcacatctttagtaaaagagcatgatcttgaaacgctcaaaaatggacagaagaaatttgaattgatgattttttcaaatctgaagaaaaatctatgaatttgtgatgatctagattaattagagctccgtatttagagaacgaaacttgaattgatgatttttttttcaaatctgaagaaaaatatatgaatttgtgatgatctagattaattagagcttcatatttagttcaaatgaactatcacaaatttggaagaatttgacgttgaaaaattgagccgatattggtatacagctcttgtaataatgttgcatatatctttcattcttctacactattgaacgtagttttttaacacgtctggatctttatatatatatttattaatgcaaatgtacagtatatgtgatgtaaaataatatctgaaaatatcttttgcttttcaagtattttaataaatcatataattttaaatttagtataagtatttattgtatggacgtatataatgcttggatatggttgaatgaaagttttgttccaa

SEQ ID NO: 1869 - DNA, 5871 bp, Diabrotica virgifera
  SmartBlast Evalue=0; Info=oxoglutarate (alpha-ketoglutarate) dehydrogenase (lipoamide) n=1 Tax=Nasonia vitripennis RepID= UPI0001A46DD6
ccaaaatcattctagatcgaaaggggatagcagtggctagttttgtggtgctatagtgatttaacatcataatttaaaagaaaaaaagtaaaaaagaaacatgcatcgaacactaagcaccatggctggtccaaccggccaaaaatttgcaacttggttattagcaaaaaacgtaccctgtataacgaattcaccaactagaagttacaacgttcctgcagcttctgaaccgttcttaaacggaagctccggccagtatgtggaagatatgtacaatgcttggttggtcgacccctccagtgtccatgcgtcctgggattcattttttcgaaattcttctcaaggaggcgccgggtaccaagcaccaccgtctttagcacctttaggaaagaatgagctaccagtcacctcatttttgccagccttggccggatccaccggtcttggagccgcaccgatcagcgaaaaggtcatcgacgaccacttggcggttcaggctatcatcagaagttaccaaattcgaggacatcacatagctaagttggatccccttggtattaacagcgcagatctggacgatcagacgccacaagagttggtgtacaaaaactacaactttgaggaaaccgatatggatcgagtatttaaattgccatcaacgacatttatcggtggaaaagagaaatccttgcctttgagagaaatattgagacgactagagttaacctactgcagacatataggtgttgaattcatgttcatcaacagtttggagcagtgcaactggatccgacagcgactagagactcctggcgttacagatctgacacccgaaaataaacgactcattttggcaaggttgacgagagctcatggattcgaatcgttcttggcaagaaagtactcttccgaaaaacgtttcggactggaggggtgcgaaatcctcatacctgcaatgaaaactgtgatagataagtcaacagacttaggtgtagaaagtatagttatgggtatgccccacaggggtcgtcttaatgtattagctaacgtttgccgcaaacccttgcatcaactgtttacccaattcgctggcttgcaatctgccgatgatggttctggtgatgtcaaataccacttgggcacatacattgaaagattgaaccgtgtcacaaacaaaaatataagactggctgtagtagcaaacccctctcatttggaaactgtcgatcctgttgcccaaggaaaaactagagccgaacagttctacagaggcgacggagaaggcaaaaaggttatgtccatactcttacacggtgatgctgcattctctggccaaggtgttgtattcgaaactatgcacttgtcagaactaccagattacacaactcacggcaccgtccatattgttgttaacaatcaaattggtttcaccactgatcctcgtttctccagatcttcaccatattgtacagatgttgctcgtgtagttaacgcaccaatattccacgtcaacgcagacgatccagaaagtgttattcacgtatgtaacatcgctgcagaatggagagcaactttccataaagacgtcatcatcgatttggtatgctatcgtaggaatggacataacgaaattgacgagccgatgttcacacagccccttatgtacagaaagatcaaacagaccaaaccctgcatagataaatacgctgaacaactaatcaccgaaggaattgttaacgaagacgaagtgaagtctgttaaagcgaaatacgacaaaatctgcgatgaagctttcgaaagagctcaacaagaaacccatatcaaatacaaggattggatcgacagtccctggtcaggtttctttgaaggaaaagaccccttgaaagtcaaccccaccggagttaacgaagacaccttggtacatattggaaaacgattttctgctccaccaccaaacgctactgaattcattatccacaaaggtattgaacgtattctcaaatccagaatggaaatggttgaaaatagaattgctgattgggctcttggtgaagccatggctttcggttccttgttgaaggaaggtatccacgttagattgtctggtcaagacgttgagagaggcactttctcacacagacatcacgttctgcatcatcaaactgttgataaggctacataccgcccattgtgcaacttatatcctgatcaagcaccttacacagtctgcaacagctccctctctgaatatggtgtactcggttttgaactcggctattctatgaccaatcccaacgctctagtgatatgggaagctcaatttggagatttctgcaataccgctcaatgtattgttgaccagatgttgtctagcggacaagctaagtgggtacgtcaaaccggtttggttatgttgttgcctcacggaatggaaggtcaaggtcctgaacactccagcgctcgtttggaacgtttcttgcaaatgtcctcagacgaccccgactacttcccacctgaaagcgacgactttgccgttcgtcaacttcacgatatcaactggatcgtcgccaactgcactacaccggccaatctcttccacatcctcagaagacaaatagctttgcctttcagaaaacccttgatcatcatgacccccaagagcttgttacgtcatcctgaagctaggagctcgttcgatgacatgaacgaaggaacagaattccagagaattattcccgagagcggacctgcatcaaagaacccagaaggtgtcgaaagattgctgttctgtaccggaaaagtgtactttgatgtcttgaaagccatcaaagagaagggattggagagtaagatcgctatgacacgtgttgaacaacttactcctttcccattcgatttattgaagcaagaatgtgctaaatatccaaatgctcagatttcttggctgcaagaagaacacaagaaccaaggagcctggaattatgtccaaccaagattcgagaccactttgtctggacaaagagctattaactacgtcggcagaccctgcgccgccagtaccgcaaccggtagcaaaaacgcgcatttgaaagaagttgcccaactactagcagacgctacaagactgtaaacagcaaggttttctaaagaacttgttcacaaagtattagatctacgacactatcctacgagtttcttgtaatcaaaatgattgtagatgacttgaaaatttttgaaacaatattttacctaaagaaatgcactgttttgcgaagagttgtcagatatctttgacacttaaatatgctgtgtttttttatttattgaaggggtgaaaacagttggtaggattataatggcgcccgtaaatataatgaatttttcagtcttataataatatgtctgagtatatttttctaatagattattgttgtacttaaacttatgggactattagatatttttattatttgtttgctaaaattaaaatctttagaagatatatttaacaacttaaaataagggagaaatacgttaataagagtaataagggagaacgagtaaatcatctaaaatatgcagacgctatgatatcaataggcaatagaataaacgaattacaggggaggatctagagcagtggcgtaccgatagatcagcgggccctggtttgagttgggatgcgggtccacccgcccagtaaaaactcacattgtataacacgagtatcgaacatctagcctattgtattgggattatttttttttgacccaccgtataaaacttgcattgaatatctcagtttccgaatttctgcaagtttgtagtttacctaccacttattcatggatcgtgctaatataaaaaaatacaagtgtttgagttagcacgttaggcaggcaccggaggttattctttaaacaaggacttcggcaagcaggtaaaacgagcaaggccttacaaaagcgttccctgtgtttcttaaaagttttaatttcatatttttttatgaatagttattcttcgtttttattaataagtaggtacgtacacgtaggtagtaaaatttaaatttattaaagttacatttcgtagtgtgtacttgtgtagttcaaaatgtccccgtcaaatatgaaacaaaagaagcaaaaggcgctttagagcaggcccctgcgaggcccgggccctggttccgcggaaccatgctcagtacgccactgatctagagaactcttaaaattagctacaggtggatgttattgatcaattttctggaatgagctttcaagaaagagaaggctctcagtctaatagttccgaagctaccggctattttggtttcagtcgaataaggcaatacaataatggagagtacttaattttcccggagtggatcaggctaccaaatactgtgaccatttcatatagcaagtatttcagtatcttatgaacaaatgttaaatcagacttctaagcttcgatgacagaagacgtttacttagtaatgcgttatatgacttgaatatgtcttataggaataaggtgacacgaatgaaagacatctcttcgataaagatcttaacaccaaaagtttagcttctctagaaaaaagattctatacgctactcatactaattttaaatttgattcctttattgattcaccttcaaaatatttcatgtaattcgttaatactttccttatatacttattatatatcttcttctacggcactagagcccaaaatgagccttggcctccacctttgattatttgtggctgctcttctccatacacggactcttaaaatgcttgtgcgtcgctgcttactgtgtctttccagctcttactttgctttccaaccggtcttttccctgcattctagcgttcagtgctctttttggtatcctatcatctcccattcttatcacatgtccggtccattgcaatctttgtattttaatgaagtctgacaggggtgttttcttataaagttgataaagctcgttgttttatcgaattctgaagatttattatatatctaacgtattccttttaagcctagtaattctgccaacaagtttaatttttacttaatgtatatttaattttttgtaattcggtgattgaaacgtttatgacaactcttcaaccatgtaattatgtatatagcacatattatgtagttgtttataatatttagtgcagattgtgaaggaaggcaaaccaaataactcgttttaccagacgtttttataggacaatgttttatcacgctgaaataagacataccaaaaatgctgtttctcttaaaataaaaacccgcacatctttagtaaaagagcatgatcttgaaacgctcaaaaatggacagaagaaatttgaattgatgattttttcaaatctgaagaaaaatctatgaatttgtgatgatctagattaattagagctccgtatttagagaacgaaacttgaattgatgatttttttttcaaatctgaagaaaaatatatgaatttgtgatgatctagattaattagagcttcatatttagttcaaatgaactatcacaaatttggaagaatttgacgttgaaaaattgagccgatattggtatacagctcttgtaataatgttgcatatatctttcattcttctacactattgaacgtagttttttaacacgtctggatctttatatatatatttattaatgcaaatgtacagtatatgtgatgtaaaataatatctgaaaatatcttttgcttttcaagtattttaataaatcatataattttaaatttagtataagtatttattgtatggacgtatataatgcttggatatggttgaatgaaagttttgttccaa

SEQ ID NO: 1870 - DNA, 3173 bp, Diabrotica virgifera
  SmartBlast Evalue=4E-10; Info="2-oxoglutarate dehydrogenase E1 component, mitochondrial n=2 Tax=Aculeata RepID=E2BLJ0_9HYME"
gaattatgtccaaccaagattcgagaccactttgtctggacaaagagctattaatgaggaacagggcgattcgggttggtttggtaaactgtttggaggaaaaaaacaggtgaaacctgaaccgcaagaaagtatcgaacaacccgatacgagggtgataagctacgtcggcagaccctgcgccgccagtaccgcaaccggtagcaaaaacgcgcatttgaaagaagttgcccaactactagcagacgctacaagactgtaaacagcaaggttttctaaagaacttgttcacaaagtattagatctacgacactatcctacgagtttcttgtaatcaaaatgattgtagatgacttgaaaatttttgaaacaatattttacctaaagaaatgcactgttttgcgaagagttgtcagatatctttgacacttaaatatgctgtgtttttttatttattgaaggggtgaaaacagttggtaggattataatggcgcccgtaaatataatgaatttttcagtcttataataatatgtctgagtatatttttctaatagattattgttgtacttaaacttatgggactattagatatttttattatttgtttgctaaaattaaaatctttagaagatatatttaacaacttaaaataagggagaaatacgttaataagagtaataagggagaacgagtaaatcatctaaaatatgcagacgctatgatatcaataggcaatagaataaacgaattacaggggaggatctagagcagtggcgtaccgatagatcagcgggccctggtttgagttgggatgcgggtccacccgcccagtaaaaactcacattgtataacacgagtatcgaacatctagcctattgtattgggattatttttttttgacccaccgtataaaacttgcattgaatatctcagtttccgaatttctgcaagtttgtagtttacctaccacttattcatggatcgtgctaatataaaaaaatacaagtgtttgagttagcacgttaggcaggcaccggaggttattctttaaacaaggacttcggcaagcaggtaaaacgagcaaggccttacaaaagcgttccctgtgtttcttaaaagttttaatttcatatttttttatgaatagttattcttcgtttttattaataagtaggtacgtacacgtaggtagtaaaatttaaatttattaaagttacatttcgtagtgtgtacttgtgtagttcaaaatgtccccgtcaaatatgaaacaaaagaagcaaaaggcgctttagagcaggcccctgcgaggcccgggccctggttccgcggaaccatgctcagtacgccactgatctagagaactcttaaaattagctacaggtggatgttattgatcaattttctggaatgagctttcaagaaagagaaggctctcagtctaatagttccgaagctaccggctattttggtttcagtcgaataaggcaatacaataatggagagtacttaattttcccggagtggatcaggctaccaaatactgtgaccattgcatatagcaagtatttcagtatcttatgaacaaatgttaaattagacttctaaacttcgatgacagaagacgtttacttaataatgcgttatgtgacttgaatatgccttataggaataaggtgacacgaatgaaagacatctcttcgctaaagatcttaacaccaaaagttatgtaatatatcatgttcgtactaaattcgctgtgggatagcttctctagaaaaaaagattatatacgctactcgtaccaattttaaatttgatccctttattgatttaccttcaaaatatttcatgtaattccttaatactatccttatatacttattatatatgtatcttcttctacggcactagagcccaaattgagctttggcctccacctttgattatttgtggctgctcttctccatacacggactcctaaaatgcttgtgcgtcgctgcttactgtgtcttcccagcgcttactttgctttccaaccggtctttttccctgcattctagcattcagtgctctttttggtatcatatcctctcccattcttatcacatgtccgacccattgcaatctttgtattctaatgaagtctgacaggggttgataaagctgtctctttccctgcattctagcattcagtgctctttttggtatcatatcctctcccattcttatcacatgtccggcccattgcaatctttgtatattaatgaagtctgacaggggtgttttctcataaagttgataacgctcgttgttgtatcgaattctgaagatttatgatatatctaacgtattccttttaagcctagtaattctgccaacaagtttaatttttacttaatgtatatttaattttttgtaattcggtgattgaaacgtttatgacaactcttcaaccatgtaattatgtatatagcacatattatgtagttgtttataatatttagtgcagattgtgaaggaaggcaaaccaaataactcgttttaccagacgtttttataggacaatgttttatcacgctgaaataagacataccaaaaatgctgtttctcttaaaataaaaacccgcacatctttagtaaaagagcatgatcttgaaacgctcaaaaatggacagaagaaatttgaattgatgattttttcaaatctgaagaaaaatctatgaatttgtgatgatctagattaattagagctccgtatttagagaacgaaacttgaattgatgatttttttttcaaatctgaagaaaaatatatgaatttgtgatgatctagattaattagagcttcatatttagttcaaatgaactatcacaaatttggaagaatttgacgttgaaaaattgagccgatattggtatacagctcttgtaataatgttgcatatatctttcattcttctacactattgaacgtagttttttaacacgtctggatctttatatatatatttattaatgcaaatgtacagtatatgtgatgtaaaataatatctgaaaatatcttttgcttttcaagtattttaataaatcatataattttaaatttagtataagtatttattgtatggacgtatataatgcttggatatggttgaatgaaagttttgttccaa

SEQ ID NO: 1871 - DNA, 3003 bp, Diabrotica virgifera
  SmartBlast Evalue=4E-10; Info="2-oxoglutarate dehydrogenase E1 component, mitochondrial n=2 Tax=Aculeata RepID=E2BLJ0_9HYME"
gaattatgtccaaccaagattcgagaccactttgtctggacaaagagctattaatgaggaacagggcgattcgggttggtttggtaaactgtttggaggaaaaaaacaggtgaaacctgaaccgcaagaaagtatcgaacaacccgatacgagggtgataagctacgtcggcagaccctgcgccgccagtaccgcaaccggtagcaaaaacgcgcatttgaaagaagttgcccaactactagcagacgctacaagactgtaaacagcaaggttttctaaagaacttgttcacaaagtattagatctacgacactatcctacgagtttcttgtaatcaaaatgattgtagatgacttgaaaatttttgaaacaatattttacctaaagaaatgcactgttttgcgaagagttgtcagatatctttgacacttaaatatgctgtgtttttttatttattgaaggggtgaaaacagttggtaggattataatggcgcccgtaaatataatgaatttttcagtcttataataatatgtctgagtatatttttctaatagattattgttgtacttaaacttatgggactattagatatttttattatttgtttgctaaaattaaaatctttagaagatatatttaacaacttaaaataagggagaaatacgttaataagagtaataagggagaacgagtaaatcatctaaaatatgcagacgctatgatatcaataggcaatagaataaacgaattacaggggaggatctagagcagtggcgtaccgatagatcagcgggccctggtttgagttgggatgcgggtccacccgcccagtaaaaactcacattgtataacacgagtatcgaacatctagcctattgtattgggattatttttttttgacccaccgtataaaacttgcattgaatatctcagtttccgaatttctgcaagtttgtagtttacctaccacttattcatggatcgtgctaatataaaaaaatacaagtgtttgagttagcacgttaggcaggcaccggaggttattctttaaacaaggacttcggcaagcaggtaaaacgagcaaggccttacaaaagcgttccctgtgtttcttaaaagttttaatttcatatttttttatgaatagttattcttcgtttttattaataagtaggtacgtacacgtaggtagtaaaatttaaatttattaaagttacatttcgtagtgtgtacttgtgtagttcaaaatgtccccgtcaaatatgaaacaaaagaagcaaaaggcgctttagagcaggcccctgcgaggcccgggccctggttccgcggaaccatgctcagtacgccactgatctagagaactcttaaaattagctacaggtggatgttattgatcaattttctggaatgagctttcaagaaagagaaggctctcagtctaatagttccgaagctaccggctattttggtttcagtcgaataaggcaatacaataatggagagtacttaattttcccggagtggatcaggctaccaaatactgtgaccatttcatatagcaagtatttcagtatcttatgaacaaatgttaaatcagacttctaagcttcgatgacagaagacgtttacttagtaatgcgttatatgacttgaatatgtcttataggaataaggtgacacgaatgaaagacatctcttcgataaagatcttaacaccaaaagtttagcttctctagaaaaaagattctatacgctactcatactaattttaaatttgattcctttattgattcaccttcaaaatatttcatgtaattcgttaatactttccttatatacttattatatatcttcttctacggcactagagcccaaaatgagccttggcctccacctttgattatttgtggctgctcttctccatacacggactcttaaaatgcttgtgcgtcgctgcttactgtgtctttccagctcttactttgctttccaaccggtcttttccctgcattctagcgttcagtgctctttttggtatcctatcatctcccattcttatcacatgtccggtccattgcaatctttgtattttaatgaagtctgacaggggtgttttcttataaagttgataaagctcgttgttttatcgaattctgaagatttattatatatctaacgtattccttttaagcctagtaattctgccaacaagtttaatttttacttaatgtatatttaattttttgtaattcggtgattgaaacgtttatgacaactcttcaaccatgtaattatgtatatagcacatattatgtagttgtttataatatttagtgcagattgtgaaggaaggcaaaccaaataactcgttttaccagacgtttttataggacaatgttttatcacgctgaaataagacataccaaaaatgctgtttctcttaaaataaaaacccgcacatctttagtaaaagagcatgatcttgaaacgctcaaaaatggacagaagaaatttgaattgatgattttttcaaatctgaagaaaaatctatgaatttgtgatgatctagattaattagagctccgtatttagagaacgaaacttgaattgatgatttttttttcaaatctgaagaaaaatatatgaatttgtgatgatctagattaattagagcttcatatttagttcaaatgaactatcacaaatttggaagaatttgacgttgaaaaattgagccgatattggtatacagctcttgtaataatgttgcatatatctttcattcttctacactattgaacgtagttttttaacacgtctggatctttatatatatatttattaatgcaaatgtacagtatatgtgatgtaaaataatatctgaaaatatcttttgcttttcaagtattttaataaatcatataattttaaatttagtataagtatttattgtatggacgtatataatgcttggatatggttgaatgaaagttttgttccaa

SEQ ID NO: 1872 - DNA, 2181 bp, Diabrotica virgifera
tgctaatataaaaaatacaagtgtttgagttagcacgttaggcaggcaccggcggttagtctttaaacaaggacttcggcaagcaggtaaaacgagcaaggaaccttacaaaaacgttccctgtgtttcttaataaattttgatttcagattttttgatgaatagttattcttcgtttttattaataagtagtacgtacacaaaaatttaaatttattaaagttacatttcgtagtgtgtacttgtgtagttcaaaatgtccccgtcaaatatgaaacaaaagaagcaaaaggcgctttagagcaggcccctgcgaggcccgggccctggttccgcggaaccatgctcagtacgccactgatctagagaactcttaaaattagctacaggtggatgttattgatcaattttctggaatgagctttcaagaaagagaaggctctcagtctaatagttccgaagctaccggctattttggtttcagtcgaataaggcaatacaataatggagagtacttaattttcccggagtggatcaggctaccaaatactgtgaccattgcatatagcaagtatttcagtatcttatgaacaaatgttaaattagacttctaaacttcgatgacagaagacgtttacttaataatgcgttatgtgacttgaatatgccttataggaataaggtgacacgaatgaaagacatctcttcgctaaagatcttaacaccaaaagttatgtaatatatcatgttcgtactaaattcgctgtgggatagcttctctagaaaaaaagattatatacgctactcgtaccaattttaaatttgatccctttattgatttaccttcaaaatatttcatgtaattccttaatactatccttatatacttattatatatgtatcttcttctacggcactagagcccaaattgagctttggcctccacctttgattatttgtggctgctcttctccatacacggactcctaaaatgcttgtgcgtcgctgcttactgtgtcttcccagcgcttactttgctttccaaccggtctttttccctgcattctagcattcagtgctctttttggtatcatatcctctcccattcttatcacatgtccgacccattgcaatctttgtattctaatgaagtctgacaggggttgataaagctgtctctttccctgcattctagcattcagtgctctttttggtatcatatcctctcccattcttatcacatgtccggcccattgcaatctttgtatattaatgaagtctgacaggggtgttttctcataaagttgataacgctcgttgttgtatcgaattctgaagatttatgatatatctaacgtattccttttaagcctagtaattctgccaacaagtttaatttttacttaatgtatatttaattttttgtaattcggtgattgaaacgtttatgacaactcttcaaccatgtaattatgtatatagcacatattatgtagttgtttataatatttagtgcagattgtgaaggaaggcaaaccaaataactcgttttaccagacgtttttataggacaatgttttatcacgctgaaataagacataccaaaaatgctgtttctcttaaaataaaaacccgcacatctttagtaaaagagcatgatcttgaaacgctcaaaaatggacagaagaaatttgaattgatgattttttcaaatctgaagaaaaatctatgaatttgtgatgatctagattaattagagctccgtatttagagaacgaaacttgaattgatgatttttttttcaaatctgaagaaaaatatatgaatttgtgatgatctagattaattagagcttcatatttagttcaaatgaactatcacaaatttggaagaatttgacgttgaaaaattgagccgatattggtatacagctcttgtaataatgttgcatatatctttcattcttctacactattgaacgtagttttttaacacgtctggatctttatatatatatttattaatgcaaatgtacagtatatgtgatgtaaaataatatctgaaaatatcttttgcttttcaagtattttaataaatcatataattttaaatttagtataagtatttattgtatggacgtatataatgcttggatatggttgaatgaaagttttgttccaa

SEQ ID NO: 1873 - DNA, 2011 bp, Diabrotica virgifera
tgctaatataaaaaatacaagtgtttgagttagcacgttaggcaggcaccggcggttagtctttaaacaaggacttcggcaagcaggtaaaacgagcaaggaaccttacaaaaacgttccctgtgtttcttaataaattttgatttcagattttttgatgaatagttattcttcgtttttattaataagtagtacgtacacaaaaatttaaatttattaaagttacatttcgtagtgtgtacttgtgtagttcaaaatgtccccgtcaaatatgaaacaaaagaagcaaaaggcgctttagagcaggcccctgcgaggcccgggccctggttccgcggaaccatgctcagtacgccactgatctagagaactcttaaaattagctacaggtggatgttattgatcaattttctggaatgagctttcaagaaagagaaggctctcagtctaatagttccgaagctaccggctattttggtttcagtcgaataaggcaatacaataatggagagtacttaattttcccggagtggatcaggctaccaaatactgtgaccatttcatatagcaagtatttcagtatcttatgaacaaatgttaaatcagacttctaagcttcgatgacagaagacgtttacttagtaatgcgttatatgacttgaatatgtcttataggaataaggtgacacgaatgaaagacatctcttcgataaagatcttaacaccaaaagtttagcttctctagaaaaaagattctatacgctactcatactaattttaaatttgattcctttattgattcaccttcaaaatatttcatgtaattcgttaatactttccttatatacttattatatatcttcttctacggcactagagcccaaaatgagccttggcctccacctttgattatttgtggctgctcttctccatacacggactcttaaaatgcttgtgcgtcgctgcttactgtgtctttccagctcttactttgctttccaaccggtcttttccctgcattctagcgttcagtgctctttttggtatcctatcatctcccattcttatcacatgtccggtccattgcaatctttgtattttaatgaagtctgacaggggtgttttcttataaagttgataaagctcgttgttttatcgaattctgaagatttattatatatctaacgtattccttttaagcctagtaattctgccaacaagtttaatttttacttaatgtatatttaattttttgtaattcggtgattgaaacgtttatgacaactcttcaaccatgtaattatgtatatagcacatattatgtagttgtttataatatttagtgcagattgtgaaggaaggcaaaccaaataactcgttttaccagacgtttttataggacaatgttttatcacgctgaaataagacataccaaaaatgctgtttctcttaaaataaaaacccgcacatctttagtaaaagagcatgatcttgaaacgctcaaaaatggacagaagaaatttgaattgatgattttttcaaatctgaagaaaaatctatgaatttgtgatgatctagattaattagagctccgtatttagagaacgaaacttgaattgatgatttttttttcaaatctgaagaaaaatatatgaatttgtgatgatctagattaattagagcttcatatttagttcaaatgaactatcacaaatttggaagaatttgacgttgaaaaattgagccgatattggtatacagctcttgtaataatgttgcatatatctttcattcttctacactattgaacgtagttttttaacacgtctggatctttatatatatatttattaatgcaaatgtacagtatatgtgatgtaaaataatatctgaaaatatcttttgcttttcaagtattttaataaatcatataattttaaatttagtataagtatttattgtatggacgtatataatgcttggatatggttgaatgaaagttttgttccaa

SEQ ID NO: 1874 - DNA, 5059 bp, Diabrotica virgifera
cataatatatttcacaatagatctccacagtctcacaataatattttcattgtaaaagttttttcaaatacaacaacataaatatcagtacaacaaaactgcggcaagtaacaataaaattttagtttggtgttcatttgagaaatgtctcaaatagatcaattgtctattcttgattgtattctatacgtttattttagaaatcgttaatccgttcctatctccaacgtctatttcttttcaatacaaataataaaattactggaaaaatggattgagaccatccacagtgtgtctagcatttttacaggtagacagaggcaaccaataggcgcctcaatatctacctgatgaatgcatactacaattcactgcatactggaagtatgcttcaccgttaaagccagggggctcgaataatatgaaaattagtaaacatcaatttcttttgttgtcgttagtcgaaattatataaaaaataccaagcaatttattacgaagtattgtaaagatcataaacttgctaaaggataggacaattaaaaaatttctgtgattgactagcaatttttcgaaagctgcacttgctattgacttaaaaacattcaaattattcagtacaccaaaatgttaataggtcttgtctaataatattaataaggcattctacactcttatcatcacttatgtttcctatgtaattaaactaattttcccaaataatttgaatattttctatatagcgctataacttagtgacaaatgacaagtatgatgatctgtttatttccaattattacgaaatgcatttccacttaaatgccttttaaataaacaattttggaatcatgaaatctgtgattttgaaaattttgacaccttagactttggttcagcacccactgaaacccattgcactcgcaattttttttttgtcatttctacagcgaaaaccacggtgatccgcctacaaggcaatccgcctgaaactggttttcaaccgtattttaaaacagttacgtcgtgggagctggacctaatgtaaacagtgtcaaaagtaattgcaagatcttaattttaatgcgttatattggttgtcttatcttgcactcacattcacagttgtgcatcaaatttatctgcagaaatatttgagatcctaaattaaacgaagatatgaagaatttctatttagtcccatcattcagtaagttaattagacattttaatatattatctaataagttatccgttatcctcaatgtggtaatgcacaaaatgtattatctaatcgcttggattaattaaatttggcatttgctgtcatacttacacattctgagattggaaaatatgttttgcaacgatgtgaccgttgacagtcgtgacgtcaaatcaatgttggctactctggaaaggtttccaaacaaaacaaaaatctgtcaaaaattcacacgtggtgtttgccaatttttattttcgtttttataattggaatatattgcttgtaggatatttaatttgtataaaatggtaatgtgttgggtaccgattgtaatcaatgctcatagtatatttcccaccatatttcgaagtaggactggttaagatcttgaaaaaacgcagtaagtactatgtagtgtgtaacttccttgattttggtgtagggacatttataaaattaaaagcaatatgattgatattactaacaaggattgtgtctttatacaaaatgtgcagatgatttttaaaacaaaataaaattaaaaatgattacacaaaccacgtgtataatcaattgacagacgtcaaacgttcgctttgtttagaaacctttttgacgttctgacgtcacactatcacggtccattaccaaagatgtactggtcatcagatttcaaaaaatgttggttaaataagaaatatatattagacgaaaatgaagttttacgaattttgtgtaaaactatgtaatacctgacttgtatagatttttgttaaattattaaaggcatttaagtaagaagtctgatcagaaacaacaatatacgtcaagaaatggcaatataaatctgttatatttcaaggaaactaataaattgataaaatttcgtgtaatttttttttgataaatcactaatttaaaagaaaaaatatcgaaaatgtcaaacttgaaattttttaaaacttgtaaacaacaaatcagattactataaaagaatgcaaaaggcaaatcgagaataaacagattaaattaaatcctttgcaggactcttgctgtttctacagacaaaagtttcaatcctctccacaaaaacattttctaacgttttggattttattataaaaactatgcgatgattatctttacagagtttttctacgtttggatccaaaaactgcgaaaatatgtgtgaatggatctaactttgagttttatgaaaactaatgcatttaccactaatatgcaaaattaccagtcgggcgaattttttcttcttttctagagacaatgcaacttaatgaatttacacatacatgatgacagagaaataattacaaagttggataaataaagaaactactttgtactataagtgtacgttctgtataccaaagatttttttttctacgagtttattgcctactagtactacacatgatgatccgatgtatcaccacacatttaactgattagtatacagcaatgcatatttttcagaatacgcatatttttcagaataccttagaaatgatgttctaattacgcgtacgtgaaataaaattgaaaataatgtttaaaagcaaaatattgtaccacaagcgtgaaaatgtattacgcccaaaaattactagatacattaacaaaaaattcaggagaattttacgttgacgaatcatttacgaatttacgttattcacataagtatagcatactttttgattatcacattctgaaagaaaaatgggtgaatatcatttataataagccaaggcattttaagtcaactgaaaagtgatttaaaggtatgtatagcatattccgttacacaattcttatgttgatgatgacaatcaattaaatatatgaaccaccaaaataccaactatgacagtactacaccaaatcatcatgtacctttgtaaattaaatagctattgaaattaaaatgatttttgaaaaacaatacaatgacgaggttatgtacattcaattttcttttattgcactagaatcaacttttttctaaactctctgacattgtttttgggtaaacttatgattatgtattttataaattaacattcacacaacctatggtgaaagaaacgtctacaagagataataaaaacaggcaaagaacgttaacaatttatgctacagtttttgtgagtttgtagaaaatggtactagtctattgtatacttagtacttaaattttggactgaatactaaaaaaagttcattgtctttcaagatactttttaactcagatacctttccttgataagtggagtgtattccccttcctatagttcagatttatcttttcattactgaaatttgctcaggttgttaaacacagcattaatctgcgggtaaatctgcgcatgaaagagagtaaatataagctaaatttagaaatacttattgtataggactttctactcaacttacaatgctctaaaaacgggttctgcatttcaatgcctattttttctacgattctcatttaaaaatttcttgttttgacatcaattttcaaatatatcttgattgtgctgtgggtaatgcatgccacttttcaaccaattttgccacatatcaaaaaatattgtgaatcctcttgttgtagttcagatttatcttctcaagactgcaatttgttcaggttgttaaaaacagcattatggcacggttttggtgatgacaaagttgtggagatatttgtgcgattaatgataaatgtaattattctgtctcttattatgagtcttactcgtttctttggatagctgttcctatccatcaaagctggataagcaactaacttatttttacagtaagtagtaacaaatgagaattactacacttccttcttttcttttgctggcgttataatccgctttatctcaggtttttggccagttatcaatgatttgctgttttgtaactttctgaagtctgttcgtttgttgttggcggtaaatactggcattataagaaatacatttctgttctgtttattaattttgagcgctagttcataagtgacagctacaatcacaaatgagaatcagttaacacttccctttcgtgtgttgttaaagtttcagtaaccacgtgcctaatgttgacaaatcccttgtatcgtctcatactcacggtacaaacatgttctttacttcattacgaagtgttcaaagaaaccgatttaaatatgaagaaaacaatgacttacgtattcaaactgaatctattcaactatttttaatagtcatatctgactgattttcacagaattcataaaaactgtagcataaatttttgaaaagtagttgagaggcacaaatacgacaaacatttttgatcttcaagtattgaatttaccaactttaattatattggtaacacttttatttcagtaaacggtttcaacaaaagaattaaacgaaataatcgaagacagtgccttttcaactaataattgaaaagagttagattgagaaaaacaaggaagagtaaatgtttatcaatgttggaaataagttccgtaagctgtttatttgagatttacaatagtcattagttgcgataataagaaacaaaaaatagttattagcgagccttattgttatctataatttatataaaaaagaacagaaaacataccgaatttagtcagtaacaaaaacaaataagttattttagttatgtaaaggtgctttaagtggctctcccaatgattccttctttatttatacaagcaattcttatttgatcatacgtttcttgcgatccctgtaacatatttgtgagatctattcttctgaaatt

SEQ ID NO: 1875 - DNA, 3813 bp, Diabrotica virgifera
  SmartBlast Evalue=1E-147; Info=Endonuclease-reverse transcriptase n=1 Tax=Bombyx mori RepID=D5LB38_BOMMO
cataatatatttcacaatagatctccacagtctcacaataatattttcattgtaaaagttttttcaaatacaacaacataaatatcagtacaacaaaactgcggcaagtaacaataaaattttagtttggtgttcatttgagaaatgtctcaaatagatcaattgtctattcttgattgtattctatacgtttattttagaaatcgttaatccgttcctatctccaacgtctatttcttttcaatacaaataataaaattactggaaaaatggattgagaccatccacagtgtgtctagcatttttacaggtagacagaggcaaccaataggcgcctcaatatctacctgatgaatgcatactacaattcactgcatactggaagtatgcttcaccgttaaagccagggggctcgaataatatgaaaattagtaaacatcaatttcttttgttgtcgttagtcgaaattatataaaaaataccaagcaatttattacgaagtattgtaaagatcataaacttgctaaaggataggacaattaaaaaatttctgtgattgactagcaatttttcgaaagctgcacttgctattgacttaaaaacattcaaattattcagtacaccaaaatgttaataggtcttgtctaataatattaataaggcattctacactcttatcatcacttatgtttcctatgtaattaaactaattttcccaaataatttgaatattttctatatagcgctataacttagtgacaaatgacaagtatgatgatctgtttatttccaattattacgaaatgcatttccacttaaatgccttttaaataaacaattttggaatcatgaaatctgtgattttgaaaattttgacaccttagactttggttcagcacccactgaaacccattgcactcgcaattttttttttgtcatttctacagcgaaaaccacggtgatccgcctacaaggcaatccgcctgaaactggttttcaaccgtattttaaaacagttacgtcgtgggagctggacctaatgtaaacagtgtcaaaagtaattgcaagatcttaattttaatgcgttatattggttgtcttatcttgcactcacattcacagttgtgcatcaaatttatctgcagaaatatttgagatcctaaattaaacgaagatatgaagaatttctatttagtcccatcattcagtaagttaattagacattttaatatattatctaataagttatccgttatcctcaatgtggtaatgcacaaaatgtattatctaatcgcttggattaattaaatttggcatttgctgtcatacttacacattctgagattggaaaatatgttttgcaacgatgtgaccgttgacagtcgtgacgtcaaatcaatgttggctactctggaaaggtttccaaacaaaacaaaaatctgtcaaaaattcacacgtggtgtttgccaatttttattttcgtttttataattggaatatattgcttgtaggatatttaatttgtataaaatggtaatgtgttgggtaccgattgtaatcaatgctcatagtatatttcccaccatatttcgaagtaggactggttaagatcttgaaaaaacgcagtaagtactatgtagtgtgtaacttccttgattttggtgtagggacatttataaaattaaaagcaatatgattgatattactaacaaggattgtgtctttatacaaaatgtgcagatgatttttaaaacaaaataaaattaaaaatgattacacaaatcacgtgtataaacaattctcagacgtcaaacttttgctttgtttggaaactttttgacgttttcacgtcacactatcacggtccttcttcttcttcttaacgtgccctatcaagtccccttgacgttggcgattaacatggcgaaactgtctctgtctcgagctattctaaataggtgttctgctttctttattcctgtccactcccggatattcttcaaccaagaggcctgctttctaccaattcctctgcgtccttcgattttacccatcataataagttgaagaatattataccggtctccccttactacgtgtccaaaataggccatctttctatatttgatgttatcaagcagctcgcgggtagcatttgctctcttaaggactgccacatttgtcagcatagccgtccatggtattttcagaatacgtctgtgcagccacatttcaaaggcctccaaacggttaatggtggatatttttaatgtccatgcttcgacaccatacaagaggactgaccaaatgtagcatttaatcatgcgctttcgaagttgaagttgcaaggtatcattacagaagaatgacctcatttttaaaaatgtcgtgcgggctatctcgattctacattttatctctttatctggatctagttgttcagtaatatggcaaccaagatatttaaaactgggtactctttgaattatatgaccatcaacatataaccgtgaatcttgatgggccaaacggctaaataccatgtatttgtttttgaacagtttatatttaggccaaactctcttcccactgtgtcaatggcatttaaaaggtgttgtaatccattcatatcatcacttaaaataactgtatcgtctgcatatctgattgtatttatcagaattccattaactttcacaccccattccaaattatgcagcgcttccttaaatattctatctgaatataaattgaataacagtggggacagtatacaaccctgtctgacacctctttgtattttgcatatttctgttgattttccatttatgcaagctgtcgctgtttgacgccagtataatttttctatgattcgtacatcttgactatcaactcctttatcctttaatattttaattaatttgtgatgttgtactcgatcaaaggccttctcatagtcaataaatacagcaaagacgtctttcctttgatctcggcatttctgcaataatacatttagtgcaaagagtgcgtcccgggttcccagtccatttctgaagccaaattgtgtttcatcctggtcttcttcacatttatctctgattctactgtggatgatacgtagaaagattttcaaagtgtggctcataaggcttatcattctataatcgctacagtttttcggacgttgtttttttggtagggttatgaattcggactttaaccaatcttcagggatatcaccagtcgaataaacatcattgaaaagtttgactagtattccaatgttttcctcatttatgagctttaacatttctgtaggtatgttgtcgggaccaacggctttcttgttttttgccaattttatagcatgtagtatttctgatttcagtatttctggtccttcaccttcatctaaagtctccagttcttcgggtctatcatcattatacagttcatttatataattataccaggtagttcgaatttcgtgttcgtctatttacataaacgattataacttcgaagtgattacagaatttacataatatctagggacaaaatcaccaataacaacaaattagaacctgatgttgatatgcgaataatggcgaaacagatttttcttttcaatgcaacatctactgtattcaaaacttctctgacggggtgcaaaaatccagatatatatggaagagtaaataaattgcggagatagcgttacaagcgaatggatatacacaacgagttagagtctctcttcggaaaggaaaatctagtgaggtatacagggtgtttggtagagaatgggcc

SEQ ID NO: 1876 - DNA, 3295 bp, Diabrotica virgifera
  SmartBlast Evalue=1E-104; Info=Endonuclease-reverse transcriptase n=1 Tax=Bombyx mori RepID=D5LB38_BOMMO
cataatatatttcacaatagatctccacagtctcacaataatattttcattgtaaaagttttttcaaatacaacaacataaatatcagtacaacaaaactgcggcaagtaacaataaaattttagtttggtgttcatttgagaaatgtctcaaatagatcaattgtctattcttgattgtattctatacgtttattttagaaatcgttaatccgttcctatctccaacgtctatttcttttcaatacaaataataaaattactggaaaaatggattgagaccatccacagtgtgtctagcatttttacaggtagacagaggcaaccaataggcgcctcaatatctacctgatgaatgcatactacaattcactgcatactggaagtatgcttcaccgttaaagccagggggctcgaataatatgaaaattagtaaacatcaatttcttttgttgtcgttagtcgaaattatataaaaaataccaagcaatttattacgaagtattgtaaagatcataaacttgctaaaggataggacaattaaaaaatttctgtgattgactagcaatttttcgaaagctgcacttgctattgacttaaaaacattcaaattattcagtacaccaaaatgttaataggtcttgtctaataatattaataaggcattctacactcttatcatcacttatgtttcctatgtaattaaactaattttcccaaataatttgaatattttctatatagcgctataacttagtgacaaatgacaagtatgatgatctgtttatttccaattattacgaaatgcatttccacttaaatgccttttaaataaacaattttggaatcatgaaatctgtgattttgaaaattttgacaccttagactttggttcagcacccactgaaacccattgcactcgcaattttttttttgtcatttctacagcgaaaaccacggtgatccgcctacaaggcaatccgcctgaaactggttttcaaccgtattttaaaacagttacgtcgtgggagctggacctaatgtaaacagtgtcaaaagtaattgcaagatcttaattttaatgcgttatattggttgtcttatcttgcactcacattcacagttgtgcatcaaatttatctgcagaaatatttgagatcctaaattaaacgaagatatgaagaatttctatttagtcccatcattcagtaagttaattagacattttaatatattatctaataagttatccgttatcctcaatgtggtaatgcacaaaatgtattatctaatcgcttggattaattaaatttggcatttgctgtcatacttacacattctgagattggaaaatatgttttgcaacgatgtgaccgttgacagtcgtgacgtcaaatcaatgttggctactctggaaaggtttccaaacaaaacaaaaatctgtcaaaaattcacacgtggtgtttgccaatttttattttcgtttttataattggaatatattgcttgtaggatatttaatttgtataaaatggtaatgtgttgggtaccgattgtaatcaatgctcatagtatatttcccaccatatttcgaagtaggactggttaagatcttgaaaaaacgcagtaagtactatgtagtgtgtaacttccttgattttggtgtagggacatttataaaattaaaagcaatatgattgatattactaacaaggattgtgtctttatacaaaatgtgcagatgatttttaaaacaaaataaaattaaaaatgattacacaaatcacgtgtataaacaattctcagacgtcaaacttttgctttgtttggaaactttttgacgttttcacgtcacactatcacggtccttcttcttcttcttaacgtgccctatcaagtccccttgacgttggcgattaacatggcgaaactgtctctgtctcgagctattctaaataggtgttctgctttctttattcctgtccactcccggatattcttcaaccaagaggcctgctttctaccaattcctctgcgtccttcgattttacccatcataataagttgaagaatattataccggtctccccttactacgtgtccaaaataggccatctttctatatttgatgttatcaagcagctcgcgggtagcatttgctctcttaaggactgccacatttgtcagcatagccgtccatggtattttcagaatacgtctgtgcagccacatttcaaaggcctccaaacggttaatggtggatatttttaatgtccatgcttcgacaccatacaagaggactgaccaaatgtagcatttaatcatgcgctttcgaagttgaagttgcaaggtatcattacagaagaatgacctcatttttaaaaatgtcgtgcgggctatctcgattctacattttatctctttatctggatctagttgttcagtaatatggcaaccaagatatttaaaactgggtactctttgaattatatgaccatcaacatataaccgtgaatcttgatgggccaaacggctaaataccatgtatttgtttttgaacagtttatatttaggccaaactctcttcccactgtgtcaatggcatttaaaaggtgttgtaatccattcatatcatcacttaaaataactgtatcgtctgcatatctgattgtatttatcagaattccattaactttcacaccccattccaaattatgcagcgcttccttaaatattctatctgaatataaattgaataacagtggggacagtatacaaccctgtctgacacctctttgtattttgcatatttctgttgattttccatttatgcaagctgtcgctgtttgacgccagtataatttttctatgattcgtacatcttgactatcaactcctttatcctttaatattttaattaatttgtgatgttgtactcgatcaaaggccttctcatagtcaataaatacagcaaagacgtctttcctttgatctcggcatttctgcaataatacatttagtgcaaagagtgcgtcccgggttcccagtccatttctgaagccaaattgtgtttcatcctggtcttcttcactattcctgattcaataatatgatctctatattcatttggtgttaaaaatccttcaatttgaacgagatcagtttgaaaacctatcgaaactccagctcgaaccatcaaagttcctccttgatatctgtcaacttcttgaatagtttgcaagcgagatgctcgccagtggttcgccacaccctcgatcttcgtgaattggtgaaat

SEQ ID NO: 1877 - DNA, 3131 bp, Diabrotica virgifera
  SmartBlast Evalue=1E-88; Info=Endonuclease-reverse transcriptase n=1 Tax=Bombyx mori RepID=D5LB38_BOMMO
cataatatatttcacaatagatctccacagtctcacaataatattttcattgtaaaagttttttcaaatacaacaacataaatatcagtacaacaaaactgcggcaagtaacaataaaattttagtttggtgttcatttgagaaatgtctcaaatagatcaattgtctattcttgattgtattctatacgtttattttagaaatcgttaatccgttcctatctccaacgtctatttcttttcaatacaaataataaaattactggaaaaatggattgagaccatccacagtgtgtctagcatttttacaggtagacagaggcaaccaataggcgcctcaatatctacctgatgaatgcatactacaattcactgcatactggaagtatgcttcaccgttaaagccagggggctcgaataatatgaaaattagtaaacatcaatttcttttgttgtcgttagtcgaaattatataaaaaataccaagcaatttattacgaagtattgtaaagatcataaacttgctaaaggataggacaattaaaaaatttctgtgattgactagcaatttttcgaaagctgcacttgctattgacttaaaaacattcaaattattcagtacaccaaaatgttaataggtcttgtctaataatattaataaggcattctacactcttatcatcacttatgtttcctatgtaattaaactaattttcccaaataatttgaatattttctatatagcgctataacttagtgacaaatgacaagtatgatgatctgtttatttccaattattacgaaatgcatttccacttaaatgccttttaaataaacaattttggaatcatgaaatctgtgattttgaaaattttgacaccttagactttggttcagcacccactgaaacccattgcactcgcaattttttttttgtcatttctacagcgaaaaccacggtgatccgcctacaaggcaatccgcctgaaactggttttcaaccgtattttaaaacagttacgtcgtgggagctggacctaatgtaaacagtgtcaaaagtaattgcaagatcttaattttaatgcgttatattggttgtcttatcttgcactcacattcacagttgtgcatcaaatttatctgcagaaatatttgagatcctaaattaaacgaagatatgaagaatttctatttagtcccatcattcagtaagttaattagacattttaatatattatctaataagttatccgttatcctcaatgtggtaatgcacaaaatgtattatctaatcgcttggattaattaaatttggcatttgctgtcatacttacacattctgagattggaaaatatgttttgcaacgatgtgaccgttgacagtcgtgacgtcaaatcaatgttggctactctggaaaggtttccaaacaaaacaaaaatctgtcaaaaattcacacgtggtgtttgccaatttttattttcgtttttataattggaatatattgcttgtaggatatttaatttgtataaaatggtaatgtgttgggtaccgattgtaatcaatgctcatagtatatttcccaccatatttcgaagtaggactggttaagatcttgaaaaaacgcagtaagtactatgtagtgtgtaacttccttgattttggtgtagggacatttataaaattaaaagcaatatgattgatattactaacaaggattgtgtctttatacaaaatgtgcagatgatttttaaaacaaaataaaattaaaaatgattacacaaatcacgtgtataaacaattctcagacgtcaaacttttgctttgtttggaaactttttgacgttttcacgtcacactatcacggtccttcttcttcttcttaacgtgccctatcaagtccccttgacgttggcgattaacatggcgaaactgtctctgtctcgagctattctaaataggtgttctgctttctttattcctgtccactcccggatattcttcaaccaagaggcctgctttctaccaattcctctgcgtccttcgattttacccatcataataagttgaagaatattataccggtctccccttactacgtgtccaaaataggccatctttctatatttgatgttatcaagcagctcgcgggtagcatttgctctcttaaggactgccacatttgtcagcatagccgtccatggtattttcagaatacgtctgtgcagccacatttcaaaggcctccaaacggttaatggtggatatttttaatgtccatgcttcgacaccatacaagaggactgaccaaatgtagcatttaatcatgcgctttcgaagttgaagttgcaaggtatcattacagaagaatgacctcatttttaaaaatgtcgtgcgggctatctcgattctacattttatctctttatctggatctagttgttcagtaatatggcaaccaagatatttaaaactgggtactctttgaattatatgaccatcaacatataaccgtgaatcttgatgggccaaacggctaaataccatgtatttgtttttgaacagtttatatttaggccaaactctcttcccactgtgtcaatggcatttaaaaggtgttgtaatccattcatatcatcacttaaaataactgtatcgtctgcatatctgattgtatttatcagaattccattaactttcacaccccattccaaattatgcagcgcttccttaaatattctatctgaatataaattgaataacagtggggacagtatacaaccctgtctgacacctctttgtattttgcatatttctgttgattttccatttatgcaagctgtcgctgtttgacgccagtataatttttctatgattcgtacatcttgactatcaactcctttatcctttaatattttaattaatttgtgatgttgtactcgatcaaaggccttctcatagtcaataaatacagcaattttagtcattacataacctatatctctgatctattgtgccatctcattctgcttcactttactgacacaaaaacaccataaaaatgattaagggaagtattatacttcacaatttatagatatatagatctattgtcgcaactagtttcgcaggtgc

SEQ ID NO: 1878 - DNA, 2438 bp, Diabrotica virgifera
  SmartBlast Evalue=1E-147; Info=Endonuclease-reverse transcriptase n=1 Tax=Bombyx mori RepID=D5LB38_BOMMO
cttaaagacttgtcgacaggtggcgctagtgttacatatcttcggaattccccagccaaagcagaggagatgcacaaatggatccgttcattgaatactttcatttgacacataccttgatctaaagtgacaacgtgtttccctaaaactgctgaaatttactgttctaagtaatttactattctaattgggaaataagccagaatttaacttgaaaactgatgtaatttaacaaaataataatttaataataaaataaaatgatttttcaagttaaattgtgactcatttaccaattagaacagtaaattaaataaatgccacaaaaagaaagcttcagaacaatattactgctctaaggtcatatctacctctctcgaattaatgggctcctatgaagattccaaattattaatatgccatttctcatcagatttgcgaaaatatttcagttctcgtgttaaaataaatcttcaaaatttcacaaatagctccttcttcttcttaacgtgccctatcaagtccccttgacgttggcgattaacatggcgaaactgtctctgtctcgagctattctaaataggtgttctgctttctttattcctgtccactcccggatattcttcaaccaagaggcctgctttctaccaattcctctgcgtccttcgattttacccatcataataagttgaagaatattataccggtctccccttactacgtgtccaaaataggccatctttctatatttgatgttatcaagcagctcgcgggtagcatttgctctcttaaggactgccacatttgtcagcatagccgtccatggtattttcagaatacgtctgtgcagccacatttcaaaggcctccaaacggttaatggtggatatttttaatgtccatgcttcgacaccatacaagaggactgaccaaatgtagcatttaatcatgcgctttcgaagttgaagttgcaaggtatcattacagaagaatgacctcatttttaaaaatgtcgtgcgggctatctcgattctacattttatctctttatctggatctagttgttcagtaatatggcaaccaagatatttaaaactgggtactctttgaattatatgaccatcaacatataaccgtgaatcttgatgggccaaacggctaaataccatgtatttgtttttgaacagtttatatttaggccaaactctcttcccactgtgtcaatggcatttaaaaggtgttgtaatccattcatatcatcacttaaaataactgtatcgtctgcatatctgattgtatttatcagaattccattaactttcacaccccattccaaattatgcagcgcttccttaaatattctatctgaatataaattgaataacagtggggacagtatacaaccctgtctgacacctctttgtattttgcatatttctgttgattttccatttatgcaagctgtcgctgtttgacgccagtataatttttctatgattcgtacatcttgactatcaactcctttatcctttaatattttaattaatttgtgatgttgtactcgatcaaaggccttctcatagtcaataaatacagcaaagacgtctttcctttgatctcggcatttctgcaataatacatttagtgcaaagagtgcgtcccgggttcccagtccatttctgaagccaaattgtgtttcatcctggtcttcttcacatttatctctgattctactgtggatgatacgtagaaagattttcaaagtgtggctcataaggcttatcattctataatcgctacagtttttcggacgttgtttttttggtagggttatgaattcggactttaaccaatcttcagggatatcaccagtcgaataaacatcattgaaaagtttgactagtattccaatgttttcctcatttatgagctttaacatttctgtaggtatgttgtcgggaccaacggctttcttgttttttgccaattttatagcatgtagtatttctgatttcagtatttctggtccttcaccttcatctaaagtctccagttcttcgggtctatcatcattatacagttcatttatataattataccaggtagttcgaatttcgtgttcgtctatttacataaacgattataacttcgaagtgattacagaatttacataatatctagggacaaaatcaccaataacaacaaattagaacctgatgttgatatgcgaataatggcgaaacagatttttcttttcaatgcaacatctactgtattcaaaacttctctgacggggtgcaaaaatccagatatatatggaagagtaaataaattgcggagatagcgttacaagcgaatggatatacacaacgagttagagtctctcttcggaaaggaaaatctagtgaggtatacagggtgtttggtagagaatgggcc

SEQ ID NO: 1879 - DNA, 1920 bp, Diabrotica virgifera
  SmartBlast Evalue=1E-104; Info=Endonuclease-reverse transcriptase n=1 Tax=Bombyx mori RepID=D5LB38_BOMMO
cttaaagacttgtcgacaggtggcgctagtgttacatatcttcggaattccccagccaaagcagaggagatgcacaaatggatccgttcattgaatactttcatttgacacataccttgatctaaagtgacaacgtgtttccctaaaactgctgaaatttactgttctaagtaatttactattctaattgggaaataagccagaatttaacttgaaaactgatgtaatttaacaaaataataatttaataataaaataaaatgatttttcaagttaaattgtgactcatttaccaattagaacagtaaattaaataaatgccacaaaaagaaagcttcagaacaatattactgctctaaggtcatatctacctctctcgaattaatgggctcctatgaagattccaaattattaatatgccatttctcatcagatttgcgaaaatatttcagttctcgtgttaaaataaatcttcaaaatttcacaaatagctccttcttcttcttaacgtgccctatcaagtccccttgacgttggcgattaacatggcgaaactgtctctgtctcgagctattctaaataggtgttctgctttctttattcctgtccactcccggatattcttcaaccaagaggcctgctttctaccaattcctctgcgtccttcgattttacccatcataataagttgaagaatattataccggtctccccttactacgtgtccaaaataggccatctttctatatttgatgttatcaagcagctcgcgggtagcatttgctctcttaaggactgccacatttgtcagcatagccgtccatggtattttcagaatacgtctgtgcagccacatttcaaaggcctccaaacggttaatggtggatatttttaatgtccatgcttcgacaccatacaagaggactgaccaaatgtagcatttaatcatgcgctttcgaagttgaagttgcaaggtatcattacagaagaatgacctcatttttaaaaatgtcgtgcgggctatctcgattctacattttatctctttatctggatctagttgttcagtaatatggcaaccaagatatttaaaactgggtactctttgaattatatgaccatcaacatataaccgtgaatcttgatgggccaaacggctaaataccatgtatttgtttttgaacagtttatatttaggccaaactctcttcccactgtgtcaatggcatttaaaaggtgttgtaatccattcatatcatcacttaaaataactgtatcgtctgcatatctgattgtatttatcagaattccattaactttcacaccccattccaaattatgcagcgcttccttaaatattctatctgaatataaattgaataacagtggggacagtatacaaccctgtctgacacctctttgtattttgcatatttctgttgattttccatttatgcaagctgtcgctgtttgacgccagtataatttttctatgattcgtacatcttgactatcaactcctttatcctttaatattttaattaatttgtgatgttgtactcgatcaaaggccttctcatagtcaataaatacagcaaagacgtctttcctttgatctcggcatttctgcaataatacatttagtgcaaagagtgcgtcccgggttcccagtccatttctgaagccaaattgtgtttcatcctggtcttcttcactattcctgattcaataatatgatctctatattcatttggtgttaaaaatccttcaatttgaacgagatcagtttgaaaacctatcgaaactccagctcgaaccatcaaagttcctccttgatatctgtcaacttcttgaatagtttgcaagcgagatgctcgccagtggttcgccacaccctcgatcttcgtgaattggtgaaat

SEQ ID NO: 1880 - DNA, 1756 bp, Diabrotica virgifera
  SmartBlast Evalue=5E-89; Info=Endonuclease-reverse transcriptase n=1 Tax=Bombyx mori RepID=D5LB38_BOMMO
cttaaagacttgtcgacaggtggcgctagtgttacatatcttcggaattccccagccaaagcagaggagatgcacaaatggatccgttcattgaatactttcatttgacacataccttgatctaaagtgacaacgtgtttccctaaaactgctgaaatttactgttctaagtaatttactattctaattgggaaataagccagaatttaacttgaaaactgatgtaatttaacaaaataataatttaataataaaataaaatgatttttcaagttaaattgtgactcatttaccaattagaacagtaaattaaataaatgccacaaaaagaaagcttcagaacaatattactgctctaaggtcatatctacctctctcgaattaatgggctcctatgaagattccaaattattaatatgccatttctcatcagatttgcgaaaatatttcagttctcgtgttaaaataaatcttcaaaatttcacaaatagctccttcttcttcttaacgtgccctatcaagtccccttgacgttggcgattaacatggcgaaactgtctctgtctcgagctattctaaataggtgttctgctttctttattcctgtccactcccggatattcttcaaccaagaggcctgctttctaccaattcctctgcgtccttcgattttacccatcataataagttgaagaatattataccggtctccccttactacgtgtccaaaataggccatctttctatatttgatgttatcaagcagctcgcgggtagcatttgctctcttaaggactgccacatttgtcagcatagccgtccatggtattttcagaatacgtctgtgcagccacatttcaaaggcctccaaacggttaatggtggatatttttaatgtccatgcttcgacaccatacaagaggactgaccaaatgtagcatttaatcatgcgctttcgaagttgaagttgcaaggtatcattacagaagaatgacctcatttttaaaaatgtcgtgcgggctatctcgattctacattttatctctttatctggatctagttgttcagtaatatggcaaccaagatatttaaaactgggtactctttgaattatatgaccatcaacatataaccgtgaatcttgatgggccaaacggctaaataccatgtatttgtttttgaacagtttatatttaggccaaactctcttcccactgtgtcaatggcatttaaaaggtgttgtaatccattcatatcatcacttaaaataactgtatcgtctgcatatctgattgtatttatcagaattccattaactttcacaccccattccaaattatgcagcgcttccttaaatattctatctgaatataaattgaataacagtggggacagtatacaaccctgtctgacacctctttgtattttgcatatttctgttgattttccatttatgcaagctgtcgctgtttgacgccagtataatttttctatgattcgtacatcttgactatcaactcctttatcctttaatattttaattaatttgtgatgttgtactcgatcaaaggccttctcatagtcaataaatacagcaattttagtcattacataacctatatctctgatctattgtgccatctcattctgcttcactttactgacacaaaaacaccataaaaatgattaagggaagtattatacttcacaatttatagatatatagatctattgtcgcaactagtttcgcaggtgc

SEQ ID NO: 1881 - DNA, 1523 bp, Diabrotica virgifera
ccttgttgtagatcagatttatcttttcattactgaaatttgctcaggttgttaaacacagcattaatctgcgcatgaaggagacaataaatataagctaaaactacaaatacttattgtataggactttctactcaacttacaatgctctaaaaacgggttctgcatttcaatgcctattttttctacgattctcatttaaaaatttcttgttttgacatcaattttcaaatatatcttgattgtgctgtgggtaatgcatgccacttttcaaccaattttgccacatatcaaaaaatattgtgaatcctcttgttgtagttcagatttatcttctcaagactgcaatttgttcaggttgttaaaaacagcattatggcacggttttggtgatgacaaagttgtggagatatttgtgcgattaatgataaatgtaattattctgtctcttattatgagtcttactcgtttctttggatagctgttcctatccatcaaagctggataagcaactaacttatttttacagtaagtagtaacaaatgagaattactacacttccttcttttcttttgctggcgttataatccgctttatctcaggtttttggccagttatcaatgatttgctgttttgtaactttctgaagtctgttcgtttgttgttggcggtaaatactggcattataagaaatacatttctgttctgtttattaattttgagcgctagttcataagtgacagctacaatcacaaatgagaatcagttaacacttccctttcgtgtgttgttaaagtttcagtaaccacgtgcctaatgttgacaaatcccttgtatcgtctcatactcacggtacaaacatgttctttacttcattacgaagtgttcaaagaaaccgatttaaatatgaagaaaacaatgacttacgtattcaaactgaatctattcaactatttttaatagtcatatctgactgattttcacagaattcataaaaactgtagcataaatttttgaaaagtagttgagaggcacaaatacgacaaacatttttgatcttcaagtattgaatttaccaactttaattatattggtaacacttttatttcagtaaacggtttcaacaaaagaattaaacgaaataatcgaagacagtgccttttcaactaataattgaaaagagttagattgagaaaaacaaggaagagtaaatgtttatcaatgttggaaataagttccgtaagctgtttatttgagatttacaatagtcattagttgcgataataagaaacaaaaaatagttattagcgagccttattgttatctataatttatataaaaaagaacagaaaacataccgaatttagtcagtaacaaaaacaaataagttattttagttatgtaaaggtgctttaagtggctctcccaatgattccttctttatttatacaagcaattcttatttgatcatacgtttcttgcgatccctgtaacatatttgtgagatctattcttctgaaatt

SEQ ID NO: 1882 - DNA, 3468 bp, Diabrotica virgifera
  SmartBlast Evalue=1E-25; Info=Peptidoglycan recognition protein la n=1 Tax=Culex quinquefasciatus RepID=B0WH90_CULQU
aatattgaatagaaggatttagtgagccgatgattaaaaagcagagcaccataggcgtggccacagagggtgtggttgaaaccactttcactttttgttgaaaactttataggggtgcataaattaggatagttcatttctagaaacaactaatctgtaaaaatctctcatcgcatgtccgaagaactcaagttttcgtattttctaaaattgaaagagggaatacaaaattttgctcgaagaaaatagagacggcgatatatagaagttttgataaaggcgtaatagtcaaaaaaagcttttaccagaggacttttaataattttttatagctcggaactctttttttgtttttaagaggaaacaggtagcaaaacgcgttccaagattgcggctgtaattttgaatattttttcgagatatttggcacacgtattcgtaatataataaagaatggcggtacagagcccaatttgaaaaatatattaatatgtggaaattactctgtaattaaatacaatattaaaaaaacgagcctgtaccgccattaagaagaacaaaaacatacactttcttcaataaacttttttatcccatgcctagattttgtgtaatcttggaactactaaaattttttatttctaacaagaaatcgaacatattataactaataactaattcggcaacatagagaaattatcactgtcattttgacaaacctgcgtcatattttctctaatctgttctgtcatctttatcgatatctgttcagtgcagtagtgtgttaatttaagaattcgttattgtggtttcataggaaagtaatgtttattgatagttaatttattatatttgttgttgttgtataagttgttggcctctttgaaagaatagattgttgttaattgtgagttttagttatatgtaggtaggtaggtaagtatattttacgtaaaaatatttcgaattctaatgcgagtatataaagttttaggagaattttttattctaaaaatattatcaataatttaacaaaatcggaaaagttaatcaaacgaaaaataaagcgaatccttccaagaaaaaatccattaaaaaccgtgccaacattatgagaacatcgaaatttgtttcgcttcacaacgaaaaacgattatttattattgttttattattagatatttcatgcaaatacctatcttaacataaaattttcacccattttggtttatttttataaatatttatttactaataataaaatcgtgttctattaattccatttagcgcgactatgatattgtcaaaatattaatcttagataatgtcgaagattaccacggttgccaaagtttatgatactatctcccgaagttatattttgttgctacctgttgatcgctactgttggctcttaaatctacaaataggttgtaaaaaatctactctatacagagtttttgatgctgtgaactagaaaatgatgtcttgttaaacactgtgatcaaaactgctgaaaacaggtcccatgctaccttagattttaaatcgatgtcactataatgacagaattcctttagaaccccaaacacattagttccaggactgacactaaccgctgtttgattttcacctacgatgatataatctggagccaacttagatagtttcacaccttgccttaacaaaagcgttagacttgtcaccatatcgtccgttatcagatccacattgaagtttcctatgaagcttacagcgatgctgacgattggatagccatttctgacgtcccaacctcttgccacgtaaatactgccgtctactcctatcaggaagttttcagccaaatcataatacccctggctatttatatcgtagtcctgcaaagtccgaactatcttggaacagttcttcaaaccatcacatgttttggtgttggtgtgtcctaccacaactagtcctaacggaagaggctggaaaactctgttcgtaggaggaacaccatcatagtcatctctgtagtagacactgtagtttcctaatgtatgcccataacatgtatctactggtggaaacttgtttttgtttattgttgagatacctaacaaatatacaattagacaggaggatagagttatcaggaagaaactaatcttcaggatgaaatctcgcttaatttttcgttctttccagcaggtgatttggaaggtggggcaaattttgcggcgttgtttgaaagttgtttcattggatcggagtctagcggaatacccttgtagtcggtaggatcgaaatgttgaaactgattgattacagccagaacatttttccccggacttttagtcgtgttaacttggttgtggccaatcaatttgtagtcttcggataaatacttatgatctgttccgtgcttcagcagtgcctttgttgctttaaacatggtaagtgtgaagggatctatctggaaatttcctattaacactatctcgatacagtttgccctagaagctgggaggatgttccatccccttccaaaataagcgtttccgtcagcaccaataccaaaattaaaatatatgtctggtaaatcgttatcaccgatgtccgttgattgcaacgtctgcatcttcttggcacactgctcaaaattagagcaatttccacctgctgtatgtttcagaatgactaaacctacaggagttttcagctcctccattttccccaccgcttttcttcccccccaaacctcttttggtatcagtctagaggacgagttggttattattatggtatcctctttatgtgggatttgatcttgagcatcttttcgtaagacgaatactaatatcacagctgtagtagatacgagaaatactaataacactcctatcaagtatattcgcaatgtacatttttttctggctgaaaaggctacttcatcttctttctggactttcgcagagacgtccgtgtatttaggtggcgatatttccgacttttcctcaatttccacaggttgtccatccttattgtggaaaatagtaacattcccattaacgttaaactgagtcacaggcccaataatcacatcgttcgaattgtcaatgttgaccacggcattttctaagttaaccaactcccggtttattagctcacgattagcaacttcagcgaactcattactacagacatccaagccaccgttgttgtacccatcgtcgtactcgctgagcgccacatccgaattggggggattggggagctcagaaggtttagcgtccaagttggggcccattaacgatggataggagaaccgatgggacatggagaactctcatagctggccaaagttgaagcacgcactactcccaattcatttttttagacggcattgttgtttttatctatcgctgctctttatcgcgaatattatttaaagtttgaagtgaacggtgcttaatgtaagtc

SEQ ID NO: 1883 - DNA, 3180 bp, Diabrotica virgifera
  SmartBlast Evalue=1E-25; Info=Peptidoglycan recognition protein la n=1 Tax=Culex quinquefasciatus RepID=B0WH90_CULQU
atacttctatacaatttatgtatacatacacataatatagatacgtacaaaatttatttgccgaagagatgacggtcgcgatgatggtcgcgaaataatcctttttccccatcctaaaataggttttacatttattttaagtttaaatatacttctatacaatttatatatacatacaaataatatatagcataagcgatgatggtcgcgaattcaatgctttttcccctattcaaaaatcgcacaacgtccctaaagaagttttcacttcaaaaataaacttttatcaaataaacttttttatcccatgcctagattttgtataatcttggaactactaaaattttttatttctaacaagaaatcgaacatattataactaataactaattcggcaacatagagaaattatcactgtcattttgacaaacctgcgtcatattttctctaatctgttctgtcatctttatcgatatctgttcagtgcagtagtgtgttaatttaagaattcgttattgtggtttcataggaaagtaatgtttattgatagttaatttattatatttgttgttgttgtataagttgttggcctctttgaaagaatagattgttgttaattgtgagttttagttatatgtaggtaggtaggtaagtatattttacgtaaaaatatttcgaattctaatgcgagtatataaagttttaggagaattttttattctaaaaatattatcaataatttaacaaaatcggaaaagttaatcaaacgaaaaataaagcgaatccttccaagaaaaaatccattaaaaaccgtgccaacattatgagaacatcgaaatttgtttcgcttcacaacgaaaaacgattatttattattgttttattattagatatttcatgcaaatacctatcttaacataaaattttcacccattttggtttatttttataaatatttatttactaataataaaatcgtgttctattaattccatttagcgcgactatgatattgtcaaaatattaatcttagataatgtcgaagattaccacggttgccaaagtttatgatactatctcccgaagttatattttgttgctacctgttgatcgctactgttggctcttaaatctacaaataggttgtaaaaaatctactctatacagagtttttgatgctgtgaactagaaaatgatgtcttgttaaacactgtgatcaaaactgctgaaaacaggtcccatgctaccttagattttaaatcgatgtcactataatgacagaattcctttagaaccccaaacacattagttccaggactgacactaaccgctgtttgattttcacctacgatgatataatctggagccaacttagatagtttcacaccttgccttaacaaaagcgttagacttgtcaccatatcgtccgttatcagatccacattgaagtttcctatgaagcttacagcgatgctgacgattggatagccatttctgacgtcccaacctcttgccacgtaaatactgccgtctactcctatcaggaagttttcagccaaatcataatacccctggctatttatatcgtagtcctgcaaagtccgaactatcttggaacagttcttcaaaccatcacatgttttggtgttggtgtgtcctaccacaactagtcctaacggaagaggctggaaaactctgttcgtaggaggaacaccatcatagtcatctctgtagtagacactgtagtttcctaatgtatgcccataacatgtatctactggtggaaacttgtttttgtttattgttgagatacctaacaaatatacaattagacaggaggatagagttatcaggaagaaactaatcttcaggatgaaatctcgcttaatttttcgttctttccagcaggtgatttggaaggtggggcaaattttgcggcgttgtttgaaagttgtttcattggatcggagtctagcggaatacccttgtagtcggtaggatcgaaatgttgaaactgattgattacagccagaacatttttccccggacttttagtcgtgttaacttggttgtggccaatcaatttgtagtcttcggataaatacttatgatctgttccgtgcttcagcagtgcctttgttgctttaaacatggtaagtgtgaagggatctatctggaaatttcctattaacactatctcgatacagtttgccctagaagctgggaggatgttccatccccttccaaaataagcgtttccgtcagcaccaataccaaaattaaaatatatgtctggtaaatcgttatcaccgatgtccgttgattgcaacgtctgcatcttcttggcacactgctcaaaattagagcaatttccacctgctgtatgtttcagaatgactaaacctacaggagttttcagctcctccattttccccaccgcttttcttcccccccaaacctcttttggtatcagtctagaggacgagttggttattattatggtatcctctttatgtgggatttgatcttgagcatcttttcgtaagacgaatactaatatcacagctgtagtagatacgagaaatactaataacactcctatcaagtatattcgcaatgtacatttttttctggctgaaaaggctacttcatcttctttctggactttcgcagagacgtccgtgtatttaggtggcgatatttccgacttttcctcaatttccacaggttgtccatccttattgtggaaaatagtaacattcccattaacgttaaactgagtcacaggcccaataatcacatcgttcgaattgtcaatgttgaccacggcattttctaagttaaccaactcccggtttattagctcacgattagcaacttcagcgaactcattactacagacatccaagccaccgttgttgtacccatcgtcgtactcgctgagcgccacatccgaattggggggattggggagctcagaaggtttagcgtccaagttggggcccattaacgatggataggagaaccgatgggacatggagaactctcatagctggccaaagttgaagcacgcactactcccaattcatttttttagacggcattgttgtttttatctatcgctgctctttatcgcgaatattatttaaagtttgaagtgaacggtgcttaatgtaagtc

SEQ ID NO: 1884 - DNA, 3106 bp, Diabrotica virgifera
  SmartBlast Evalue=9E-26; Info=Peptidoglycan recognition protein la n=1 Tax=Culex quinquefasciatus RepID=B0WH90_CULQU
aacaggtagcaaaacgcgttccaagattgcggctgtaattttgaatattttttcgagatatttggcacacgtattcgtaatataataaagaatggcggtacagagcccaatttgaaaaatatattaatatgtggaaattactctgtaattaaatacaatattaaaaaaacgagcctgtaccgccattaagaagaacaaaaacatacactttcttcaataaacttttttatcccatgcctagattttgtgtaatcttggaactactaaaattttttatttctaacaagaaatcgaacatattataactaataactaattcggcaacatagagaaattatcactgtcattttgacaaacctgcgtcatattttctctaatctgttctgtcatctttatcgatatctgttcagtgcagtagtgtgttaatttaagaattcgttattgtggtttcataggaaagtaatgtttattgatagttaatttattatatttgttgttgttgtataagttgttggcctctttgaaagaatagattgttgttaattgtgagttttagttatatgtaggtaggtaggtaagtatattttacgtaaaaatatttcgaattctaatgcgagtatataaagttttaggagaattttttattctaaaaatattatcaataatttaacaaaatcggaaaagttaatcaaacgaaaaataaagcgaatccttccaagaaaaaatccattaaaaaccgtgccaacattatgagaacatcgaaatttgtttcgcttcacaacgaaaaacgattatttattattgttttattattagatatttcatgcaaatacctatcttaacataaaattttcacccattttggtttatttttataaatatttatttactaataataaaatcgtgttctattaattccatttagcgcgactatgatattgtcaaaatattaatcttagataatgtcgaagattaccacggttgccaaagtttatgatactatctcccgaagttatattttgttgctacctgttgatcgctactgttggctcttaaatctacaaataggttgtaaaaaatctactctatacagagtttttgatgctgtgaactagaaaatgatgtcttgttaaacactgtgatcaaaactgctgaaaacaggtcccatgctaccttagattttaaatcgatgtcactataatgacagaattcctttagaaccccaaacacattagttccaggactgacactaaccgctgtttgattttcacctacgatgatataatctggagccaacttagatagtttcacaccttgccttaacaaaagcgttagacttgtcaccatatcgtccgttatcagatccacattgaagtttcctatgaagcttacagcgatgctgacgattggatagccatttctgacgtcccaacctcttgccacgtaaatactgccgtctactcctatcaggaagttttcagccaaatcataatacccctggctatttatatcgtagtcctgcaaagtccgaactatcttggaacagttcttcaaaccatcacatgttttggtgttggtgtgtcctaccacaactagtcctaacggaagaggctggaaaactctgttcgtaggaggaacaccatcatagtcatctctgtagtagacactgtagtttcctaatgtatgcccataacatgtatctactggtggaaacttgtttttgtttattgttgagatacctaacaaatatacaattagacaggaggatagagttatcaggaagaaactaatcttcaggatgaaatctcgcttaatttttcgttctttccagcaggtgatttggaaggtggggcaaattttgcggcgttgtttgaaagttgtttcattggatcggagtctagcggaatacccttgtagtcggtaggatcgaaatgttgaaactgattgattacagccagaacatttttccccggacttttagtcgtgttaacttggttgtggccaatcaatttgtagtcttcggataaatacttatgatctgttccgtgcttcagcagtgcctttgttgctttaaacatggtaagtgtgaagggatctatctggaaatttcctattaacactatctcgatacagtttgccctagaagctgggaggatgttccatccccttccaaaataagcgtttccgtcagcaccaataccaaaattaaaatatatgtctggtaaatcgttatcaccgatgtccgttgattgcaacgtctgcatcttcttggcacactgctcaaaattagagcaatttccacctgctgtatgtttcagaatgactaaacctacaggagttttcagctcctccattttccccaccgcttttcttcccccccaaacctcttttggtatcagtctagaggacgagttggttattattatggtatcctctttatgtgggatttgatcttgagcatcttttcgtaagacgaatactaatatcacagctgtagtagatacgagaaatactaataacactcctatcaagtatattcgcaatgtacatttttttctggctgaaaaggctacttcatcttctttctggactttcgcagagacgtccgtgtatttaggtggcgatatttccgacttttcctcaatttccacaggttgtccatccttattgtggaaaatagtaacattcccattaacgttaaactgagtcacaggcccaataatcacatcgttcgaattgtcaatgttgaccacggcattttctaagttaaccaactcccggtttattagctcacgattagcaacttcagcgaactcattactacagacatccaagccaccgttgttgtacccatcgtcgtactcgctgagcgccacatccgaattggggggattggggagctcagaaggtttagcgtccaagttggggcccattaacgatggataggagaaccgatgggacatggagaactctcatagctggccaaagttgaagcacgcactactcccaattcatttttttagacggcattgttgtttttatctatcgctgctctttatcgcgaatattatttaaagtttgaagtgaacggtgcttaatgtaagtc

SEQ ID NO: 1885 - DNA, 2056 bp, Diabrotica virgifera
  SmartBlast Evalue=6E-26; Info=Peptidoglycan recognition protein la n=1 Tax=Culex quinquefasciatus RepID=B0WH90_CULQU
ttactatttatattaatttatttacaaaaatacacttaacacatttttctattattaactatgtacaaggaaacgtcaaagttgcttattaaaatacgtggtactcttatagttataatcagtccagttactcactactttatatacatttcgtcctggactggagactcccagctcagtttgattatgacacaccaaactgaaattctgagagatataacccatttccaatccagcatctaaaatatttttcgtagaattctgcatataatcgtagaattgatcaaagtaaaagttaccatggattgctatgtctatagttttatgcatgtgttcattctggacaccaaaacctcttcctatgtatatgttaccatctcccccaataagaaaattataaccaatgtcggaatagttcatggtcgtcatatgtaatgtttgtattttgagcgtcaatgccttgcagacctcttcactctcacaaaacctatcaccagtttgtttgatcaccaccaaatctacaggagttgtaaaccatgttattttcttgggaaacacacccccccactgatgtctacagaaaacattgggagcgtcatggaacacttttttgtcgtcagcacttctgtttgaaacagcaaaaatttcttgacggctacggaggagtaatagttttataaaaattagtgttgcacacatcactatgatcacaataatagaacagcagatccatgttatggctttcttgttattttccttgatttttggtggtagcttttcgtctactcctcgtcctcggtaagggttgtaggtattgtagacgaagtcaatatcattggatcggagtctagcggaatacccttgtagtcggtaggatcgaaatgttgaaactgattgattacagccagaacatttttccccggacttttagtcgtgttaacttggttgtggccaatcaatttgtagtcttcggataaatacttatgatctgttccgtgcttcagcagtgcctttgttgctttaaacatggtaagtgtgaagggatctatctggaaatttcctattaacactatctcgatacagtttgccctagaagctgggaggatgttccatccccttccaaaataagcgtttccgtcagcaccaataccaaaattaaaatatatgtctggtaaatcgttatcaccgatgtccgttgattgcaacgtctgcatcttcttggcacactgctcaaaattagagcaatttccacctgctgtatgtttcagaatgactaaacctacaggagttttcagctcctccattttccccaccgcttttcttcccccccaaacctcttttggtatcagtctagaggacgagttggttattattatggtatcctctttatgtgggatttgatcttgagcatcttttcgtaagacgaatactaatatcacagctgtagtagatacgagaaatactaataacactcctatcaagtatattcgcaatgtacatttttttctggctgaaaaggctacttcatcttctttctggactttcgcagagacgtccgtgtatttaggtggcgatatttccgacttttcctcaatttccacaggttgtccatccttattgtggaaaatagtaacattcccattaacgttaaactgagtcacaggcccaataatcacatcgttcgaattgtcaatgttgaccacggcattttctaagttaaccaactcccggtttattagctcacgattagcaacttcagcgaactcattactacagacatccaagccaccgttgttgtacccatcgtcgtactcgctgagcgccacatccgaattggggggattggggagctcagaaggtttagcgtccaagttggggcccattaacgatggataggagaaccgatgggacatggagaactctcatagctggccaaagttgaagcacgcactactcccaattcatttttttagacggcattgttgtttttatctatcgctgctctttatcgcgaatattatttaaagtttgaagtgaacggtgcttaatgtaagtc

SEQ ID NO: 1886 - DNA, 1344 bp, Diabrotica virgifera
  SmartBlast Evalue=2E-13; Info=Probable RNA-directed DNA polymerase from transposon BS n=1 Tax=Drosophila melanogaster RepID=RTBS_DROME
aatattgaatagaaggatttagtgagccgatgattaaaaagcagagcaccataggcgtggccacagagggtgtggttgaaaccactttcactttttgttgaaaactttataggggtgcataaattaggatagttcatttctagaaacaactaatctgtaaaaatctctcatcgcatgtccgaagaactcaagttttcgtattttctaaaattgaaagagggaatacaaaattttgctcgaagaaaatagagacggcgatatatagaagttttgataaaggcgtaatagtcaaaaaaagcttttaccagaggacttttaataattttttatagctcggaactctttttttgtttttaagaggaaacaggtagcaaaacgcgttccaagattgcggctgtaattttgaatattttttcgagatatttggcacacgtattcgtaatataataaagaatggcggtacagagcccaatttgaaaaatatattaatatgtggaaattactctgtaattaaatacaatattaaaaaaacgagcctgtaccgccattaagaagaacaaaaaaatgcactttcttcaaataaacttttttatccgatgcctagattttgtgtcattttggaactactaaaattttttatttcattagtagttccaaaatgagctagcttatagagcaacccctggtgccataccttgtcaaacgcttgtcctatgtctatgatcagggcggagcaatatctggatgcttcgaggtctttatggattctgtttactattcgatgtacttgttgaatggtagaatgtttctgcctgaatccaaattggtgagttggaattattcccttgtcttctaggagaggcgttagttagtctggttaataaaaggttttcgaacactttggatagcacgaattgctattttagtgcaattttttgattctccaatactttccatgcaaaaaacatactcttcattcgcaatttgtttccattagttttctagatatttgaagctaaaaacgaaggagcataatacattaatcaaaataagtgtgccttttcatatttaacttcaaatatctcgaaaactaattactttatcgttgcgaatgaagagtgtattatttgcctagaaagtattggataatctaaaaattgtgctaaaatagcagtttcatcagtggcgtagaatttgggaaggatcaaccatacactttcccctgtcgtgacccctctgttattaaccacaaacgttatttgacataatttggtagggtgtacagtacctatactttctgccaagtaccataaggatatggtaaatacttttataataccggac

SEQ ID NO: 1887 - DNA, 1334 bp, Diabrotica virgifera
  SmartBlast Evalue=8E-22; Info=Peptidoglycan recognition protein n=1 Tax=Ostrinia furnacalis RepID=B7SFX0_9NEOP
ttactatttatattaatttatttacaaaaatacacttaacacatttttctattattaactatgtacaaggaaacgtcaaagttgcttattaaaatacgtggtactcttatagttataatcagtccagttactcactactttatatacatttcgtcctggactggagactcccagctcagtttgattatgacacaccaaactgaaattctgagagatataacccatttccaatccagcatctaaaatatttttcgtagaattctgcatataatcgtagaattgatcaaagtaaaagttaccatggattgctatgtctatagttttatgcatgtgttcattctggacaccaaaacctcttcctatgtatatgttaccatctcccccaataagaaaattataaccaatgtcggaatagttcatggtcgtcatatgtaatgtttgtattttgagcgtcaatgccttgcagacctcttcactctcacaaaacctatcaccagtttgtttgatcaccaccaaatctacaggagttgtaaaccatgttattttcttgggaaacacacccccccactgatgtctacagaaaacattgggagcgtcatggaacacttttttgtcgtcagcacttctgtttgaaacagcaaaaatttcttgacggctacggaggagtaatagttttataaaaattagtgttgcacacatcactatgatcacaataatagaacagcagatccatgttatggctttcttgttattttccttgatttttggtggtagcttttcgtctactcctcgtcctcggtaagggttgtaggtattgtagacgaagtcaatatccgtgtatttaggtggcgatatttccgacttttcctcaatttccacaggttgtccatccttattgtggaaaatagtaacattcccattaacgttaaactgagtcacaggcccaataatcacatcgttcgaattgtcaatgttgaccacggcattttctaagttaaccaactcccggtttattagctcacgattagcaacttcagcgaactcattactacagacatccaagccaccgttgttgtacccatcgtcgtactcgctgagcgccacatccgaattggggggattggggagctcagaaggtttagcgtccaagttggggcccattaacgatggataggagaaccgatgggacatggagaactctcatagctggccaaagttgaagcacgcactactcccaattcatttttttagacggcattgttgtttttatctatcgctgctctttatcgcgaatattatttaaagtttgaagtgaacggtgcttaatgtaagtc

SEQ ID NO: 1888 - DNA, 982 bp, Diabrotica virgifera
  SmartBlast Evalue=2E-13; Info=Probable RNA-directed DNA polymerase from transposon BS n=1 Tax=Drosophila melanogaster RepID=RTBS_DROME
aacaggtagcaaaacgcgttccaagattgcggctgtaattttgaatattttttcgagatatttggcacacgtattcgtaatataataaagaatggcggtacagagcccaatttgaaaaatatattaatatgtggaaattactctgtaattaaatacaatattaaaaaaacgagcctgtaccgccattaagaagaacaaaaaaatgcactttcttcaaataaacttttttatccgatgcctagattttgtgtcattttggaactactaaaattttttatttcattagtagttccaaaatgagctagcttatagagcaacccctggtgccataccttgtcaaacgcttgtcctatgtctatgatcagggcggagcaatatctggatgcttcgaggtctttatggattctgtttactattcgatgtacttgttgaatggtagaatgtttctgcctgaatccaaattggtgagttggaattattcccttgtcttctaggagaggcgttagttagtctggttaataaaaggttttcgaacactttggatagcacgaattgctattttagtgcaattttttgattctccaatactttccatgcaaaaaacatactcttcattcgcaatttgtttccattagttttctagatatttgaagctaaaaacgaaggagcataatacattaatcaaaataagtgtgccttttcatatttaacttcaaatatctcgaaaactaattactttatcgttgcgaatgaagagtgtattatttgcctagaaagtattggataatctaaaaattgtgctaaaatagcagtttcatcagtggcgtagaatttgggaaggatcaaccatacactttcccctgtcgtgacccctctgttattaaccacaaacgttatttgacataatttggtagggtgtacagtacctatactttctgccaagtaccataaggatatggtaaatacttttataataccggac

SEQ ID NO: 1889 - DNA, 1782 bp, Diabrotica virgifera
ttgaaaatgtattattttatttatattttgagttataacgttttaatttttaatgcactaaagccatatgatgacccacagcagcatattgatgtccttgtggaatcatattctggttgtattgttggttccaccatccattttgttggttccaccatccaggttgttccatggactgtggaatttgttgttggtggagattgtagctataatgagattgtgggttcatgctggttctttgagagtatgattgtgtccatggtaaaacgttgctatggtagtatgattgagattgttggtaaagctgtggttgagcatgttgatatctttgttgaacggtttcgtagtttaatggaagaacttggttatgggtccatgagtatacttgtccttgatgccatggaagggtttgttcagagttcaaaggttgaacatgttcaagttgttggtaatgtacaggagtaagttggttttggatgtggtgaataaattctactaactgcttcaacatgaaggtgttcgttcttctgtccatggttgccttgtgcagctgcttaccagcatccagaaaccaagcccattacggccagcagcagaactatggcgacgtagagaacaatcaatacagcagccaccccgtctacaacttctggaagacttggaaccagcaacacaatggacaagaaccatggaaccaatgggtagagaatggtgcccaaaaccaacctggtaactactggaggcagtacgctcaagctcaatctcaagttcaagctcaagctcaagctcaagctcaagctcaagctcaagctcaagctcaagctcaagctggaaacgtagctttgccatggatgtatcacatttggaacgtccaagatcttaacgaactatctccagttcaacgtgtacagttgctcctcaactatgctagacttcaccagcaatggaaccaatatggttcagatgcatcagacaatgaatatatgcaacatgttttgtaccaacatcttcctgaacaagcacaatcctactcccatcaccaaattgtaccatacgccatgcaatacttcaaccaaaacccaatgaaatataacgacattatgcatgaagtaatgcaaaccccatgggcacaccaacaacttattcaccacgttatgtctgaattatatcaacactacggtcaagccccatggtctcatgaacaaatccaaaaccaggttatgcagcaccaacttgtatacggatcttccaattcacaacagcaactccagcagttagtagaatttattcaccacattcaaaaccaacttacgcctgtacattaccaacaacttgaacatgttcaacctttgaactacgaacaaacccttccatggcatcaaagacaagtatactcatggacccataaccaagttcttccattaaactacgaaaccgttcaacaaagatatcaacatgctcaaccacagctttaccaacaatctcaatcatactactatggcaacgctttaccatggacacaatcatactcacaaagaaccagcatgtacccacaatctcagtatagcttcaatctccaccaacaacaaattccacagtcacagtcacaacaacctggatggtggaaccaacaatatggatggtggaaccaacaatacaaccagaatatgattccacaaggacatcaatatgctgctttgggtcatcataatatggctttagtgcattaaaaattaaaacattgtaacttaaaatataaataaaataatgcatatccaaaaa

SEQ ID NO: 1890 - DNA, 1770 bp, Diabrotica virgifera
ttgaaaatgtattattttatttatattttgagttataacgttttaatttttaatgcactaaagccatatgatgacccacagcagcatattgatgtccttgtggaatcatattctggttgtattgttggttccaccatccattttgttggttccaccatccaggttgttccatggactgtggaatttgttgttggtggagattgtagctataatgagattgtgggttcatgctggttctttgagagtatgattgtgtccatggtaaaacgttgctatggtagtatgattgagattgttggtaaagctgtggttgagcatgttgatatctttgttgaacggtttcgtagtttaatggaagaacttggttatgggtccatgagtatacttgtccttgatgccatggaagggtttgttcagagttcaaaggttgaacatgttcaagttgttggtaatgtacaggagtaagttggttttggatgtggtgaataaattctactaactgcttcaacatgaaggtgttcgttcttctgtccatggttgccttgtgcagctgcttaccagcatccagaaaccaagcccattacggccagcagcagaactatggcgacgtagagaacaatcaatacagcagccaccccgtctacaacttctggaagacttggaaccagcaacacaatggacaagaaccatggaaccaatgggtagagaatggtgcccaaaaccaacctggtaactactggaggcagtacgctcaagctcaatctcaagttcaagctcaagctcaagctcaagctcaagctcaagctcaagctcaagctggaaacgtagctttgccatggatgtatcacatttggaacgtccaagatcttaacgaactatctccagttcaacgtgtacagttgctcctcaactatgctagacttcaccagcaatggaaccaatatggttcagatgcatcagacaatgaatatatgcaacatgttttgtaccaacatcttcctgaacaagcacaatcctactcccatcaccaaattgtaccatacgccatgcaatacttcaaccaaaacccaatgaaatataacgacattatgcatgaagtaatgcaaaccccatgggcacaccaacaacttattcaccacgttatgtctgaattatatcaacactacggtcaagccccatggtctcatgaacaaatccaaaaccaggttatgcagcaccaacttgtatacggatcttccaattcacaacagcaactccagcagttagtagaatttattcaccacattcaaaaccaacttacgcctgtacattaccaacaacttgaacatgttcaacctttgaactacgaacaaacccttccatggcatcaaagacaagtatactcatggacccataaccaagttcttccattaaactacgaaaccgttcaacaaagatatcaacatgctcaaccacagctttaccaacaatctcaatcatactactatggcaacgctttaccatggacacaatcatactcacaaagaaccagcatgtacccacaatctcagtatagcttcaatctccaccaacaacaaattccacagtcacagtcacaacaacctggatggtggaaccaacaatatggatggtggaaccaacaatacaaccagaatatgattccacaaggacatcaatatgctgctttgggtcatcataatatggctttagtgcattaaaaattaaaacattgtaacttaaaatataaataaaataatgcatatccaaaaa

SEQ ID NO: 1891 - DNA, 1278 bp, Diabrotica virgifera
ttgaaaatgtattattttatttatattttgagttataacgttttaatttttaatgcactaaagccatatgatgacccacagcagcatattgatgtccttgtggaatcatattctggttgtattgttggttccaccatccattttgttggttccaccatccaggttgttccatggactgtggaatttgttgttggtggagattgtagctataatgagattgtgggttcatgctggttctttgagagtatgattgtgtccatggtaaaacgttgctatggtagtatgattgagattgttggtaaagctgtggttgagcatgttgatatctttgttgaacggtttcgtagtttaatggaagaacttggttatgggtccatgagtatacttgtccttgatgccatggaagggtttgttcagagttcaaaggttgaacatgttcaagttgttggtaatgtacaggagtaagttggttttggatgtggtgaataaattctactaactgctggagttgctgttgtgaattggaagatccgtatacaagttggtgctgcataacctggttttggatttgttcgtgagaccatggggcttgaccgtaatgttgatttaattcagacataacgtggtgaataagttgttggtgtgcccatggggtttgcattacttcatgcataatgtcgttatatttcattgggttttggttgaagtattgcatgacgtatggtacaatttggtcatgggagtaggattgtgcctgtccaggaagatgttggtacaaaacatgttgcatatattcattgtctgatgcatctgaaccatattggttccattgctggtgaagtctagcatagttgaggagcaactgtacacgttgaactggagatagttcgttaagatcttggacgttccaaatgtgatacatccatggcaaagctacgtttccagcttgagcttgagcttgagcttgagcttgagcttgagcttgagcttgagcttgagcttgaacttgagattgagcttgagcgtactgcctccagtagttaccaggttggttttgggcaccattctctacccattggttccatggttcttgtccattgtgttgctggttccaagtcttccagaagttgtagacggggcggctgctgtattgattgttctctacgtcgccatagttctgctgttggccgtaatgggcttggtttctggatgctggtaagcagctgcacaaggcaaccatggacagaagaacgaacaccttcatgttgaagcagtttg

SEQ ID NO: 1892 - DNA, 1266 bp, Diabrotica virgifera
ttgaaaatgtattattttatttatattttgagttataacgttttaatttttaatgcactaaagccatatgatgacccacagcagcatattgatgtccttgtggaatcatattctggttgtattgttggttccaccatccattttgttggttccaccatccaggttgttccatggactgtggaatttgttgttggtggagattgtagctataatgagattgtgggttcatgctggttctttgagagtatgattgtgtccatggtaaaacgttgctatggtagtatgattgagattgttggtaaagctgtggttgagcatgttgatatctttgttgaacggtttcgtagtttaatggaagaacttggttatgggtccatgagtatacttgtccttgatgccatggaagggtttgttcagagttcaaaggttgaacatgttcaagttgttggtaatgtacaggagtaagttggttttggatgtggtgaataaattctactaactgctggagttgctgttgtgaattggaagatccgtatacaagttggtgctgcataacctggttttggatttgttcgtgagaccatggggcttgaccgtaatgttgatttaattcagacataacgtggtgaataagttgttggtgtgcccatggggtttgcattacttcatgcataatgtcgttatatttcattgggttttggttgaagtattgcatgacgtatggtacaatttggtcatgggagtaggattgtgcctgtccaggaagatgttggtacaaaacatgttgcatatattcattgtctgatgcatctgaaccatattggttccattgctggtgaagtctagcatagttgaggagcaactgtacacgttgaactggagatagttcgttaagatcttggacgttccaaatgtgatacatccatggcaaagctacgtttccagcttgagcttgagcttgagcttgagcttgagcttgagcttgagcttgaacttgagattgagcttgagcgtactgcctccagtagttaccaggttggttttgggcaccattctctacccattggttccatggttcttgtccattgtgttgctggttccaagtcttccagaagttgtagacggggcggctgctgtattgattgttctctacgtcgccatagttctgctgttggccgtaatgggcttggtttctggatgctggtaagcagctgcacaaggcaaccatggacagaagaacgaacaccttcatgttgaagcagtttg

SEQ ID NO: 1893 - DNA, 1287 bp, Diabrotica virgifera
tttttggatatgcattattttatttatattttaagttacaatgttttaatttttaatgcactaaagccatattatgatgacccaaagcagcatattgatgtccttgtggaatcatattctggttgtattgttggttccaccatccatattgttggttccaccatccaggttgttgtgactgtgactgtggaatttgttgttggtggagattgaagctatactgagattgtgggtacatgctggttctttgtgagtatgattgtgtccatggtaaagcgttgccatagtagtatgattgagattgttggtaaagctgtggttgagcatgttgatatctttgttgaacggtttcgtagtttaatggaagaacttggttatgggtccatgagtatacttgtctttgatgccatggaagggtttgttcgtagttcaaaggttgaacatgttcaagttgttggtaatgtacaggcgtaagttggttttgaatgtggtgaataaattctactaactgctggagttgctgttgtgaattggaagatccgtatacaagttggtgctgcataacctggttttggatttgttcatgagaccatggggcttgaccgtagtgttgatataattcagacataacgtggtgaataagttgttggtgtgcccatggggtttgcattacttcatgcataatgtcgttatatttcattgggttttggttgaagtattgcatggcgtatggtacaatttggtgatgggagtaggattgtgcttgttcaggaagatgttggtacaaaacatgttgcatatattcattgtctgatgcatctgaaccatattggttccattgctggtgaagtctagcatagttgaggagcaactgtacacgttgaactggagatagttcgttaagatcttggacgttccaaatgtgatacatccatggcaaagctacgtttccagcttgagcttgagcttgagcttgagcttgagcttgagcttgagcttgagcttgagcttgaacttgagattgagcttgagcgtactgcctccagtagttaccaggttggttttgggcaccattctctacccattggttccatggttcttgtccattgtgttgctggttccaagtcttccagaagttgtagacggggcggctgctgtattgattgttctctacgtcgccatagttctgctgttggccgtaatgggcttggtttctggatgctggtaagcagctgcacaaggcaaccatggacagaagaacgaacaccttcatgttgaagcagtttg

SEQ ID NO: 1894 - DNA, 1275 bp, Diabrotica virgifera
tttttggatatgcattattttatttatattttaagttacaatgttttaatttttaatgcactaaagccatattatgatgacccaaagcagcatattgatgtccttgtggaatcatattctggttgtattgttggttccaccatccatattgttggttccaccatccaggttgttgtgactgtgactgtggaatttgttgttggtggagattgaagctatactgagattgtgggtacatgctggttctttgtgagtatgattgtgtccatggtaaagcgttgccatagtagtatgattgagattgttggtaaagctgtggttgagcatgttgatatctttgttgaacggtttcgtagtttaatggaagaacttggttatgggtccatgagtatacttgtctttgatgccatggaagggtttgttcgtagttcaaaggttgaacatgttcaagttgttggtaatgtacaggcgtaagttggttttgaatgtggtgaataaattctactaactgctggagttgctgttgtgaattggaagatccgtatacaagttggtgctgcataacctggttttggatttgttcatgagaccatggggcttgaccgtagtgttgatataattcagacataacgtggtgaataagttgttggtgtgcccatggggtttgcattacttcatgcataatgtcgttatatttcattgggttttggttgaagtattgcatggcgtatggtacaatttggtgatgggagtaggattgtgcttgttcaggaagatgttggtacaaaacatgttgcatatattcattgtctgatgcatctgaaccatattggttccattgctggtgaagtctagcatagttgaggagcaactgtacacgttgaactggagatagttcgttaagatcttggacgttccaaatgtgatacatccatggcaaagctacgtttccagcttgagcttgagcttgagcttgagcttgagcttgagcttgagcttgaacttgagattgagcttgagcgtactgcctccagtagttaccaggttggttttgggcaccattctctacccattggttccatggttcttgtccattgtgttgctggttccaagtcttccagaagttgtagacggggcggctgctgtattgattgttctctacgtcgccatagttctgctgttggccgtaatgggcttggtttctggatgctggtaagcagctgcacaaggcaaccatggacagaagaacgaacaccttcatgttgaagcagtttg

SEQ ID NO: 1895 - DNA, 1981 bp, Diabrotica virgifera
  SmartBlast Evalue=1E-82; Info=Glycoside hydrolases n=1 Tax= Aedes aegypti RepID=Q16WF4_AEDAE
tagaacctgtagtgacgatttaccactgggatttgcctcaaatgctacaggaactaggtggttgggaaaattcaaaaatcgtcgattacttcgttgattatgcagatttggtatttgcaagttttccatctgttaaacattggattacatttaatgaacctaaacaggtgtgtcgaagtggatatggtaaaggtaacatggctcctggtatagcacgaagtggaacagctgactacatgtgcagctatcacgtcattaaagcacatgccgctgcatatcacaaatatcaagaccgctataaatctcttggaggaaaaattactatggctctagatggcgtttggagtataccgtattgggataatgaagaagatcgacaagccgcagagcgccagctaaattttgagtttggattatatgctcatccaatcttctttggcgactggccgcaagtggtaaaggacagagttaattatcgtagcaaaatggagaactatcctgaatctcgtttaccagagtttacagccgaagaaatgaagtacattaatagaactgctgactatgttgcttttaatttttacaatacaaagttaattaaagatatagatgaagcttcttttgatattacctcttttgataacgacttaagagtaaaagatgatgtggatcctcgttggactattgcgatggacggtaatacaatatatccccaagggttaagatcatacctgaaatggatctcagaaaattacaacagtcccgaaattataattactgaaaatggcatagctgataatggtactagcctagaagatagtgaaagaatatcatatttatcggactacctaaatgctgttttggattctatttatgaagataaagttaatgttactggttacacaatgtggagtttactggataattttgaatggacttcaggatacagcatgcgttttggattttactctgtagattttgaagacagcaaccgcacaagagcagcgaaaacatctgtagattattacagtcaaataattaaaaataggaaaattcccgaatagaaaaaatcaaatttgaatcagagctattaatagctctgttaagagtacatggcttttattgtatggtattctacagttcgtacaatatagataccgttccacgtcatccgcgtaatggcacgtgacgtcacatgatgccaacacgaaatatttaagtcgtaggtgtgttcctttttggaatcgtttaggtgagtacactggaattacagccacaagacatatttcattatatacgcatagaaataatattggaagatttctattaatgtaaatgaaaaaaaaacataccctaacttgtttcatttaatttgtataagtggaatataaagcacacttgttcggattacatctttactctacctgcgatcgaacaaatgtgacattttgacataaattggtaacatttatttggcaattgcggtattgacactttgatttgtttttattctttactataagcacctataagtatttgttttattatatttattgtttttattatttatttaacgtgagattataacttaactttttgttttctatttttaatgtttttatttatttacattgaatagatattaattttggtaggggagcaaagtatgctaaatgtgcagtcactcgagcgttttggggacctattgggttgtgattattaggtcctaaaaccaaaaaaagttaagtaaagttttccattttagtgggcgcttgccattttttaatttaattttccatttccaacaatcgttttttccgattatacgccatctatccataactcgaaaaaatctttcgaataaaagttgcttatttttatgtaaggaatccaaatctgcaataaaaaataagggcttctatttaagattttaaagtaaccccccaccccacctccgtgtagggtcgtgtttggtatcattcga

SEQ ID NO: 1896 - DNA, 1481 bp, Diabrotica virgifera
  SmartBlast Evalue=1E-82; Info=Glycoside hydrolases n=1 Tax= Aedes aegypti RepID=Q16WF4_AEDAE
tagaacctgtagtgacgatttaccactgggatttgcctcaaatgctacaggaactaggtggttgggaaaattcaaaaatcgtcgattacttcgttgattatgcagatttggtatttgcaagttttccatctgttaaacattggattacatttaatgaacctaaacaggtgtgtcgaagtggatatggtaaaggtaacatggctcctggtatagcacgaagtggaacagctgactacatgtgcagctatcacgtcattaaagcacatgccgctgcatatcacaaatatcaagaccgctataaatctcttggaggaaaaattactatggctctagatggcgtttggagtataccgtattgggataatgaagaagatcgacaagccgcagagcgccagctaaattttgagtttggattatatgctcatccaatcttctttggcgactggccgcaagtggtaaaggacagagttaattatcgtagcaaaatggagaactatcctgaatctcgtttaccagagtttacagccgaagaaatgaagtacattaatagaactgctgactatgttgcttttaatttttacaatacaaagttaattaaagatatagatgaagcttcttttgatattacctcttttgataacgacttaagagtaaaagatgatgtggatcctcgttggactattgcgatggacggtaatacaatatatccccaagggttaagatcatacctgaaatggatctcagaaaattacaacagtcccgaaattataattactgaaaatggcatagctgataatggtactagcctagaagatagtgaaagaatatcatatttatcggactacctaaatgctgttttggattctatttatgaagataaagttaatgttactggttacacaatgtggagtttactggataattttgaatggacttcaggatacagcatgcgttttggattttactctgtagattttgaagacagcaaccgcacaagagcagcgaaaacatctgtagattattacagtcaaataattaaaaataggaaaattcccgaatagaaaaaatcaaatttgaatcagagctattaatagctctgttaagagtacatggcttttattgtatggtattctacagttcgtacaatatagataccgttccacgtcatccgcgtaatggcacgtgacgtcacatgatgccaacacgaaatatttaagtcgtaggtgtgttcctttttggaatcgtttaggtgagtacactggaattacagccacaagacatatttcattatatacgcatagaaataatattggaagatttctattaatgtaacttgtaattagttgtaatttgtttcatttaatttgtataagtggaatacaaagcgttttataaagcacacttgttcggattacactctaactgcgatcgaacagaggtggcatgttggcacaaattggtaacatgtattttacagtggc

SEQ ID NO: 1897 - DNA, 859 bp, Diabrotica virgifera
  SmartBlast Evalue=1E-10; Info=COMM domain-containing protein 3 n=4 Tax=Murinae RepID=COMD3_MOUSE
atgcttcccttttaacagttactacagattttatcaacaaaatgttaatagagaagacattacattctttttacataatgagtgtggtttatcttcggaacgaacaaacctttatataagcatgttggaggaaaagaaatgtcaactacagatagctttattaaatattggaagtgctttaccacacgttactgatataaagtggaaaatagactacatagtaaagtctagtgaagtggaatctgcggaagggcccctatttaggatatgtttgattggtgaacagtttgatatggaaaaggatagtaaagttttaaagcccattcatttcacctgcaactcagtagaattactagatttaatttataagtttaaagatgctcttagacactgtaactcagtaacacagagggttttctaatgtaaaagttttatttatttaaacatatattttttaattttcttttttcttttactatgtaaatatcaatattaaatttaagtgattacattgcattacattatggtaggggagcaaagtatgctaaatgtgcagtcactcgagcgttttggggacctattgggttgtgattattaggtcctaaaaccaaaaaaagttaagtaaagttttccattttagtgggcgcttgccattttttaatttaattttccatttccaacaatcgttttttccgattatacgccatctatccataactcgaaaaaatctttcgaataaaagttgcttatttttatgtaaggaatccaaatctgcaataaaaaataagggcttctatttaagattttaaagtaaccccccaccccacctccgtgtagggtcgtgtttggtatcattcga

SEQ ID NO: 1898 - DNA, 588 bp, Diabrotica virgifera
aatttaatattttaaatacgaatcccgcgatatttcgcgaaatgaaaatcagatcgaaaaactgtaaaatacacttattattcaatatttttgaaaaatctatcgaatggcaccaaacacgacccccatggatgtggggtggggggttactttaaaatcttaaataggagccctcaatttttattgccgatttggattccttacgtaaaaataagtaacttttattcgaaacattttttcaaattatggatagatggcgttataataggaaaaaacgattgttggaaatggaaaattaaattaaaaaaatggcaagcgcccactaaaatggaaaactttacttaactttttttggttttaggacctactcttcacaacccaataggtccccataagcgctcgagtgactgcacatttagcatactttgctcccctaccatagcacggataatccgcagctcggataatccgctacggataagtcggggttctactgtatatcttaaagatatatacttaagtttttttcactttctcctttttttctttatctattttcctttttaatcgttttattgtttcgttttt

SEQ ID NO: 1899 - DNA, 485 bp, Diabrotica virgifera
aaaaacgaaacaataaaacgattaaaaaggaaaatagataaagaaaaaaaggagaaagtgaaaaaaacttaagtatatatctttaagatatacagtagaaccccgacttatccgtagcggattatccgagctgcggattatccgtgctatggtaggggagcaaagtatgctaaatgtgcagtcactcgagcgcttatggggacctattgggttgtgaagagtaggtcctaaaaccaaaaaaagttaagtaaagttttccattttagtgggcgcttgccattttttaatttaattttccatttccaacaatcgttttttccgattatacgccatctatccataactcgaaaaaatctttcgaataaaagttgcttatttttatgtaaggaatccaaatctgcaataaaaaataagggcttctatttaagattttaaagtaaccccccaccccacctccgtgtagggtcgtgtttggtatcattcga

SEQ ID NO: 1900 - DNA, 389 bp, Diabrotica virgifera
aaaaacgaaacaataaaacgattaaaaaggaaaatagataaagaaaaaaaggaagaaagtgaaaaaaacttaagtatatatctttaagatatacagtagaaccccgacttatccgtagcggattatccgagctgcggattatccgtgctatggtaggggagcaaagtatgctaaatgtgcagtcactcgagcgcttatggggacctattgggttgtgaagagtaggtcctaaaaccaaaaaaagttaagtaaagttttccattttagtggggactttccattttttaatttaattttccatttccaacaatcgttttttccgattatagcgccatctatccataattcgaaaaaatgtttcaaataaaagttacttattttttcgtaag

SEQ ID NO: 1901 - DNA, 322 bp, Diabrotica virgifera
aatttaatattttaaatacgaatcccgcgatatttcgcgaaatgaaaatcagatcgaaaaactgtaaaatacacttattattcaatatttttgaaaaatctatcgaatggcaccaaacacgacccccatggatgtggggtggggggttactttaaaatcttaaataggagccctcaatttttattgccgatttggattccttacgtaaaaataagtaacttttattcgaaacattttttcaaattatggatagatggcgttataataggaaaaaacgattgttggaaatggaaaattaaattaaaaaaatggcaagcgccca

SEQ ID NO: 1902 - DNA, 121 bp, Diabrotica virgifera
cttacgaaaaaataagtaacttttatttgaaacattttttcgaattatggatagatggcgctataatcggaaaaacgattgttggaaatggaaaattaaattaaaaaatggaaagtcccca

SEQ ID NO: 1903 - DNA, 1807 bp, Diabrotica virgifera
cgctaaagtcacccttctcacaaacattggcgcactgtaaactaacgtacggcgaagtgcacgattgagttattttaatgtaattctttaactaatggatcaaatgaaattttacaaattgaacatgaaagaagaataattaagctatattatggttataatagaaagaaataaaatgtatgggcataagcacggtgtgggcggaaaatgagccttacacgaattttgtttaaaaatgatttaaaaatgtgtaactaatacaatttttcttataaaatctctcaattttgcacaacttacctctcaagcatcgtactaaatgatgtttcattcaaaaaaaatcttaaaaatttaattcaaatgatatgacgtctcaaaaaatgtaatttttgaaatcttcgtagttttatagaattacctccactttaagacggtattactcaagtttggccagatttattacaattttataagtgcttttttaaagcttaggatgtaatctttaaaatgcactaaattattttactttagaaatgaaataaactatttctttttaagaaaattaagaaagttaacaaaaatgtaatacaaaaaccgaaaattaccagctgaaaaaaatgtttatacaaagtgatcaaaacttttttctgtaaaacttacctaaaatacaattaataataagcttcaacaataataaatgttcagcaaaaaaattttttttagctcttatacagtatgtctgcgtaacttggaacctattgataacttttttaatatcagttttacgaaaaaaagttattctttataaaatactctgcatcgtatataacataagatgcaaccatcaaatatcaaattttgttaattttgtacgaggtatgtcaaaaaatatgaatttcactcaagagtaaagtacctttatatttcacaatatcgaaaatttttataaagaaaagttgtttggaattaaaaactatgttccaatatgtaattatatccttctaatcgaaaatttgttgtttttaaatattgtttcaaattaattatacccatcatcaaattttcacttattatttatgataactgatttattattaattttatgaagaaagttatgcatgataaattgctgtacatggtctaacacttaatatgcaaatataaaatattatattttatcaatattatacgaggtattatgtaaaaaaattgcataaaagtgtaattgcatattgacacatcgtttttaattctgaacaactttccataataacaattttcagtattatgaaaaatataggtaattttactcctaactgaaatttttatttattgacatatcttgtgcaaaattgataaagattgatattttatgattgcatttaaagttttagaatatgcagagctttttactaagaataacttttttatttatgtaaacaaacaggttttataaaaaaattcggattttacaactgctttttaaggaatttttaggaaaaaatccgtcattttgaatccgccattttgaatttgcaaattgtaatgtcagattcgggttcagcataatcaaaactaaaataaaaacattttttatcaaaataaaatgttgaattcacccatattcttaacattatttatacaaaacaattgttattgtttaaacaattaataaacaattagcggcgaaatttgtgagtagaactttttactttaacatatttataaactaacaaaaaaagttttagaaaaatataaccttgtttgactttttccgaaacattgtatcttttcgttctaattgcac

SEQ ID NO: 1904 - DNA, 1536 bp, Diabrotica virgifera
cgctaaagtcacccttctcacaaacattggcgcactgtaaactaacgtacggcgaagtgcacgattgagttattttaatgtaattctttaactaatggatcaaatgaaattttacaaattgaacatgaaagaagaataattaagctatattatggttataatagaaagaaataaaatgtatgggcataagcacggtgtgggcggaaaatgagccttacacgaattttgtttaaaaatgatttaaaaatgtgtaactaatacaatttttcttataaaatctctcaattttgcacaacttacctctcaagcatcgtactaaatgatgtttcattcaaaaaaaatcttaaaaatttaattcaaatgatatgacgtctcaaaaaatgtaatttttgaaatcttcgtagttttatagaattacctccactttaagacggtattactcaagtttggccagatttattacaattttataagtgcttttttaaagcttaggatgtaatctttaaaatgcactaaattattttactttagaaatgaaataaactatttctttttaagaaaattaagaaagttaacaaaaatgtaatacaaaaaccgaaaattaccagctgaaaaaaatgtttatacaaagtgatcaaaacttttttctgtaaaacttacctaaaatacaattaataataagcttcaacaataataaatgttcagcaaaaaaattttttttagctcttatacagtatgtctgcgtaacttggaacctattgataacttttttaatatcagttttacgaaaaaaagttattctttataaaatactctgcatcgtatataacataagatgcaaccatcaaatatcaaattttgttaattttgtacgaggtatgtcaaaaaatatgaatttcactcaagagtaaagtacctttatatttcacaatatcgaaaatttttataaagaaaagttgtttggaattaaaaactatgttccaatatgtaattatatccttctaatcgaaaatttgttgtttttaaatattgtttcaaattaattatacccatcatcaaattttcacttattatttatgataactgatttattattaattttatgaagaaagttatgcatgataaattgctgtacatggtctaacacttaatatgcaaatataaaatattatattttatcaatattatacgaggtattatgtaaaaaaattgcataaaagtgtaattgcatattgacacatcgtttttaattctgaacaactttccataataacaattttcagtattatgaaaaatataggtaattttactcctaactgaaatttttatttattgacatatcttgtgcaaaattgataaagattgatattttatgattgcatttaaagttttagaatatgcagagctttttactaagaataacttttttatttatgatcccattgcaacaattttttgaatattgaagagatagattttgaataatttgttctttctttctaatacattttaatttttaatattattgtgaaaatt

SEQ ID NO: 1905 - DNA, 1306 bp, Diabrotica virgifera
cgctaaagtcacccttctcacaaacattggcgcactgtaaactaacgtacggcgaagtgcacgattgagttattttaatgtaattctttaactaatggatcaaatgaaattttacaaattgaacatgaaagaagaataattaagctatattatggttataatagaaagaaataaaatgtatgggcataagcacggtgtgggcggaaaatgagccttacacgaattttgtttaaaaatgatttaaaaatgtgtaactaatacaatttttcttataaaatctctcaattttgcacaacttacctctcaagcatcgtactaaatgatgtttcattcaaaaaaaatcttaaaaatttaattcaaatgatatgacgtctcaaaaaatgtaatttttgaaatcttcgtagttttatagaattacctccactttaagacggtattactcaagtttggccagatttattacaattttataagtgcttttttaaagcttaggatgtaatctttaaaatgcactaaattattttactttagaaatgaaataaactatttctttttaagaaaattaagaaagttaacaaaaatgtaatacaaaaaccgaaaattaccagctgaaaaaaatgtttatacaaagtgatcaaaacttttttctgtaaaacttacctaaaatacaattaataataagcttcaacaataataaatgttcagcaaaaaaattttttttagctcttatacagtatgtctgcgtaacttggaacctattgataacttttttaatatcagttttacgaaaaaaagttattctttataaaatactctgcatcgtatataacataagatgcaaccatcaaatatcaaattttgttaattttgtacgaggtatgtcaaaaaatatgaatttcactcaagagtaaagtacctttatatttcacaatatcgaaaatttttataaagaaaagttgtttggaattaaaaactatgttccaatatgtaattatatccttctaatcgaaaatttgttgtttttaaatattgtttcaaattaattatacccatcatcaaattttcacttattatttatgataactgatttattattaattttatgaagaaagttattcgtcataaatagctgtgcatggtctaacacttaatatgcaaatataaaatattatattttatcaatattattctcattttttcggtacaagactggttgaatagtcccgttttaagtgaacaagaaattgaagaaagcgaaaatagtcagcgtagttggaggtgatattgaagagatagattttgataa

SEQ ID NO: 1906 - DNA, 933 bp, Diabrotica virgifera
cgctaaagtcacccttctcacaaacattggcgcactgtaaactaacgtacggcgaagtgcacgattgagttattttaatgtaattctttaactaatggatcaaatgaaattttacaaattgaacatgaaagaagaataattaagctatattatggttataatagaaagaaataaaatgtatgggcataagcacggtgtgggcggaaaatgagccttacacgaattttgtttaaaaatgatttaaaaatgtgtaactaatacaatttttcttataaaatctctcaattttgcacaacttacctctcaagcatcgtactaaatgatgtttcattcaaaaaaaatcttaaaaatttaattcaaatgatatgacgtctcaaaaaatgtaatttttgaaatcttcgtagttttatagaattacctccactttaagacggtattactcaagtttggccagatttattacaattttataagtgcttttttaaagcttaggatgtaatctttaaaatgcactaaattattttactttagaaatgaaataaactatttctttttaagaaaattaagaaagttaacaaaaatgtaatacaaaaaccgaaaattaccagctgaaaaaaatgtttatacaaagtgatcaaaacttttttctgtaaaacttacctaaaatacaattaataataagcttcaacaataataaatgttcagcaaaaaaattttttttagctcttatacagtatgtctgcgtaacttggaacctattgataacttttttattatcagttttacgaaaaaaaattattctccacaaaatactctgcatcgtatataatctaagatgcaatcatcaaatatcaaatttaattaatgttatacgaggtatgtcaaaaaatatggattttactcaagagcaaagtacccttacatttcacaata

SEQ ID NO: 1907 - DNA, 724 bp, Diabrotica virgifera
tagctgtgcatggtctaacacttaatatgcaaatataaaatattatattttatcaatattatacgaggtatgtaaaaaattatatttcgcgcaataaatatgtacctttatagttcacaatatttcgactagaagagtgtaattgcatattgacacatcgtttttaattctgaacaactttccataataacaattttcagtattatgaaaaatataggtaattttactcctaactgaaatttttatttattgacatatcttgtgcaaaattgataaagattgatattttatgattgcatttaaagttttagaatatgcagagctttttactaagaataacttttttatttatgtaaacaaacaggttttataaaaaaattcggattttacaactgctttttaaggaatttttaggaaaaaatccgtcattttgaatccgccattttgaatttgcaaattgtaatgtcagattcgggttcagcataatcaaaactaaaataaaaacattttttatcaaaataaaatgttgaattcacccatattcttaacattatttatacaaaacaattgttattgtttaaacaattaataaacaattagcggcgaaatttgtgagtagaactttttactttaacatatttataaactaacaaaaaaagttttagaaaaatataaccttgtttgactttttccgaaacattgtatcttttcgttctaattgcac

SEQ ID NO: 1908 - DNA, 453 bp, Diabrotica virgifera
tagctgtgcatggtctaacacttaatatgcaaatataaaatattatattttatcaatattatacgaggtatgtaaaaaattatatttcgcgcaataaatatgtacctttatagttcacaatatttcgactagaagagtgtaattgcatattgacacatcgtttttaattctgaacaactttccataataacaattttcagtattatgaaaaatataggtaattttactcctaactgaaatttttatttattgacatatcttgtgcaaaattgataaagattgatattttatgattgcatttaaagttttagaatatgcagagctttttactaagaataacttttttatttatgatcccattgcaacaattttttgaatattgaagagatagattttgaataatttgttctttctttctaatacattttaatttttaatattattgtgaaaatt

SEQ ID NO: 1909 - DNA, 397 bp, Diabrotica virgifera
gattcaggttcagcaacctctcaaaaatatccacatatatgtaaacgaacacgttttataaaaaacattcggattttacaactacttttaagcatttttaggaaaaaatgcgccattttgaatttgcaaattgtaatgtcagattcgggttcagcataatcaaaactaaaataaaaacattttttatcaaaataaaatgttgaattcacccatattcttaacattatttatacaaaacaattgttattgtttaaacaattaataaacaattagcggcgaaatttgtgagtagaactttttactttaacatatttataaactaacaaaaaaagttttagaaaaatataaccttgtttgactttttccgaaacattgtatcttttcgttctaattgcac

SEQ ID NO: 1910 - DNA, 1596 bp, Diabrotica virgifera
  SmartBlast Evalue=8E-46; Info="SCF ubiquitin ligase, Rbx1 component, putative n=1 Tax=Ixodes scapularis RepID=B7P6D0_ IXOSC"
caacaaaaaatggcggacgaaaacgataacgaaaaaatggacatagatcctcaaaaaaacacggaaaaaatgttttcgttaaaaaaatggaatgcagtggccatgtggagctgggatgttgaatgtgatacttgcgcgatatgcagagttcaggtgatggactcttgtttgaggtgtcaggctgagaacagaaaagattcctacggaaaacaagattgtgttgtcgtctggggagaatgcaaccattccttccattattgttgcatgtctttgtgggtaaaacagaataatagatgtcccttgtgccaacaagaatggtcaatacaaaggatgggaaaataagggtataaaattacacaagtgcgaacaatgtttcaaaacattcttcgagcgccatcatcttatcactcacgttaggagccacaatggagaaagacctttcgtctgtgcagtgtctgattgtgcaaagtcattctatgataaacagaagctacgaagacatgagaggactgtacactgttttaaaatggaacgtagcttgtaaataatccaagtggcacaaatattgtattgcaaaaatgtgtcatattatgtaattctatctttttctgctataaaaaagcattagggagtgaagagtgctaccacaaagttattgttttgagataataatcatagaaactttacttgtttaaaaaaaaagttttgttttttgtatgtcgtttattgaccaattcttatcaaattttttcagacatagcgatgctttttacttttatgtattacaaaatctaaaactactttatacaactagtgtaattagatcattttcacttggcttctttcaccactattgtataaactatctgtcttctattgcctgtctctggcaactcttctctatgctctaattccaataaattttaaataattctcttaatttgtcttggtacctaaatctctgtcttcctaatgcttgttgtcctatcggccctcttcggtcaaaaacttttatgactatggcatcctcctctctcctaattacatgccctatctatctaaattgtgctacattaatgaatttcatgtcagattctccaaaacttatatacaactcaaagttgtaacatctgcgccacaaaccttcttttttatccgtccatatattcttattagaatttttgctcaaaacatttgagcagttcttggtcatttggtgtaagtgaacaagtttctataccatacgttagaactggtcttattggtgttttgtaggcagtcaattcaatttttctaggtaggccatttgtcttcttaagccatagtaacacttattggcgagcactattcttcttttaatttcttcactgacattgttatctttagttagcagcgagcctaagtatatgaaggtgtcgacaccttccagttctaggtcgtcaattattattcttgtaggtgtcgggttgcttgacctagtgcaacacatatatttggtcttttgaacatttatatttagcccattctctgtgcagatgctcttaacgaccgaaatgcttcagtcagacattctttagatctacctatgatatctat

SEQ ID NO: 1911 - DNA, 1065 bp, Diabrotica virgifera
  SmartBlast Evalue=2E-42; Info=Endonuclease-reverse transcriptase n=1 Tax=Bombyx mori RepID=D7F170_BOMMO
tcttttacagctacagatatgcgttaagcacatggtgaaagatctggattgtttggtggtgttcaagagcaggtatctctatcacaaaagtagcctttttttattgtgctagttctgtttgttgaattattattgaatcatcgatggcaatcatggcacctaaggcatcgatggcacctaagggtgcttttttttcttttatttgctccagttaatctttggagttagtcaccataagacctcttgttaacattatcattatcaatggcatcacagctcgttgagccaaagccttcttcagaacaatcctccattcgccctgtctctggcaactcttctccatgctctaattccaatagatttcaaatcattttctaggttgtcttggtacctaagtctcggtcttcctcttgctcgttgtcctatcggccctcttcggtcaaaaacttttctgactatggcatcttcctctcgtctgattacatgacctatccatctaaaatctaaggcgtgctaccttaatgaattttacaacgtcaggttctccaaaacttctatacaactcaaagttgtaacacctgcgccacaaaccttgttcttttatgcctccatatattcttagtctagtcttcgcttcgagttttcgctcaaaacgtttgagcagttcttggtcattatgtgtaagtgaccaagtttatgaaccatatgttagcactgatcctattagtgttttatagatagtcaatttaatttgtctaggtagttttgaggccatctgtcttcttaagccatagtaacacttattggcgagcactattcttcttttaatttcttcactgacattgttatctttagttagcagcgagcctaagtatatgaaggtgtcgacaccttccagttctaggtcgtcaattattattcttgtaggtgtcgggttgcttgacctagtgcaacacatatatttggtcttttgaacatttatatttagcccattctctgtgcagatgctcttaacgaccgaaatgcttcagtcagacattctttagatctacctatgatatctat

SEQ ID NO: 1912 - DNA, 1007 bp, Diabrotica virgifera
  SmartBlast Evalue=8E-15; Info=Endonuclease-reverse transcriptase n=1 Tax=Bombyx mori RepID=D7F170_BOMMO
tcttttacagctacagatatgcgttaagcacatggtgaaagatctggattgtttggtggtgttcaagagcaggtatctctatcacaaaagtagcctttttttattgtgctagttctgtttgttgaattattattgaatcatcgatggcaatcatggcacctaaggcatcgatggcacctaagggtgcttttttttcttttatttgctccagttaatctttggagttagtcaccataagacctcttgttaacattatcattatcaatggcatcacagctcgttgagccaaagccttcttcagaacaatcctccattcgccctgtctctggcaactcttctccatgctctaattccaatagatttcaaatcattttctaggttgtcttggtacctaagtctcggtcttcctcttgctcgttgtcctatcggccctcttcggtcaaaaacttttctgactatggcatcttcctctcgtctgattacatgacctatccatctaaaatctaaggcgtgctaccttaatgaattttacaacgtcaggttctccaaaacttctatacaactcaaagttgtaacacctgcgccacaaaccttgttcttttatgcctccatatatttgtcaaggagcatcagtatggcgtttattcttacaatgatggtttttagttccatccgctattggttcgaatttcattatcttaatttaattcacccattttcaaccctatttacagttccgtcattcttcatctaaaaattattctgtacaaaaaaacgctttttaaatattcagtatgccgtttattcttacagcgatgtcatcttaatttaatcccccccccattttcaaccctacttacagttgcgtcattattcatctgaaacaaggtctaaaatggcgcgtatttcaatatcgacgcaactaccctgtagtggctcagcacgtagctacaattctgtcgcttttgtaccatctgtacacagtattttaagttatttactcaata

SEQ ID NO: 1913 - DNA, 893 bp, Diabrotica virgifera
  SmartBlast Evalue=2E-45; Info=Endonuclease-reverse transcriptase n=1 Tax=Bombyx mori RepID=D7F170_BOMMO
attatttacatcaagtataactctacacgagcttggtttttatcaagtaattgtaaattcaatatttagatgtttatcatcatcatcatcatcagtggcgttacagctctttatgagccaaagccttcttcagaacaatcctccattcgccctgtctctggcaactcttctccatgctctaattccaatagatttcaaatcattttctaggttgtcttggtacctaagtctcggtcttcctcttgctcgttgtcctatcggccctcttcggtcaaaaacttttctgactatggcatcttcctctcgtctgattacatgacctatccatcttctaaggcgtgctaccttaatgaattttacaacgtcaggttctccaaaacttctatacaactcaaagttgtaacacctgcgccacaaaccttgttcttttatgcctccatatattcttagtctagtcttcgcttcgagttttcgctcaaaacgtttgagcagttcttggtcattatgtgtaagtgaccaagtttatgaaccatatgttagcactgatcctattagtgttttatagatagtcaatttaatttgtctaggtagttttgaggccatctgtcttcttaagccatagtaacacttattggcgagcactattcttcttttaatttcttcactgacattgttatctttagttagcagcgagcctaagtatatgaaggtgtcgacaccttccagttctaggtcgtcaattattattcttgtaggtgtcgggttgcttgacctagtgcaacacatatatttggtcttttgaacatttatatttagcccattctctgtgcagatgctcttaacgaccgaaatgcttcagtcagacattctttagatctacctatgatatctat

SEQ ID NO: 1914 - DNA, 835 bp, Diabrotica virgifera
  SmartBlast Evalue=1E-17; Info=Endonuclease-reverse transcriptase n=1 Tax=Bombyx mori RepID=D7F170_BOMMO
attatttacatcaagtataactctacacgagcttggtttttatcaagtaattgtaaattcaatatttagatgtttatcatcatcatcatcatcagtggcgttacagctctttatgagccaaagccttcttcagaacaatcctccattcgccctgtctctggcaactcttctccatgctctaattccaatagatttcaaatcattttctaggttgtcttggtacctaagtctcggtcttcctcttgctcgttgtcctatcggccctcttcggtcaaaaacttttctgactatggcatcttcctctcgtctgattacatgacctatccatcttctaaggcgtgctaccttaatgaattttacaacgtcaggttctccaaaacttctatacaactcaaagttgtaacacctgcgccacaaaccttgttcttttatgcctccatatatttgtcaaggagcatcagtatggcgtttattcttacaatgatggtttttagttccatccgctattggttcgaatttcattatcttaatttaattcacccattttcaaccctatttacagttccgtcattcttcatctaaaaattattctgtacaaaaaaacgctttttaaatattcagtatgccgtttattcttacagcgatgtcatcttaatttaatcccccccccattttcaaccctacttacagttgcgtcattattcatctgaaacaaggtctaaaatggcgcgtatttcaatatcgacgcaactaccctgtagtggctcagcacgtagctacaattctgtcgcttttgtaccatctgtacacagtattttaagttatttactcaata

SEQ ID NO: 1915 - DNA, 545 bp, Diabrotica virgifera
  SmartBlast Evalue=4E-26; Info=Endonuclease-reverse transcriptase n=1 Tax=Bombyx mori RepID=D7F170_BOMMO
actatggcatcttcctctcgcctgattacgttccctatccatctaaggcgtatattttacaatgtcaggttctccaaaacttctatacaactcaatccctccatatattcttcgtaggatttttcgctcgaaacgtttgagcagttcttggtcattatgtgtaagtgaccaagtttatgaaccatatgttagcactgatcctattagtgttttatagatagtcaatttaatttgtctaggtagttttgaggccatctgtcttcttaagccatagtaacacttattggcgagcactattcttcttttaatttcttcactgacattgttatctttagttagcagcgagcctaagtatatgaaggtgtcgacaccttccagttctaggtcgtcaattattattcttgtaggtgtcgggttgcttgacctagtgcaacacatatatttggtcttttgaacatttatatttagcccattctctgtgcagatgctcttaacgaccgaaatgcttcagtcagacattctttagatctacctatgatatctat

SEQ ID NO: 1916 - DNA, 480 bp, Diabrotica virgifera
  SmartBlast Evalue=2E-24; Info=Endonuclease-reverse transcriptase n=1 Tax=Bombyx mori RepID=D7F170_BOMMO
taacacgtgctccacaaaccttgttcttttatgcctccatatatccgtcttaggtttttcgctcaaaacgtttgagcagttcttggttattctgtgtaagtgaccaattttctgaaccatatgttagcactggtcttattagtgttttgtagatagtcaatttaatttgtctaggtagttttgaggccatctgtcttcttaagccatagtaacacttattggcgagcactattcttcttttaatttcttcactgacattgttatctttagttagcagcgagcctaagtatatgaaggtgtcgacaccttccagttctaggtcgtcaattattattcttgtaggtgtcgggttgcttgacctagtgcaacacatatatttggtcttttgaacatttatatttagcccattctctgtgcagatgctcttaacgaccgaaatgcttcagtcagacattctttagatctacctatgatatctat

SEQ ID NO: 1917 - DNA, 3622 bp, Diabrotica virgifera
  SmartBlast Evalue=2E-10; Info=Putative transposase yabusame-1 n= 2 Tax=Bombyx mori RepID=Q75QC0_BOMMO
tcaaaaatccactcgacatgcgcaccatacactgtctcgtgtttacagttggtaatctgctgtgacatcgtaaaaagtaaaaaaatgtatgcgtatgctagtcatatattgattgatttgttttttgaggattttggaacgaatggaagcaatattaaagaaaatcgttactacgtaaaccatcctttggttttaaccttcgttggggggcataggtacaattgtaacttttcagtttttaaattgtgataactttttttattaaagagataaagacttgaacttttgtgacatctctacatttatccagtacattatgtaagccaaatataacaaagaaatattcattcagttcccagcagggggcttacgtttttcctacccccataaacgacggcataggtacatttgtaccttgtatttttttaataattgttataaaaaatcaatacattttgtatttaaatgatagtttatttgaaacaaaatcaaaaatgaatgttagtgtggattttcgcaacatacatgtcgttttagacaaagaatgttcgtcacacacaggtagaaaacatgctacacactttttctcgttttaggctgttttttccgttcgtttcggtaaacatggtaacttccggttactgaagtagatccacgaatgctgtgagatacctgaagaggagtatctacagcaagaaaaagatctttagaaagatccttcaaaaacttcttgcgttggtccttttttgtaatggattgtggtctcgatataatgtaggatgctaaccaaggaacgtcaatcatattacaaaaaaaggtcaagtaccaactcgatgttcgacgcttgagcgtacatttatccatcgtatcaacctccctttaggtttactctaattctgaatcgtttcaggctacttgtcctgtcatatccatggacgagagtaacactactgctttgtttttctttagcaaataagaacatacggtagcatcatgattgtatgccagatttgtggaaaaacagccctttcctagattgctttcatattggtaagcaaaaatctcttatttttttttctaaatgagcccacgaacgtcatgtgacacgaattctagactttagcgagttcaaaactggtcaaaagttatctgtggtaacctttcgcccagaacctttataagacgtgaccagatccaaaactgttcgtttgccaacgttaacttgtcgggaaccatattctgtttttcaaatataaagatgaatttgtatgggataaggtgtttgatgcattacaaatccaaaatacgatgtttagtgtgtttggaataatatattgtgtacattttgtaggtatggcctctaaacggaaacaattgttcatctatggttatgcattgggatggtttgtagttttgttgcacatttctattcagcattgtccagatatctcgtatgagtgcagccttatcagcttttttgcgttattgacgggtattttcgttgtcaaatcttataaatattagcatagtcttgagatgatcatgagacatagctacacgtatgagtggcagaggctccatattccccatctcacacaagttttcttcgttgattctattcatactttttttgtcggcattttggtaaactagatttagaatcattaatactaatgataattttcaggtatacataatattgacaaacgccaaacaactaaatgtggatgaaatctgtttccagttgaaacacaatacaatgatactcttcttagaatttgtttacgaccactatttccaaaagtttattgttgcagtaattccaataatttacgatagataacagggatcacttaaaagcggctttcaatctttgtttgtaaatccatacaagaacaaattaccgaatattacctattattcatttattgcaatattaaacaattctttataccccattccacgaatatacgtctgttttggattgtcgcgacaacgaatgttttactgtgcaaaatatgaagaacgaaagtaaattgcaaattatattgttgtttattggagtaattattagtgcaaaatactttcgtacttcttatgttgcacactaaaatgttcgttgtcgcgatatcccaaacagacgtatattcgtggaatacactataccagttatactagcaataaataatattatcttaaaactaacaaatattacctttagattaaggaatttttaagaaaatatgttataggtacaattgtacctatgccgtctgttaccggtgtaaaattatgccgctcgacaaaggttaatgatacagtgcattgaagagtttttggagtgttctacttgatggtaacgtgatggaacaagtggcttgaatgttttaattgtgatcaactgagaaaacgtgatatttagatatatatgtatagctctttgccagtaactaaacgatccctagtccttctaccgttttttgtgttgttccaaacaattttagcactgaaaaagcttaacgaaagagtagaagaagagaatagataaaatcattaaacaacgaaatggacttggtatagtgtacaccatagcatgcaacgtacttatcttttggtttggtactgttgtcttggatatttcgcaatgtattggactgttatttcctatccaataaggtctcaacaaaaatataggtaactatgtatcatgacgacttctaatatacacgagtgtattttatcaagtttcggtgagaaattgtactctatcaattcgagtagtggcagtggaattgaaaagaaagaataaatgatctgtagatcgctgtagtgtattctatctattttaaagtagtaataactcaacagtaacattcgaattcttttttgtactgcaaattgaatttcttgctttaataataataaaaaactacatgagcaaggccgtaactggcgtagtttgagaaaattaaatttacacaatttcggcctttctctaatcagtcatatcataaaactattctaatgtcatttgtcatgattagctgagagtactacccagtcaaaaattggcccacggcatgtttcaatagacttaacacatttaatttttattttttctcagatctggagaaattctaatcttagctcgtatcttttacattagcaatgacgtcacaatttccctagcccaaagaaatttttccggtttactcatctacttttacaaaaatatttattttctgttttactttttaagtattggtgttaatttaatcggacaaaagcaaaacaacgtgtgatagtcagtgtttaccatgaaattttgttaaaaatcagttgattgttactattatgatatatagttatatgtacatagtaattttaacctaccgttaacagtatccagttgaaaccagttatgtaaatgtctaaatgggattttatcgaatgtcaaaagctttttcgaaccatccccgactatttaatccttccaaagaaacttgtgttagcggggtggatttttatatttgtttactatatatattactatatagtaagtgtattctgtactattggaaataatttatatttattgatattatttcatgaaataaatgtg

SEQ ID NO: 1918 - DNA, 3618 bp, Diabrotica virgifera
  SmartBlast Evalue=7E-12; Info=Putative transposase yabusame-1 n= 2 Tax=Bombyx mori RepID=Q75QC0_BOMMO
tcaaaaatccactcgacatgcgcaccatacactgtctcgtgtttacagttggtaatctgctgtgacatcgtaaaaagtaaaaaaatgtatgcgtatgctagtcatatattgattgatttgttttttgaggattttggaacgaatggaagcaatattaaagaaaatcgttactacgtaaaccatcctttggttttaaccttcgttggggggcataggtacaattgtaacttttcagtttttaaattgtgataactttttttattaaagagataaagacttgaacttttgtgacatctctacatttatccagtacattatgtaagccaaatataacaaagaaatattcattcagttcccagcagggggcttacgtttttcctacccccataaacgacggcataggtacatttgtaccttgtatttttttaataattgttataaaaaatcaatacattttgtatttaaatgatagtttatttgaaacaaaatcaaaaatgaatgttagtgtggattttcgcaacatacatgtcgttttagacaaagaatgttcgtcacacacaggtagaaaacatgctacacactttttctcgttttaggctgttttttccgttcgtttcggtaaacatggtaacttccggttactgaagtagatatacccgaagaggagtatctacagcaagaaaaatatctttagaaagatccttcaaaaacttcttgcgttggtccttttttgtaatggattgtggtctcgatataatgtaggatgctaaccaaggaacgtcaatcatattacaaaaaaagctcaagtaccaactcaatgttcgacgcttgaacgtacatttaccaagcattttatccatcgtatcaacctccctttaggtttactctaattctgaatcgtttcaggctacttgtcctgtcatatccatggacgagagtaacactactgctttgtttttctttagcaaataagaacatacggtagcatcatgattgtatgccagatttgtggaaaaacagccctttcctagattgctttcatattggtaagcaaaaatctcttatttttttttctaaatgagcccacgaacgtcatgtgacacgaattctagactttagcgagttcaaaactggtcaaaagttatctgtggtaacctttcgcccagaacctttataagacgtgaccagatccaaaactgttcgtttgccaacgttaacttgtcgggaaccatattctgtttttcaaatataaagatgaatttgtatgggataaggtgtttgatgcattacaaatccaaaatacgatgtttagtgtgtttggaataatatattgtgtacattttgtaggtatggcctctaaacggaaacaattgttcatctatggttatgcattgggatggtttgtagttttgttgcacatttctattcagcattgtccagatatctcgtatgagtgcagccttatcagcttttttgcgttattgacgggtattttcgttgtcaaatcttataaatattagcatagtcttgagatgatcatgagacatagctacacgtatgagtggcagaggctccatattccccatctcacacaagttttcttcgttgattctattcatactttttttgtcggcattttggtaaactagatttagaatcattaatactaatgataattttcaggtatacataatattgacaaacgccaaacaactaaatgtggatgaaatctgtttccagttgaaacacaatacaatgatactcttcttagaatttgtttacgaccactatttccaaaagtttattgttgcagtaattccaataatttacgatagataacagggatcacttaaaagcggctttcaatctttgtttgtaaatccatacaagaacaaattaccgaatattacctattattcatttattgcaatattaaacaattctttataccccattccacgaatatacgtctgttttggattgtcgcgacaacgaatgttttactgtgcaaaatatgaagaacgaaagtaaattgcaaattatattgttgtttattggagtaattattagtgcaaaatactttcgtacttcttatgttgcacactaaaatgttcgttgtcgcgatatcccaaacagacgtatattcgtggaatacactataccagttatactagcaataaataatattatcttaaaactaacaaatattacctttagattaaggaatttttaagaaaatatgttataggtacaattgtacctatgccgtctgttaccggtgtaaaattatgccgctcgacaaaggttaatgatacagtgcattgaagagtttttggagtgttctacttgatggtaacgtgatggaacaagtggcttgaatgttttaattgtgatcaactgagaaaacgtgatatttagatatatatgtatagctctttgccagtaactaaacgatccctagtccttctaccgttttttgtgttgttccaaacaattttagcactgaaaaagcttaacgaaagagtagaagaagagaatagataaaatcattaaacaacgaaatggacttggtatagtgtacaccatagcatgcaacgtacttatcttttggtttggtactgttgtcttggatatttcgcaatgtattggactgttatttcctatccaataaggtctcaacaaaaatataggtaactatgtatcatgacgacttctaatatacacgagtgtattttatcaagtttcggtgagaaattgtactctatcaattcgagtagtggcagtggaattgaaaagaaagaataaatgatctgtagatcgctgtagtgtattctatctattttaaagtagtaataactcaacagtaacattcgaattcttttttgtactgcaaattgaatttcttgctttaataataataaaaaactacatgagcaaggccgtaactggcgtagtttgagaaaattaaatttacacaatttcggcctttctctaatcagtcatatcataaaactattctaatgtcatttgtcatgattagctgagagtactacccagtcaaaaattggcccacggcatgtttcaatagacttaacacatttaatttttattttttctcagatctggagaaattctaatcttagctcgtatcttttacattagcaatgacgtcacaatttccctagcccaaagaaatttttccggtttactcatctacttttacaaaaatatttattttctgttttactttttaagtattggtgttaatttaatcggacaaaagcaaaacaacgtgtgatagtcagtgtttaccatgaaattttgttaaaaatcagttgattgttactattatgatatatagttatatgtacatagtaattttaacctaccgttaacagtatccagttgaaaccagttatgtaaatgtctaaatgggattttatcgaatgtcaaaagctttttcgaaccatccccgactatttaatccttccaaagaaacttgtgttagcggggtggatttttatatttgtttactatatatattactatatagtaagtgtattctgtactattggaaataatttatatttattgatattatttcatgaaataaatgtg

SEQ ID NO: 1919 - DNA, 3592 bp, Diabrotica virgifera
  SmartBlast Evalue=2E-10; Info=Putative transposase yabusame-1 n= 2 Tax=Bombyx mori RepID=Q75QC0_BOMMO
tcaaaaatccactcgacatgcgcaccatacactgtctcgtgtttacagttggtaatctgctgtgacatcgtaaaaagtaaaaaaatgtatgcgtatgctagtcatatattgattgatttgttttttgaggattttggaacgaatggaagcaatattaaagaaaatcgttactacgtaaaccatcctttggttttaaccttcgttggggggcataggtacaattgtaacttttcagtttttaaattgtgataactttttttattaaagagataaagacttgaacttttgtgacatctctacatttatccagtacattatgtaagccaaatataacaaagaaatattcattcagttcccagcagggggcttacgtttttcctacccccataaacgacggcataggtacatttgtaccttgtatttttttaataattgttataaaaaatcaatacattttgtatttaaatgatagtttatttgaaacaaaatcaaaaatgaatgttagtgtggattttcgcaacatacatgtcgttttagacaaagaatgttcgtcacacacaggtagaaaacatgctacacactttttctcgttttaggctgttttttccgttcgtttcggtaaacatggtaacttccggttactgaagtagatccacgaatgctgtgagatacctgaagaggagtatctacagcaagaaaaagatctttagaaagatccttcaaaaacttcttgcgttggtccttttttgtaatggattgtggtctcgatataatgtaggatgctaaccaaggaacgtcaatcatattacaaaaaaaggtcaagtaccaactcgatgttcgacgcttgagcgtacatttatccatcgtatcaacctccctttaggtttactctaattctgaatcgtttcaggctacttgtcctgtcatatccatggacgagagtaacactactgctttgtttttctttagcaaataagaacatacggtagcatcatgattgtatgccagatttgtggaaaaacagccctttcctagattgctttcatattggtaagcaaaaatctcttatttttttttctaaatgagcccacgaacgtcatgtgacacgaattctagactttagcgagttcaaaactggtcaaaagttatctgtggtaacctttcgcccagaacctttataagacgtgaccagatccaaaactgttcgtttgccaacgttaacttgtcgggaaccatattctgtttttcaaatataaagatgaatttgtatgggataaggtgtttgatgcattacaaatccaaaatacgatgtttagtgtgtttggaataatatattgtgtacattttgtaggtatggcctctaaacggaaacaattgttcatctatggttatgcattgggatggtttgtagttttgttgcacatttctattcagcattgtccagatatctcgtatgagtgcagccttatcagcttttttgcgttattgacgggtattttcgttgtcaaatcttataaatattagcatagtcttgagatgatcatgagacatagctacacgtatgagtggcagaggctccatattccccatctcacacaagttttcttcgttgattctattcatactttttttgtcggcattttggtaaactagatttagaatcattaatactaatgataattttcaggtatacataatattgacaaacgccaaacaactaaatgtggatgaaatctgtttccagttgaaacacaatacaatgatactcttcttagaatttgtttacgaccactatttccaaaagtttattgttgcagtaattccaataatttacgatagataacagggatcacttaaaagcggctttcaatctttgtttgtaaatccatacaagaacaaattaccgaatattacctattattcatttattgcaatattaaacaattctttataccccattccacgaatatacgtctgttttggattgtcgcgacaacgaatgttttactgtgcaaaatatgaagaacgaaagtaaattgcaaattatattgttgtttattggagtaattattagtgcaaaatactttcgtacttcttatgttgcacactaaaatgttcgttgtcgcgatatcccaaacagacgtatattcgtggaatacactataccagttatactagcaataaataatattatcttaaaactaacaaatattacctttagattaaggaatttttaagaaaatatgttataggtacaattgtacctatgccgtctaaggttaatgatacagtgcattaaagagtttttggagtgttctacttgatggtaacgtgatggaacaagtggcttgaatgttttaattgtgatcaactgagaaaacgtgatatttagatatatatgtatagctctttgccagtaactaaacgatccctagtccttctaccgttttttgtgttgttccaaacaattttagcactgaaaaagcttaacgaaagagtagaagaagagaatagataaaatcattaaacaacgaaatggacttggtatagtgtacaccatagcatgcaacgtacttatcttttggtttggtactgttgtcttggatatttcgcaatgtattggactgttatttcctatccaataaggtctcaacaaaaatataggtaactatgtatcatgacgacttctaatatacacgagtgtattttatcaagtttcggtgagaaattgtactctatcaattcgagtagtggcagtggaattgaaaagaaagaataaatgatctgtagatcgctgtagtgtattctatctattttaaagtagtaataactcaacagtaacattcgaattcttttttgtactgcaaattgaatttcttgctttaataataataaaaaactacatgagcaaggccgtaactggcgtagtttgagaaaattaaatttacacaatttcggcctttctctaatcagtcatatcataaaactattctaatgtcatttgtcatgattagctgagagtactacccagtcaaaaattggcccacggcatgtttcaatagacttaacacatttaatttttattttttctcagatctggagaaattctaatcttagctcgtatcttttacattagcaatgacgtcacaatttccctagcccaaagaaatttttccggtttactcatctacttttacaaaaatatttattttctgttttactttttaagtattggtgttaatttaatcggacaaaagcaaaacaacgtgtgatagtcagtgtttaccatgaaattttgttaaaaatcagttgattgttactattatgatatatagttatatgtacatagtaattttaacctaccgttaacagtatccagttgaaaccagttatgtaaatgtctaaatgggattttatcgaatgtcaaaagctttttcgaaccatccccgactatttaatccttccaaagaaacttgtgttagcggggtggatttttatatttgtttactatatatattactatatagtaagtgtattctgtactattggaaataatttatatttattgatattatttcatgaaataaatgtg

SEQ ID NO: 1920 - DNA, 3588 bp, Diabrotica virgifera
  SmartBlast Evalue=7E-12; Info=Putative transposase yabusame-1 n= 2 Tax=Bombyx mori RepID=Q75QC0_BOMMO
tcaaaaatccactcgacatgcgcaccatacactgtctcgtgtttacagttggtaatctgctgtgacatcgtaaaaagtaaaaaaatgtatgcgtatgctagtcatatattgattgatttgttttttgaggattttggaacgaatggaagcaatattaaagaaaatcgttactacgtaaaccatcctttggttttaaccttcgttggggggcataggtacaattgtaacttttcagtttttaaattgtgataactttttttattaaagagataaagacttgaacttttgtgacatctctacatttatccagtacattatgtaagccaaatataacaaagaaatattcattcagttcccagcagggggcttacgtttttcctacccccataaacgacggcataggtacatttgtaccttgtatttttttaataattgttataaaaaatcaatacattttgtatttaaatgatagtttatttgaaacaaaatcaaaaatgaatgttagtgtggattttcgcaacatacatgtcgttttagacaaagaatgttcgtcacacacaggtagaaaacatgctacacactttttctcgttttaggctgttttttccgttcgtttcggtaaacatggtaacttccggttactgaagtagatatacccgaagaggagtatctacagcaagaaaaatatctttagaaagatccttcaaaaacttcttgcgttggtccttttttgtaatggattgtggtctcgatataatgtaggatgctaaccaaggaacgtcaatcatattacaaaaaaagctcaagtaccaactcaatgttcgacgcttgaacgtacatttaccaagcattttatccatcgtatcaacctccctttaggtttactctaattctgaatcgtttcaggctacttgtcctgtcatatccatggacgagagtaacactactgctttgtttttctttagcaaataagaacatacggtagcatcatgattgtatgccagatttgtggaaaaacagccctttcctagattgctttcatattggtaagcaaaaatctcttatttttttttctaaatgagcccacgaacgtcatgtgacacgaattctagactttagcgagttcaaaactggtcaaaagttatctgtggtaacctttcgcccagaacctttataagacgtgaccagatccaaaactgttcgtttgccaacgttaacttgtcgggaaccatattctgtttttcaaatataaagatgaatttgtatgggataaggtgtttgatgcattacaaatccaaaatacgatgtttagtgtgtttggaataatatattgtgtacattttgtaggtatggcctctaaacggaaacaattgttcatctatggttatgcattgggatggtttgtagttttgttgcacatttctattcagcattgtccagatatctcgtatgagtgcagccttatcagcttttttgcgttattgacgggtattttcgttgtcaaatcttataaatattagcatagtcttgagatgatcatgagacatagctacacgtatgagtggcagaggctccatattccccatctcacacaagttttcttcgttgattctattcatactttttttgtcggcattttggtaaactagatttagaatcattaatactaatgataattttcaggtatacataatattgacaaacgccaaacaactaaatgtggatgaaatctgtttccagttgaaacacaatacaatgatactcttcttagaatttgtttacgaccactatttccaaaagtttattgttgcagtaattccaataatttacgatagataacagggatcacttaaaagcggctttcaatctttgtttgtaaatccatacaagaacaaattaccgaatattacctattattcatttattgcaatattaaacaattctttataccccattccacgaatatacgtctgttttggattgtcgcgacaacgaatgttttactgtgcaaaatatgaagaacgaaagtaaattgcaaattatattgttgtttattggagtaattattagtgcaaaatactttcgtacttcttatgttgcacactaaaatgttcgttgtcgcgatatcccaaacagacgtatattcgtggaatacactataccagttatactagcaataaataatattatcttaaaactaacaaatattacctttagattaaggaatttttaagaaaatatgttataggtacaattgtacctatgccgtctaaggttaatgatacagtgcattaaagagtttttggagtgttctacttgatggtaacgtgatggaacaagtggcttgaatgttttaattgtgatcaactgagaaaacgtgatatttagatatatatgtatagctctttgccagtaactaaacgatccctagtccttctaccgttttttgtgttgttccaaacaattttagcactgaaaaagcttaacgaaagagtagaagaagagaatagataaaatcattaaacaacgaaatggacttggtatagtgtacaccatagcatgcaacgtacttatcttttggtttggtactgttgtcttggatatttcgcaatgtattggactgttatttcctatccaataaggtctcaacaaaaatataggtaactatgtatcatgacgacttctaatatacacgagtgtattttatcaagtttcggtgagaaattgtactctatcaattcgagtagtggcagtggaattgaaaagaaagaataaatgatctgtagatcgctgtagtgtattctatctattttaaagtagtaataactcaacagtaacattcgaattcttttttgtactgcaaattgaatttcttgctttaataataataaaaaactacatgagcaaggccgtaactggcgtagtttgagaaaattaaatttacacaatttcggcctttctctaatcagtcatatcataaaactattctaatgtcatttgtcatgattagctgagagtactacccagtcaaaaattggcccacggcatgtttcaatagacttaacacatttaatttttattttttctcagatctggagaaattctaatcttagctcgtatcttttacattagcaatgacgtcacaatttccctagcccaaagaaatttttccggtttactcatctacttttacaaaaatatttattttctgttttactttttaagtattggtgttaatttaatcggacaaaagcaaaacaacgtgtgatagtcagtgtttaccatgaaattttgttaaaaatcagttgattgttactattatgatatatagttatatgtacatagtaattttaacctaccgttaacagtatccagttgaaaccagttatgtaaatgtctaaatgggattttatcgaatgtcaaaagctttttcgaaccatccccgactatttaatccttccaaagaaacttgtgttagcggggtggatttttatatttgtttactatatatattactatatagtaagtgtattctgtactattggaaataatttatatttattgatattatttcatgaaataaatgtg

SEQ ID NO: 1921 - DNA, 1135 bp, Diabrotica virgifera
tcaaaaatccactcgacatgcgcaccatacactgtctcgtgtttacagttggtaatctgctgtgacatcgtaaaaagtaaaaaaatgtatgcgtatgctagtcatatattgattgatttgttttttgaggattttggaacgaatggaagcaatattaaagaaaatcgttactacgtaaaccatcctttggttttaaccttcgttggggggcataggtacaattgtaacttttcagtttttaaattgtgataactttttttattaaagagataaagacttgaacttttgtgacatctctacatttatccagtacattatgtaagccaaatataacaaagaaatattcattcagttcccagcagggggcttacgtttttcctacccccataaacgacggcataggtacatttgtaccttgtatttttttaataattgttataaaaaatcaatacattttgtatttaaatgatagtttatttgaaacaaaatcaaaaatgaatgttagtgtggattttcgcaacatacatgtcgttttagacaaagaatgttcgtcacacacaggtagaaaacatgctacacactttttctcgttttaggctgttttttccgttcgtttcggtaaacatggtaacttccggttactgaagtagatccacgaatgctgtgagatacctgaagaggagtatctacagcaagaaaaagatctttagaaagatccttcaaaaacttcttgcgttggtccttttttgtaatggattgtggtctcgatataatgtaggatgctaaccaaggaacgtcaatcatattacaaaaaaaggtcaagtacacttcgcgtcaaaaaaaaactggtacactttttttcccaatgtaaacctgtgttcagactggacacaatggctcgtgaatcacggcgttgttgccagcactgataatggaattgcactaaatctaaatacaaaaaataacgttcaaaaatcatggtggtgaatcgtaaaacgggccataggtaactcaatgtaaaattctaaactgttaaattcctgcttccctaatcattttacaacaaaatcatgagaagctatttgtatgggattaaaatcgtattaaaacaaaagctaaaattgttctaggattt

SEQ ID NO: 1922 - DNA, 915 bp, Diabrotica virgifera
tcaaaaatccactcgacatgcgcaccatacactgtctcgtgtttacagttggtaatctgctgtgacatcgtaaaaagtaaaaaaatgtatgcgtatgctagtcatatattgattgatttgttttttgaggattttggaacgaatggaagcaatattaaagaaaatcgttactacgtaaaccatcctttggttttaaccttcgttggggggcataggtacaattgtaacttttcagtttttaaattgtgataactttttttattaaagagataaagacttgaacttttgtgacatctctacatttatccagtacattatgtaagccaaatataacaaagaaatattcattcagttcccagcagggggcttacgtttttcctacccccataaacgacggcataggtacatttgtaccttgtatttttttaataattgttataaaaaatcaatacattttgtatttaaatgatagtttatttgaaacaaaatcaaaaatgaatgttagtgtggattttcgcaacatacatgtcgttttagacaaagaatgttcgtcacacacaggtagaaaacatgctacacaagtatttctcgttttacgctgtttttctgctcgtttcgacaaatatgacaacttccggttactggagtagatccacgaatgctttgagatacttgaggaggagtatctacagcaaatacatactctgttgcgaccaaggaccatttctacagcactacgaagaaaatgactcctcaacatcatccggtttttactttgagattgaaattaaggtaaccaaatatctttagaaggatccttcaaaaatttcctgcgttagtcctttgttttttgtaatggattatgctctcgatctataatgtagcatgctaagccagtgaagtcaatcatattat

SEQ ID NO: 1923 - DNA, 2971 bp, Diabrotica virgifera
  SmartBlast Evalue=5E-70; Info=Reverse transcriptase n=2 Tax= Ostrinia nubilalis RepID=A4KWG0_OSTNU
gtattattataaaatatcttattcccgaggaagacaaatccaaagacacaaaaattataataaatatatttactaaaaacactaataatatattcttttcacgcacaccttatttgcgctatataaagatgtagtgactaataccatactgtcggtgtgcgcatgcgccggggaatgtaaaaattcaccctcgtgcctaaagaagtataactttaaaaattattgagaaagaattcgaacttaatgaaattgaacatcaagcaggatttggagctggaagatcttgcgtagaccacatatttaccctaacagaacttaatgaaaagaaacttgcaaggagtcaggaaatacatatctcatttgtggatctaacaaaagaatatgggacgattccggtaagaaatctgcgacagtctcttgaacgatcttcgttaaatagcacgatcatcgccacagtcaaacaattataaaagaaggtaataacatcataaatcaaaataaataacatcttatcagaagaatttccagtaacaaaagggttacgacaagaacaagtcgtagtgaaaacagacaaggaagattaagaattcatgacgagacggttatttcaaagatatggcgatgtggggcctttctgtaaatacttagaaacacaatacaatattatgcatctggaatgaagcagaagatctagtggtcagcgaacttgaaacaatcaagaactgtgagaattgcccaggcaaccaaacgacgttgtagtaacgtagataacacgtcataaaaatgaccaattgacgtgtttctatgacgtagtactgacgttgaaaatcacggtgacgattttaaaacgtcaaaaagatgacgacttttacacgccgccgtcggtaaaatcgcgtctgtaatactttcaaaaattgacctctttctctttcagatgtttcaaaatagtataaaaaataggtaacatgaaaatgtaggctaaaaattaatttaattaaactcgataacacataattagttcattaacagaaaatataaacataaccttaaatagttgacaagaagaattactgcattaaactaactctctgagcaaaagcgaataaaaattaattaacacttttcttaattaacacgtttcttcaactaaatatctcaatgaaaagtattactttatcacacaagacacaaagaacgtaaacaataaatgagaaatttcttatgaacaacgttataggtgaactaaattgtttgaagtcaaaacaaacaagctttttaagctcctcccaattttgtgatgtcagacttaagtcgactttacattacatgatttatcatctgatttgtcatatgatttggtcatagagtaaaatttacatgtttacactgtgtgatttgtcatatgattttgtcataagcattgtgttttatcataagcattgtcatgcggctcgtcatgtgccaaatcatatcataaatcacgtgataaatcatgtagtgtaaagtcgactttaggctgtctgaaatgaaaacgtcttttaaacgtattttaaggtcatttaatcttacgtatttaaaatcacctacaaaagacgtctatatgacgtaatgttcaatcacgtgtatatattcaaccaaaactgacgtttcctcgacgttatatgacgttacttggttgcttgggatgtaaaggcgtgtaggagaacgaattatggcgtagacgctataatttttagcttaaccacctttatagtgaacctagtattggtagatctatcaaaataaacaggccacttagagagaatgaatgagccgtcgaaacacatttatagccagagaccggatggagtgaggagaagaggcaggcccagagcacggtttaaggaccaggtggaagacacttgcgagtgttaggagtgcgaaattggaaaaccaaggtgaaggataggaaggaatggaagctgattctggaacaggccaagacccaccatggttgtagagccaattatggtgagaataagaaatgcacataatatactatagttcctatcatttccgagactattcatcatcatcaacccgtactcgtccactgctggacataggtctccctcagctctttccatctttctgttttgtgcggcttgcatccagttgccgacaatacgcttcagatcgtcagcccatctggttggtggtcgtcctctgctccgtagtgcttcttcttgtggcctccactcgacaatacgttttgttcatcggttgtctgacaatctggcgacgtgttctgaccaattccacttgagcgacgcgattatgtcgacagcgtccgttgtttttgttctacgacgtatttcttcgtttgggattcggtccctcagggagacacccaacatctggcgctccgtagccctctgagttatgcgaatcttgttcactaccttttttgtgagtgttaatgtttccgctccataagtgagtacaggcaatacacactggtcaaagattttccttttcaggcatatgggtaagtccgatttaaatacatagctcattttaccaatcgctaaacgctaggctataaataatcctatgcgacgtgggagctcgcacgtctggttatctcttcccaaccgaatttcatgtcccaagtacttataagatgcagtctgttcaatatccattccatcaacaacaatattacgatttagcaccaaattagtcagtatttgcgtcttgttgatattaatctttagtccgacctctaaggaagcgtgatataacttgttcaacattattattgcatcatccatacgatcgactataaggacgatgtcatctgcgaatctcaaatgactgagcttctctccatttatattgataccatattcgttcagatctgccttcttaaaagttaagtgtgttctaaaagggttgtgaatagctttggtgagatggtgtctccttgccg

SEQ ID NO: 1924 - DNA, 3070 bp, Diabrotica virgifera
  SmartBlast Evalue=0; Info=Putative inorganic phosphate cotransporter n=1 Tax=Harpegnathos saltator RepID=E2B851_9HYME
gtattattataaaatatcttattcccgaggaagacaaatccaaagacacaaaaattataataaatatatttactaaaaacactaataatatattcttttcacgcacaccttatttgcgctatataaagatgtagtgactaataccatactgtcggtgtgcgcatgcgccggggaatgtaaaaattcaccctcgtgcctaaagaagtataactttaaaaattattgagaaagaattcgaacttaatgaaattgaacatcaagcaggatttggagctggaagatcttgcgtagaccacatatttaccctaacagaacttaatgaaaagaaacttgcaaggagtcaggaaatacatatctcatttgtggatctaacaaaagaatatgggacgattccggtaagaaatctgcgacagtctcttgaacgatcttcgttaaatagcacgatcatcgccacagtcaaacaattataaaagaaggtaataacatcataaatcaaaataaataacatcttatcagaagaatttccagtaacaaaagggttacgacaagaacaagtcgtagtgaaaacagacaaggaagattaagaattcatgacgagacggttatttcaaagatatggcgatgtggggcctttctgtaaatacttagaaacacaacacaatacttatgcatctggaatgaagcagaagatctagtggtcagcgaacttgaaacaatcaagaatttaaaagtttagtgctatcgctctatggatgcgaaacatggaaacttactaaatctctggaacgacgcctacttaattgcattagaaatgaacgtttggagaagattatttagaaaatcaaggcttgaaagaatacaaaatgaccaagtcagacgtatcatggaagtcaagtcaactatcatagatgaaattcaaaggagacaactgatctggtatggtcatgtagaaagaatggacgaggtcagactgctaaaataaattttaaaatggatgccaagggaaagatggaaaacgggaaagccgcaacaattctgactaggcgggattcagaatgtaatgtcggaaaggaatcttcaccctggcgagttgaacaaccgacgaagctagaaactgggaaccggaatgcgaaaaacattttaaaaacctgataatacaatctagtctcataaaacttatccttacatcttacttttaactttaagataaaatcacaatattttcaagtatgtaaattaaaaattaagcacgagttgtcactacttcgggttcatcgtttggtctttttctttgagtttcctctggtggttgatcccaggactgacgttgtccagaagcgaagaatacgtaaaaagtacagcaacctgcatagacactagcggcggttatgaacactgttctccactttgcaatactaggcgttcccaccacaacatgaccagcataaatgggtgccaataatcctgcaaggttagccatacaatttgtgaaggacatcagtatacccgcaaactgaggtgagatatccaagtgatttactttaaaaccagaatagatgccaccgttcaaaccaaccccaatggtcaaaatggctactgttaaccatttatcacatccagtgaaggaaacagcgactagagctatggctggtccgtactgtccaattccattgatgatttttctgacgagagtgtgagagaaataaggtttagttaacataaaatcggcaacatggctgatgaagatagagaatatccacatggctaaatatggaagagctgataatactccgttatctttaatactaaagtgatgtatttgtttcatatatgttggaagctctgtcataagcgtttcgtacccgtaattgtgacccatgtgagctagaaggatagcatagaatggcatagatgtgagaatagacatccatgggattggtggaatcggcaatccaactttacttcctaactctttctgtatataaagcctctcttcgaccttcatttttgggttgctttgtgggtcctcatgaaccataagtaaaaagaatatacaccagatggtgccaacagtaccaaaaacgtaaaagattgaaggccaaccaaatctgcattctgataggagaccactaagaggcatagatattacagttccaaattgtgctcctgcatatacgaaagctcccattcgacttctctcgtttggagggatccattttgccaggagcgagtgtgtgcatgggacaatagggccctcccccaagccctgaataaatctaacccctatcagccaccaaatgcccatcttggccgatattggtacgaggagtccgaataacgagttgatcaacattccaatgcctaagaagtaaatgtttccataacgtttggctaatattccgaaaggaatttgggtaagaacgtagccatagaaaaatgagctgaggatatagccttgaacgtcagttggccagaggtattcgccttcggcttcatgtttagccgtatttgttgaattaatatttgtttcaacgccgcattcgtcatcgacagagatggcagtgtcgtgggaactcccacctatggccgtatgattgaccatagcgacgatagcgactgacatgttggtacgcatgatgtaagcgtttgccataccgagaaatagcataaaggtgacggtatgccttgttccaaaccatcctaaaggagagtttgcagatttttccaatgaaggaattttcttttccagatcgtaactgtgtttatgaaccatggttgtttacttattgtgaacgaaaattattttatgtattgcggttattaaacggtaacttggttaatttaactttagaaatttagcgaaaatacaaagtgatgtgaagatgcaggaaaaggaaaatcttgcgtaggaaaaacgatagtgcacaaaattatatcatttcgaaccgtgtatccattttgaaaaatatgcggtagcaaagttaggaagtttgcgtgtcgcgaagaaatcagcgtgcagttgtctgtttgtaaaacgcgcggtgtatcccgcgcgggcaggtagtttgac

SEQ ID NO: 1925 - DNA, 2641 bp, Diabrotica virgifera
  SmartBlast Evalue=0; Info=Putative inorganic phosphate cotransporter n=1 Tax=Harpegnathos saltator RepID=E2B851_9HYME
cacacaagacacaaaccgcgtaaacaataaatgagaaatttcttatgaacatttagcgttatacctaaacgaaattgtattgagtcaatacaaacaagcaagctcctcccaattttgtgacgtcagacttaggctgtctgaaaggaaaacgtcttttaaccgtattttaacgtcattaatcttacgtatttaaaatcacatacaaaagacgtctatatgccgtaatgttcaaacacgtgtatatattcaaccaaaactgacgtttcctcgacgttatatgacgtcacttggttgcctggggaacaaccccatctttaaaagtttagtgctatcgctctatggatgcgaagcagggaaacttactaaatccctggaacgacgcctacttgcattggaaatggacgtttgtagaagatcattcagaaaatcaaggcttgaaagaatacaaaataaccaaatcagacgtatcatggaagtcaagtcaactatcatagatgaaattcaaaggagacaactgatctggtatggtcatgtagaaagaatggacgaggtcagactgctaaaataaattttaaattggatgccaagggaaagaaggaaacaattctgactaggcgggattcagaatgtaatgtcggaaaggaatcttcaccctggcgagttgaacaaccgacgaagctagaaactgggaaccggaatgcgaaaaacattttaaaaacctgataatacaatctagtctcataaaacttatccttacatcttacttttaactttaagataaaatcacaatattttcaagtatgtaaattaaaaattaagcacgagttgtcactacttcgggttcatcgtttggtctttttctttgagtttcctctggtggttgatcccaggactgacgttgtccagaagcgaagaatacgtaaaaagtacagcaacctgcatagacactagcggcggttatgaacactgttctccactttgcaatactaggcgttcccaccacaacatgaccagcataaatgggtgccaataatcctgcaaggttagccatacaatttgtgaaggacatcagtatacccgcaaactgaggtgagatatccaagtgatttactttaaaaccagaatagatgccaccgttcaaaccaaccccaatggtcaaaatggctactgttaaccatttatcacatccagtgaaggaaacagcgactagagctatggctggtccgtactgtccaattccattgatgatttttctgacgagagtgtgagagaaataaggtttagttaacataaaatcggcaacatggctgatgaagatagagaatatccacatggctaaatatggaagagctgataatactccgttatctttaatactaaagtgatgtatttgtttcatatatgttggaagctctgtcataagcgtttcgtacccgtaattgtgacccatgtgagctagaaggatagcatagaatggcatagatgtgagaatagacatccatgggattggtggaatcggcaatccaactttacttcctaactctttctgtatataaagcctctcttcgaccttcatttttgggttgctttgtgggtcctcatgaaccataagtaaaaagaatatacaccagatggtgccaacagtaccaaaaacgtaaaagattgaaggccaaccaaatctgcattctgataggagaccactaagaggcatagatattacagttccaaattgtgctcctgcatatacgaaagctcccattcgacttctctcgtttggagggatccattttgccaggagcgagtgtgtgcatgggacaatagggccctcccccaagccctgaataaatctaacccctatcagccaccaaatgcccatcttggccgatattggtacgaggagtccgaataacgagttgatcaacattccaatgcctaagaagtaaatgtttccataacgtttggctaatattccgaaaggaatttgggtaagaacgtagccatagaaaaatgagctgaggatatagccttgaacgtcagttggccagaggtattcgccttcggcttcatgtttagccgtatttgttgaattaatatttgtttcaacgccgcattcgtcatcgacagagatggcagtgtcgtgggaactcccacctatggccgtatgattgaccatagcgacgatagcgactgacatgttggtacgcatgatgtaagcgtttgccataccgagaaatagcataaaggtgacggtatgccttgttccaaaccatcctaaaggagagtttgcagatttttccaatgaaggaattttcttttccagatcgtaactgtgtttatgaaccatggttgtttacttattgtgaacgaaaattattttatgtattgcggttattaaacggtaacttggttaatttaactttagaaatttagcgaaaatacaaagtgatgtgaagatgcaggaaaaggaaaatcttgcgtaggaaaaacgatagtgcacaaaattatatcatttcgaaccgtgtatccattttgaaaaatatgcggtagcaaagttaggaagtttgcgtgtcgcgaagaaatcagcgtgcagttgtctgtttgtaaaacgcgcggtgtatcccgcgcgggcaggtagtttgac

SEQ ID NO: 1926 - DNA, 1373 bp, Diabrotica virgifera
gtattattataaaatatcttattcccgaggaagacaaatccaaagacacaaaaattataataaatatatttactaaaaacactaataatatattcttttcacgcacaccttatttgcgctatataaagatgtagtgactaataccatactgtcggtgtgcgcatgcgccggggaatgtaaaaattcaccctcgtgcctaaagaagtataactttaaaaattattgagaaagaattcgaacttaatgaaattgaacatcaagcaggatttggagctggaagatcttgcgtagaccacatatttaccctaacagaacttaatgaaaagaaacttgcaaggagtcaggaaatacatatctcatttgtggatctaacaaaagaatatgggacgattccggtaagaaatctgcgacagtctcttgaacgatcttcgttaaatagcacgatcatcgccacagtcaaacaattataaaagaaggtaataacatcataaatcaaaataaataacatcttatcagaagaatttccagtaacaaaagggttacgacaagaacaagtcgtagtgaaaacagacaaggaagattaagaattcatgacgagacggttatttcaaagatatggcgatgtggggcctttctgtaaatacttagaaacacaatacaatattatgcatctggaatgaagcagaagatctagtggtcagcgaacttgaaacaatcaagaactgtgagaattgcccaggcaaccaaacgacgttgtagtaacgtagataacacgtcataaaaatgaccaattgacgtgtttctatgacgtagtactgacgttgaaaatcacggtgacgattttaaaacgtcaaaaagatgacgacttttacacgccgccgtcggtaaaatcgcgtctgtaatactttcaaaaattgacctctttctctttcagatgtttcaaaatagtataaaaaataggtaacatgaaaatgtaggctaaaaattaatttaattaaactcgataacacataattagttcattaacagaaaatataaacataaccttaaatagttgacaagaagaattactgcattaaactaactctctgagcaaaagcgaataaaaattaattaacacttttcttaattaacacgtttcttcaactaaatatctcaatgaaaagtattactttatcacacaagacacaaagcacgtaaacaataaatgagaaatttcttatgaacaacgttataaactaaattgtttgaagtcaaaacaaacaagctttttaagctcctcccaattttgtgacctcagacttgggctgtctgaaaggaaaacgtcttttaaccgtattttaacgtcattaatcttacgtatttaaaatcac

SEQ ID NO: 1927 - DNA, 823 bp, Diabrotica virgifera
gtattattataaaatatcttattcccgaggaagacaaatccaaagacacaaaaattataataaatatatttactaaaaacactaataatatattcttttcacgcacaccttatttgcgctatataaagatgtagtgactaataccatactgtcggtgtgcgcatgcgccggggaatgtaaaaattcaccctcgtgcctaaagaagtataactttaaaaattattgagaaagaattcgaacttaatgaaattgaacatcaagcaggatttggagctggaagatcttgcgtagaccacatatttaccctaacagaacttaatgaaaagaaacttgcaaggagtcaggaaatacatatctcatttgtggatctaacaaaagaatatgggacgattccggtgagaaatctgcgacagtctcttgaacgatcttcgttatactcagctattgctactgccgctgccgttgacggaaatattgcccgaaatatgatctcgacacgagtgaggtgtttacatcagtctcattaccgaacgagtcacaagaaaggaatgtgacaacaacatcgccttgctcccttactcacttgccgctctgccggcggcgaagccgcctttgacttctctcctttgacttccgtcactagaaccgactttttgggtatgtaggtgcagtggcagtagcatgacgagtaaaagcgcgagtgagctatttacacaatcacgctgcccacttccctgtccaattccctgtcgaacagggctgagtataaatccggtattaaatagcacgatcatcgccacagtcaaacaattataaaagaagg

SEQ ID NO: 1928 - DNA, 686 bp, Diabrotica virgifera
cacacaagacacaaaccgcgtaaacaataaatgagaaatttcttatgaacatttagcgttatacctaaacgaaattgtattgagtcaatacaaacaagcaagctcctcccaattttgtgacgtcagacttaggctgtctgaaaggaaaacgtcttttaaacgtaattttaacgtcattaatcttacgtatttaaaatcacctacaaaagacgtctatatgacgtaatgttcaaacacgtgttatattcaaccaaaaactgacgtttcctcaacgttatatgacgtcacttggttgcctgggatttggcttgtagtactgcattttaataattaattttatttactacatacaattaccttttaataacataaccttaatattactttttctttttataatttttttgggtctatggcattgacaataattgtccagtaaccaggaccaatataattaaaagtgcgaaaaatgttgccgtgctatgaaaccaggtgccgcttttccgaacttgcacggtcccaatagccttatggcatccaaaccaggacttttatttataatatttatattacataaacgaactgacgaagaaactgtagtatatgaaaataaagagctacatcgccgctgatgaaaagagcgtctccctatcctggtccgtcaaaaacgattgcgcatcactagc

SEQ ID NO: 1929 - DNA, 3710 bp, Diabrotica virgifera
  SmartBlast Evalue=6E-49; Info=Endonuclease-reverse transcriptase n=1 Tax=Bombyx mori RepID=D7F164_BOMMO
gttcaattacaagacacagtttctattctgaagctctttcgatttgactggctttggactgaatttttaacgtgagtctgcagttctttttctcattttgagcatcttggagacagaagtattagcttctttctcagcaaaactatcagcaagcttgttttcatcaagtattgctgaatatttccgaactaacatagcaaaatctcactgatagtacttctacaaaaattgataagtaagagaaacttcaaaagtttttgctcagcttgttaagagaattagaagagctcaatttctatcaatttagttttgctgctacaaacaggcgagatcttacattcttttcaaagtagggatggacccaatactcctgaattctgcaaaccctggaatcctcatagtaatcaactatatcctcctcgtcgaaaatccacacagtaaaactactgcactgctcaaataaataagcacaactgaaccagaatcagtcgcttcttaggtggagggttttcatttagatcataaactgattttaaaccgactgcagatggtagactaattttaaaatgttgtttttaaacagttaccgacctaagacttaaatgatcactttagtacctaaccgtcacaggaacatcaacggaaaagaagaagaactggtggatacatgtaaatatctgaaacataaatattattattaggattttcagagatccaaacacatgaattgaaaagacgaatatatcttggatgggcaacatatatggaaaactactaacgactaacatcaaaatggtaacggaggttgggtaccatgttccatttccataccatattcagcttcgtgtcgggcctgatgtctccatgcattttctatatcccacaccgttttcttgggtggtcgaggtgcaagaaacctcgtccttcgacgttttctcttccattttcgtctatttccatcagttgctatggtttcccctggtctagatcgtggtagaggagttgcaacccccgatgatcggggttgattaagttgaaacactaattaccggaatatatttatttaagtcaccatgtacgacagtaactagttggtgtcgggatggataatgtctctactctaaccacgtcggtttctgaataatgaataatctctttctttactttctacgtatctataaataaatcccaattgtttgttatgattgatcatacttgaatgtgaccgtgaattactaatagcagtataattgctgacttcggtgttttcaaaatgcgtggcctagattacaaaaccaatgtcacccatttacgaaatccaaacaatgcatgtaaataatatttgcttaagacttttaaaattaaatcgatatggattaactcttattttttggatgctaatataaatcctttacaccgagttcagttaatcgtgtggttggcgaatccacgacacagaaactctaaggaaagatatctacctggttatttgtgaaattaaaatgagcctaaacatctttaaaaataaattatttttaaatatcaacgattctgcactccaacctatagagagttttctatatctctagatagatgtcgctaacgtgtccgtacgtatttaatattttatttatatgcatacttcgatagcttggattcagttcgcttcaggatacaccatttaatctaaagctgcctttccttaatgttatacaccctgtcaaaggtgttactgttgtccaaaatataaaaagtatcgacatgatttgtatcacatgcacaagtaaaagcactttttagttgattaggcaaggttgctatgtttttagggttgtggtagcagaaaaaatagattagcggttactatgttaacattgatatttgttttcattgtgaaataacattttgtagaacattattttagtggaagcaagcatgatatttaatggtatgaataaaaatggagtataaactcacgagtatgttctcatgtatatgagcataaagtataagcgtgtataagtttattctctatttcatatgaataaaaatattttgatgtgatgagtttctactcacagtacataagagtagatggagtatatactccaacatttggagtataaactacattctcatttttattcatacgagccaatgtgtctagatatagattattcgaatttgtgtctaggtatacatcagtcgaattttttagattctcatattgacgtcaataataggtactttttagttttgattggtattggaattttaagtattgataaaatagtaatcatttacttatactaatgatgatatatcacctatatttggagtgccatttgacattatcggaattccattgtaatagtcatctgaaaatttgtcatgattttggtaatctcttgattctctctattcttaggtgccctttctttttctgctgaagcttataagaaagtgtcgacaattatttggttttttttttgtattgaattttaacatttaccgtggtattcgttttggatcccctttttagttatttattgcttaactagtggttttgtgatactaccaactaacactttcatgtgattcgtgtccgtagtttttaattagtgaccgatactacctttctgacttcttttctattttccaaaattctattttggttatctatttatttcgtagtttatatgtcgttttgaaaaggtcttatggtaaagaactgactacgaaaagaaagaaaaagatggaaagacaataaattacactggatcaagtgaatattttggatagaaaggctaaaaagcggttctactataagctattattattcaaatattgctgtggaccccaatattaggttcattattataagatcctagttatgtctgggaaatgatgtttgttaattccaataatttataaatcgaatagaaaattgtgaaaagtgtactcgtcaaatgtttacaattttttatgctatacttgtgtaccaatttctaccaatttctttaaaacgtaaaacatttgaccaatgtgttttgcccgtgatgacttatggtgccgaaactttgacattgacagctacaacttctaaaatgctgcaaatcgctcagaggaaaatggaaaggtcaatgctgagtatatcgcttcgtgaccgagttagaaatgaagacttaagacgaaaaacaggagttaccgatgtaatttcccgaattgccaccctgaaatggaactgggccggacacgtcgcccgaatcagtgatgggagatggacgaagagattacttgagtggaggccgagattagacaaaagaagtagaggaagaccacctactcgttggactgacgatctcaagaaaatgtcaagaaattggatgcaaagtgctcaaaatagagcacaatggacaaaaatgagggaggcctatgtccagcagtggacgcaaagggctggatgatgaagatgaatatatatgtcgagtcggaatagtttccgtaaacacgcttccttcttcatcatttcttaaaaaatgccagtgtgacggctgtttccgttgccatgtggtagccattgtggtctagtcatagcagatgtgaaaggtgttaatgtttgaagtggttttcaccctagatcagaggcctagccctgcatctaattgaaaaaaaaaatagtatgttgtatttgaacaattactcttgac

SEQ ID NO: 1930 - DNA, 1822 bp, Diabrotica virgifera
  SmartBlast Evalue=3E-10; Info=Endonuclease-reverse transcriptase n=1 Tax=Bombyx mori RepID=D7F170_BOMMO
gttcaattacaagacacagtttctattctgaagctctttcgatttgactggctttggactgaatttttaacgtgagtctgcagttctttttctcattttgagcatcttggagacagaagtattagcttctttctcagcaaaactatcagcaagcttgttttcatcaagtattgctgaatatttccgaactaacatagcaaaatctcactgatagtacttctacaaaaattgataagtaagagaaacttcaaaagtttttgctcagcttgttaagagaattagaagagctcaatttctatcaatttagttttgctgctacaaacaggcgagatcttacattcttttcaaagtagggatggacccaatactcctgaattctgcaaaccctggaatcctcatagtaatcaactatatcctcctcgtcgaaaatccacacagtaaaactactgcactgctcaaataaataagcacaactgaaccagaatcagtcgcttcttaggtggagggttttcatttagatcataaactgattttaaaccgactgcagatggtagactaattttaaaatgttgtttttaaacagttaccgacctaagacttaaatgatcactttagtacctaaccgtcacaggaacatcaacggaaaagaagaagaactggtggatacatgtaaatatctgaaacataaatattattattaggattttcagagatccaaacacatgaattgaaaagacgaatatatcttggatgggcaacatatatggaaaactactaacgactaacatcaaaatggtaacggaggttgggtaccatgttccatttccataccatattcagcttcgtgtcgggcctgatgtctccatgcattttctatatcccacaccgttttcttgggtggtcgaggtgcaagaaacctcgtccttcgacgttttctcttccattttcgtctatttccatcagttgctatggtttcccctggtctagatcgtggtagaggagttgcaacccccgatgatcggggttgattaagttgaaacactaattaccggaatatatttatttaagtcaccatgtacgacagtaactagttggtgtcgggatggataatgtctctactctaaccacgtcggtttctgaataatgaataatctctttctttactttctacgtatctataaataaatcccaattgtttgttatgattgatcatacttgaatgtgaccgtgaaatactaatagtacataattgctgactccgttgttttcaaaacgagtggcctacattgcagaagcaatgtcacccatttacgtaatgtaaacagtacatgtaaataatatttgtttgagacttttaaaaattaaatcgatatggattactcttattttttggatgctaatataaatcctgtacacctgtctggctatgttcttccattcagatctccctgtgtccttctcttcattggcttatactcatggttttcaggtcgtcttccacgtcatccgaccatctcgttctgagccttcctttttttcgccttcctatcggcttctattgtaatattttctttgctgcttttgcatcttcttctctctgggcatgtcccagccatgacagttttacaaatcttacaatatcatacccttcattcaattcattaacctcgtcgtttcaccattctccatgtgccgtcttcctcttgcaccgggccatatacttttttcggtatcgttctctagaatgtcctgagttgggcatcatctttttttgtcattgcccaggtttcacaatcattggttactacgcgtctaatcaatg

SEQ ID NO: 1931 - DNA, 1470 bp, Diabrotica virgifera
  SmartBlast Evalue=2E-10; Info=Endonuclease-reverse transcriptase n=1 Tax=Bombyx mori RepID=D7F170_BOMMO
accggttcttttggtacagaataaaactaaataaccaaatattcaatgtcaataacatcaaacaaaccaaattcttgtgttgtttgatgaagggacgaccacggacagggtgaaaaaatgtaaacactagacctctgcggaaggtttggttgatatttacattattttacctaccagatacaactactgacctacaaacctactattgtgattgtctttgaattacacgttgttgccagacttcagtttgcatatcaaactgtattttcgttttttggtcaaacggctgaatttagaaaaaaaatgttatgggagttttttgctctacattgtgccttttacctatacctctaggaacgcactattttcggggacaccttgtatagacgggtactctatgatcgaaaaatcggggaaggcctgaagggacagatatacaagagtgtggtgaggtctgcgttggtgaactgtggccggtaaagaagatttaagaaacaaatatggaggtggctgaaatgaaaatgttacggtgtgtgtagggtaagactggaagggacagggttaggaacgacttgattagagaaagagccggggtgactacagttatggcggtcctggcaggatcgccatatggtggttggggtagttacccccgatgatggggttgattaagttgaacactatttaccagacatatatttatttgccaacactagatatgccagtaacgagttggtggacaaaagtctatattctaattacattgatggttaaagaatgaatgatgaataatgaatgatctctgctttactttctccgtatctataaataaatcgtaattgttttgttatggtttcatacctgaatgtgaccatgaaatactaatagtacaaaattgctgactccgttgtttttcaaaacgagtgatctacattgcagaagcaatgtcacctactttacgaaatcaaaacaatgcatgtaaataatatttgtttgagacttttaaaaattaaatcgatatggattactcttattttttgaatgctaatataaatcctgtacacctgtctggctatgttcttccattcagatctccctgtgtccttctcttcattggcttatactcatggttttcaggtcgtcttccacgtcatccgaccatctcgttctgagccttcctttttttcgccttcctatcggcttctattgtaatattttctttgctgcttttgcatcttcttctctctgggcatgtcccagccatgacagttttacaaatcttacaatatcatacccttcattcaattcattaacctcgtcgtttcaccattctccatgtgccgtcttcctcttgcaccgggccatatacttttttcggtatcgttctctagaatgtcctgagttgggcatcatctttttttgtcattgcccaggtttcacaatcattggttactacgcgtctaatcaatg

SEQ ID NO: 1932 - DNA, 971 bp, Diabrotica virgifera
  SmartBlast Evalue=1E-10; Info=Endonuclease-reverse transcriptase n=1 Tax=Bombyx mori RepID=D7F170_BOMMO
ttcattcttgatttttctgcatctcttgatttagctccacatctcaaagctggcaaagaacagagaatacgtagcatcttaatactctagttctaatttctaatcccagtttgccattgcataatactgttatggtggttggggtagttacccccgatgatggggttgattaagttgaacactatttaccagacatatatttatttgccaacactagatatgccagtaacgagttggtggacaaaagtctatattctaattacattgatggttaaagaatgaatgatgaataatgaatgatctctgctttactttctccgtatctataaataaatcgtaattgttttgttatggtttcatacctgaatgtgaccatgaaatactaatagtacaaaattgctgactccgttgtttttcaaaacgagtgatctacattgcagaagcaatgtcacctactttacgaaatcaaaacaatgcatgtaaataatatttgtttgagacttttaaaaattaaatcgatatggattactcttattttttgaatgctaatataaatcctgtacacctgtctggctatgttcttccattcagatctccctgtgtccttctcttcattggcttatactcatggttttcaggtcgtcttccacgtcatccgaccatctcgttctgagccttcctttttttcgccttcctatcggcttctattgtaatattttctttgctgcttttgcatcttcttctctctgggcatgtcccagccatgacagttttacaaatcttacaatatcatacccttcattcaattcattaacctcgtcgtttcaccattctccatgtgccgtcttcctcttgcaccgggccatatacttttttcggtatcgttctctagaatgtcctgagttgggcatcatctttttttgtcattgcccaggtttcacaatcattggttactacgcgtctaatcaatg

SEQ ID NO: 1933 - DNA, 777 bp, Diabrotica virgifera
  SmartBlast Evalue=8E-11; Info=Endonuclease-reverse transcriptase n=1 Tax=Bombyx mori RepID=D7F170_BOMMO
agagagagagagaagagagagagagagagagtacgacagtaactagttggtgtcgggatggataatgtctctactctaaccacgtcggtttctgaataatgaataatctcttatttactttctccgtatctataaataaatcgtaattgttttgttatgattgactacacctgaatgtgaccgtgaaatactaatagtacataattgctgactccgttgttttcaaaacgagtggcctacattgcagaagcaatgtcacccatttacgtaatgtaaacagtacatgtaaataatatttgtttgagacttttaaaaattaaatcgatatggattactcttattttttggatgctaatataaatcctgtacacctgtctggctatgttcttccattcagatctccctgtgtccttctcttcattggcttatactcatggttttcaggtcgtcttccacgtcatccgaccatctcgttctgagccttcctttttttcgccttcctatcggcttctattgtaatattttctttgctgcttttgcatcttcttctctctgggcatgtcccagccatgacagttttacaaatcttacaatatcatacccttcattcaattcattaacctcgtcgtttcaccattctccatgtgccgtcttcctcttgcaccgggccatatacttttttcggtatcgttctctagaatgtcctgagttgggcatcatctttttttgtcattgcccaggtttcacaatcattggttactacgcgtctaatcaatg

SEQ ID NO: 1934 - DNA, 767 bp, Diabrotica virgifera
  SmartBlast Evalue=8E-11; Info=Endonuclease-reverse transcriptase n=1 Tax=Bombyx mori RepID=D7F170_BOMMO
tttggaacactaaatatgacagtaactagttggtgccgggatggataatatctctactctaaccacgtcggtttgtgaataatgaataatctctttctttactttctacgtatcgtgtatctataaataaattccaattgtttgttgtgatttcattcttgcatgtgaccgtgaattactaatagtacataattgcggactccgttgtttttcaaaacgagtggcctacattgcagaaacaatgtcacctaatttacgaaatcaaaacaatgcatgtaaataatatttgtttgagacttttaaaaattaaatcgatatggattactcttattttttgaatgctaatataaatcctgtacacctgtctggctatgttcttccattcagatctccctgtgtccttctcttcattggcttatactcatggttttcaggtcgtcttccacgtcatccgaccatctcgttctgagccttcctttttttcgccttcctatcggcttctattgtaatattttctttgctgcttttgcatcttcttctctctgggcatgtcccagccatgacagttttacaaatcttacaatatcatacccttcattcaattcattaacctcgtcgtttcaccattctccatgtgccgtcttcctcttgcaccgggccatatacttttttcggtatcgttctctagaatgtcctgagttgggcatcatctttttttgtcattgcccaggtttcacaatcattggttactacgcgtctaatcaatg

SEQ ID NO: 1935 - DNA, 1263 bp, Diabrotica virgifera
ccgaaacgacgccactgacagggtttaaaccggcacgaaaaattcgcaaaaaaattcaaaaagcttgtccaaaagcacaaatctcattttgtgttttttttttctaaatttcacgcctatgcaaaattcgcacccctaaaaaatccgcaaccacgccactgaccgagttaaaatcgacacgaaaaattcgcaaaaaattcaattacttaagtccaaaagcaccaatctcattttgcaattttgttgaaaatatcgccatttccccccttttttctccccatggatgcgccactgattgaaacttgatttttcgaatcagccacatcaaaccatttacaacactaaaagtttgaccaaaatcgcagccataggggcggagctatgtaattttttctgttttttttttatttttatttatttttatttttttttgacatttcctgtcaaaatattgaaaatttcgaaaatcacacatttttcgcctcgtcaacgcgcaaattttgatacctcgcccgattcgatacgtttgccataagggcgctactggggcgtgaagtcaaaaaatgaccccctttggtagccacccccacccttaacttaggggttggaaaaaaaaaagagaagctttcgtaagtatgggaactgtgaaatatttgggacgtggcgggaactttactaaaatttgaaaactgtggctacacgagggacgacactgtcatttttggccatttcatcaaaatttcccctttgggaatgttttgtgccgcccctgttcgatctagcggctccagtcaaaaaccatatttatttctaacggttagcatccaaacgcgctaaaagtatagcgcatacaaccaacccacccccacccctataaaaaacccgctccccttaaaaaaaggaaagtacgctcctgggagggataaacattccaccaaaaaatcgcaaaaaattgagaaagcttaagttcaaaacacaacattcttcttttaaatccacccgatttacgtccatctgaatttttttttcaacttttttaccctttttttcttcaacccgcaagttcgcgatttttttgtgacgcccctgttcgagctagcctccccgggctcaaaagtgacacttattcctaacccttggctttaaaacccaatgaaattttttcgccttagacaatctcaccccccactcctaagcaaaactcgtaccccttaaaaaatccgaaagcacgcccctgaccgaatccaaatccccaccaaaaat

SEQ ID NO: 1936 - DNA, 1261 bp, Diabrotica virgifera
ccgaaacgacgccactgacagggtttaaaccggcacgaaaaattcgcaaaaaaattcaaaaagcttgtccaaaagcacaaatctcattttgtgttttttttttctaaatttcacgcctatgcaaaattcgcacccctaaaaaatccgcaaccacgccactgaccgagttaaaatcgacacgaaaaattcgcaaaaaattcaattacttaagtccaaaagcaccaatctcattttgcaattttgttgaaaatatcgccatttccccccttttttctccccatggatgcgccactgattgaaacttgatttttcgaatcagccacatcaaaccatttacaacactaaaagtttgaccaaaatcgcagccataggggcggagctatgtaattttttctgttttttttttatttttatttatttttatttttttttgacatttctcatcaaaaattgaaaatttcaaaaaactcttattttcgtctcgtcgatgcgcaaattttgatacctcgcccgattcgatacgtttgccataagggcgctactggggcgtgaagtcaaaaaatgaccccctttggtagccacccccacccttaacttaggggttggaaaaaaaaaagagaagctttcgtaagtatgggaactgtgaaatatttgggacgtggcgggaactttactaaaatttgaaaactgtggctacacgagggacgacactgtcatttttggccatttcatcaaaatttcccctttgggaatgttttgtgccgcccctgttcgatctagcggctccagtcaaaaaccatatttatttctaacggttagcatccaaacgcgctaaaagtatagcgcatacaaccaacccacccccacccctataaaaaacccgctccccttaaaaaaaggaaagtacgctcctgggagggataaacattccaccaaaaaatcgcaaaaaattgagaaagcttaagttcaaaacacaacattcttcttttaaatccacccgatttacgtccatctgaatttttttttcaacttttttaccctttttttcttcaacccgcaagttcgcgatttttttgtgacgcccctgttcgagctagcctccccgggctcaaaagtgacacttattcctaacccttggctttaaaacccaatgaaattttttcgccttagacaatctcaccccccactcctaagcaaaactcgtaccccttaaaaaatccgaaagcacgcccctgaccgaatccaaatccccaccaaaaat

SEQ ID NO: 1937 - DNA, 839 bp, Diabrotica virgifera
ccgaaacgacgccactgacagggtttaaaccggcacgaaaaattcgcaaaaaaattcaaaaagcttgtccaaaagcacaaatctcattttgtgttttttttttctaaatttcacgcctatgcaaaattcgcacccctaaaaaatccgcaaccacgccactgaccgagttaaaatcgacacgaaaaattcgcaaaaaattcaattacttaagtccaaaagcaccaatctcattttgcaattttgttgaaaatatcgccatttccccccttttttctccccatggatgcgccactgattgaaacttgatttttcgaatcagccacatcaaaccatttacaacactaaaagtttgaccaaaatcgcagccataggggcggagctatgtaattttttctgttttttttttatttttatttatttttatttttttttgacatttcctgtcaaaatattgaaaatttcgaaaatcacacatttttcgcctcgtcaacgcgcaaattttgatacctcgcccgattcgatacgtttgccataagggcgctactggggcgtgaagtcaaaaaatgaccccctttggtagccacccccacccttaccgtaggggtgggaacatcattcgcagttgcctggtacgtaagaactgtggaatattttggacatttcgaaaattttgcaaacacttaaaaactccgggtacttcgagggatgagtttgtcatttttggccatttcatcaaaatttcccctttgcgaattttttgtgccgcccctgttcgatctagcggttccagtcgaaaatcacatttattcctaacgcttagcgtcaaacgcactaaaatt

SEQ ID NO: 1938 - DNA, 837 bp, Diabrotica virgifera
ccgaaacgacgccactgacagggtttaaaccggcacgaaaaattcgcaaaaaaattcaaaaagcttgtccaaaagcacaaatctcattttgtgttttttttttctaaatttcacgcctatgcaaaattcgcacccctaaaaaatccgcaaccacgccactgaccgagttaaaatcgacacgaaaaattcgcaaaaaattcaattacttaagtccaaaagcaccaatctcattttgcaattttgttgaaaatatcgccatttccccccttttttctccccatggatgcgccactgattgaaacttgatttttcgaatcagccacatcaaaccatttacaacactaaaagtttgaccaaaatcgcagccataggggcggagctatgtaattttttctgttttttttttatttttatttatttttatttttttttgacatttctcatcaaaaattgaaaatttcaaaaaactcttattttcgtctcgtcgatgcgcaaattttgatacctcgcccgattcgatacgtttgccataagggcgctactggggcgtgaagtcaaaaaatgaccccctttggtagccacccccacccttaccgtaggggtgggaacatcattcgcagttgcctggtacgtaagaactgtggaatattttggacatttcgaaaattttgcaaacacttaaaaactccgggtacttcgagggatgagtttgtcatttttggccatttcatcaaaatttcccctttgcgaattttttgtgccgcccctgttcgatctagcggttccagtcgaaaatcacatttattcctaacgcttagcgtcaaacgcactaaaatt

SEQ ID NO: 1939 - DNA, 842 bp, Diabrotica virgifera
ccgaaacgacgccactgacagggtttaaaccggcacgaaaaattcgcaaaaaaattcaaaaagcttgtccaaaagcacaaatctcattttgtgttttttttttctaaatttcacgcctatgcaaaattcgcacccctaaaaaatccgcaaccacgccactgaccgagttaaaatcgacacgaaaaattcgcaaaaaattcaattacttaagtccaaaagcaccaatctcattttgcaattttgttgaaaatatcgccatttccccccttttttctccccatggatgcgccactgattgaaacttgatttttcgtatccgctacgtcaaaacatttacaacggtaaaaatttgaccgaaatcgaagccgtagaggcggagctatatcattttttctgttttttttttattttttttatttttaattttttttttgacatttcccaccaaaaattgaaaattttataaaacgtatatttttcgtctcgtcgatgcgcaaattttgatgtatcgtgcgattcgatacgtttcgccgtaatggcgctacagggacgtgaagtcaaaaagttgaccccattttggtagccacccccacccttaccgtaggggtgggaaaaaaaagagaagttttcgtaagtatgggaactgtgaaatatttgggctatggtggaaatcttacaaaagtttgaaaactctgggcacacgagggacgacatcgtgatttttggccatttcatcaaaatttcccctttgcgaattttttgtgccgcccctgttcgatctagcggttccagtcgaaaatcacatttattcctaacgcttagcgtcaaaacgcactaaaatt

SEQ ID NO: 1940 - DNA, 327 bp, Diabrotica virgifera
caaaaattgcaaaaaatttagaaagcttaagttcaaacacacaaactccccggtcaaaaacacccgatttacgtccatctgaataatttttttcaaatttttaccctttttttcttcaacccgcaagttcgcgatttttttgtgacgcccctgttcgagctagcctccccgggctcaaaagtgacacttattcctaacccttggctttaaaacccaatgaaattttttcgccttagacaatctcaccccccactcctaagcaaaactcgtaccccttaaaaaatccgaaagcacgcccctgaccgaatccaaatccccaccaaaaat

SEQ ID NO: 1941 - DNA, 3064 bp, Diabrotica virgifera
  SmartBlast Evalue=1E-164; Info="Protein Mo25, putative n=5 Tax= Neoptera RepID=E0VEQ6_PEDHC"
cccaagaaggatcactcaaagtgaaaacgaaaaacattaaaaataaaattttgtgaagttttcgcccgtaaattctccaattttagtgtaaaacaattatattttcgtcagatgtgtctttcactagtttctttagttaaacaacgcgtttttgtgatgaacgaggtatcataatcgcaataatcgtttcaaaattttatagatgagattatcaatctaagtattctgtttcgtcggtagtttcgtaaatatttgattgattttgctgaagagatcggcgttttttgtcaggttattaagtttgaaacgatgcccctatttggtaaatctacaaaaggcccagcagatgttgtgaaggctctcaaggaagcagtcaattcactggaaaaaggtgacaaaaaagcggaaaaggcccaggaagatgtatccaagaacctcgtcctgatcaagaacatgctgtacggcacctcagatgcggagccccaggcggatattatcgtagcgcaactagctcaagagctctacaatagcaatttgttgttacttctgattcaaaatctgaaccggatcgacttcgagggcaagaaagatgtggcccaggtgtttaataatatactaagaagacagatcggaacgagatcgccgactgtagaatatatttgtactaaacctgaggttttgtttaccttaatgactgggtatgagcatcaagaaatagctttaaactgtggtactatgttacgtgagtgtgctaggtacgaagctctggcaaaaataatgttatactcagatgatttttataacttttttcgatacgtggaggtttctacttttgatatagcttcagatgcgttttctacatttaaggaattgctaaccagacacaaaatcctatgcgccgatttcttagaaatgaactacgacaaagtatttaatcactatcagagacttctcaattctgagaactacgtcactcggcgtcaaagtctgaagcttctcggggaattgttactggatagacataatttcacagttatgaccaggtatatatcgaaccccgacaacttgaaattaatgatgaatatgcttaaggagaggtctagaaatattcaatttgaagctttccacgtattcaaggtattcgttgccaatccaaataaacctaaaccaattttagacattttattacggaatcaagaaaaactcgtagaatttctgatgcggttccacacggatcgagcagaagacgagcagttcaacgacgaaaaggcgtatctaataaggcaaatcaaggagctgaaaccgataccgggccattaaagatactgatactgatactgtactttgtcaatattatttttacttgctacccattttaatttgcaaaagtcaactagatgtaattgaactaagcaatttatacccacacgattgttgctattacgattttaattcatttatcaatcaaaaactttgtctagccctctttcaatgaaactttaactgttcgataagtaattatagccgatctgcggaaattcaagagaataatacacaaaatggcgcgtgttatgtttaaaagaattgtattacagtataattatcacatatacatgtttttctgcgcagaaagtatttcaacgtacaataaaattgtatctctgacttctaatgtcatggaggtctgtttcttcctcctccccgatccttaatcccttatagagatgtggagacaccatttctctgttctggagtagttgttcctagtcttgaattcctcagttgatcagtgtttttgtttgatccacccaacgacttagagatcttaccctcggtctttttccttcaactgtttaagagatctcagctatgtaaagttatttatatatataatggatttctacggctgtcgccgcctctccatacccagcttccaattttttctatcgtaacacatatcttcatctcgaatccattgcgtcctgaatattgtccctccagcttctccgtggtcgtccctttcttcttctctccggtgggacccactctaatatttttctcggccagcgagtctcattcattcttttaacgtgccgaaccatgtcagctgtctcttttcaatatcgtctattatagttttttccaccttcatacgttctctaattgtttcatttcttacatgttctaatctcgaaacctgacaacttctcctcaaaaagtccatttctgtactaagtagcttcttgttatttcttgcacttatgtcccaaacttctgcacgtagattgtagcgctcttcattatactttcatatattcttcttctttgtttccttcctgatatatttgtcccataaaattgaattgagggatctagtgatgcttctacctttattgatcctgtgttgtatttcatcttcactatttcctcgtttgttaaatatagctcccaaatatttgcattgtttcacaccaacaatatgtccttgttccaatggtaggtttcaatgtcttcgttttcaatgtctttcattgacttccatagttctattatggggacactatcataggccttttctaggtcgataagagcgaagtgggtttcctgatttctctgtattcttttttctagtgctatttttaaattgaagagattgtctacctttgaacgtcccgcacgaaaaccagcttgttcttcagcttgctttccttgaatttattgttctatttcatttcttaatatcctggagtataaccttccaaatactcctgctaactcctctgctccaaatcttaactacatgaataaactcctctccagacacaaggatatctcaactaatcgacttggtccagtataaaactatacatctgtttattacttacagcatgtcagttatttcttctgtctgctaccacagttggaactccttccaccaaacacaaatacaaatttttacaacatatacttttttcaagacttagctaattagcaacgtcgtctcagcagaaactgtcgtgttctcgcgcggtattcaattcacaatgccgtctcctctcctggc

SEQ ID NO: 1942 - DNA, 2645 bp, Diabrotica virgifera
  SmartBlast Evalue=1E-28; Info="Barrier-to-autointegration factor, putative n=2 Tax=Culicidae RepID=Q1HRI3_AEDAE"
ctaaaacgttgtagtgatatataacatcttctgcagaaaacttaagattgttgtaccctaataataacaaaatgtcgggacctacccaagtacatgaaaactttgttagcgagcctatgggtttgaaacctgtaacaaaattagcaggaattggagaaacacttggtaaacgcttggtagccgctggatttgagaaagcttacgctgtattaggacagttcctatttctgaaaaaggatgaagaacattttagggactggctgaaaagcacttgtttagctaattccaaagattcatcggcttgttgggaatgcctcaatgagtggtgttccaaatttttattcgatactaataatacaaaaattccgaggacttctgacaaacccaccgacaaacatgaaaactttgttatagagcctttgggtgaaaaacttgtaacagaattaccagggattgggaaagtccatggtaaacgcttggtagatgccggatttgacaaagcttatgttgtattaggcaaattcctacttttgaaaaaggatcgaggcctttttaggaaatggttggaagaaacttgctcagtcagttccaaaggatcattggattgttggaattacctctataattattgtacaaattttgtgtaattgtacatgacagaccgaagtgtattgtttgtattcccaattagtttaattgtattcccaattttgtattcccaatatcttttgtatagacttttatttttgtaatattaatatttgtaagttcaaattttataactgtatattgtatattataaagggtgtcccaaaagtagaggaacggtcgaatatttcgcgaactgtacatgaaatcgaaaaactgaaaaatacgtgttcaataattttcaaaaatctatcgaatgacaccaaacacgatcccccactccaacccctggatgtggggagggataacattaaaaccttaaatggaaaccctcagttttattacagatttggattccttacgtaaaagtaagcaacttttattcaagacatttttttgaattgtagatagatggcgctataatcggaaaaaaccatttatcgtgatatatatatataatggatttctacggctgtcgccgcctctccatacccagcttccaattttttctatcgtaacacgtatcttcatctaattgcctcgaatccattgcgtcctgaatattgtccctccagcttctccgtggtcgtccctttcttcttctctccggtgggacccactctaatatttttctcggccagcgagtctcattcattcttttaacgtgccgaaccatgtcagctgtctcttttcaatatcgtccattatagttttttccaccttcatacgttctctaattgtttcatttcttacatgttctaatctcgaaacctgacaacttctcctcaaaaagtccatttctgtactaagtagcttcttgttatttcttgcacttatgtcccaaacttctgcacgtagattgtagcgctcttcattatactttcatatattcttcttctttgtttccttcctgatatatttgtcccataaaattgaattgagggatctagtgatgcttctacctttattgatcctgtgttgtatttcatcttcactatttcctcgtttgttaaatatagctcccaaatatttgcattgtttcacaccaacaatatgtccttgttccaatggtaggtttcaatgtcttcgtttcccactatgaagtattctgatttgcccatatttattactaatcctgcctgttggtaatgttcatttagcttccgtatcatatagcttaagtcatcttgatcttgggctataacaacttggtcgtccgcaaagtataatgtaaatagggagtcgtctcccactttcagtcccatcggttttactgcttttgtccacctctgtaaggattggtgaaggtatattttaaagagagtgggagatagacaacatccttgtcggatgccttttaaagtattaaatgcctcagtttgccgtttttgattctggtgttagtggtctcatataacattttagttgcttgtatgagttttccatcgataccgatgtctttaattgacttccatagttctattatggggacactatcataggccttttctaggtcgataagagcgaagtgggtttcctgatttctctgtattcttttttctagtgctatttttaaattgaagagattgtctacctttgaacgtcccgcacgaaaaccagcttgttcttcagcttgctttccttgaatttattgttctatttcatttcttaatatcctggagtataaccttccaaatactcctgctaactcctctgctccaaatcttaactacatgaataaactcctctccagacacaaggatatctcaactaatcgacttggtccagtataaaactatacatctgtttattacttacagcatgtcagttatttcttctgtctgctaccacagttggaactccttccaccaaacacaaatacaaatttttacaacatatacttttttcaagacttagctaattagcaacgtcgtctcagcagaaactgtcgtgttctcgcgcggtattcaattcacaatgccgtctcctctcctggc

SEQ ID NO: 1943 - DNA, 2286 bp, Diabrotica virgifera
  SmartBlast Evalue=1E-28; Info="Barrier-to-autointegration factor, putative n=2 Tax=Culicidae RepID=Q1HRI3_AEDAE"
ctaaaacgttgtagtgatatataacatcttctgcagaaaacttaagattgttgtaccctaataataacaaaatgtcgggacctacccaagtacatgaaaactttgttagcgagcctatgggtttgaaacctgtaacaaaattagcaggaattggagaaacacttggtaaacgcttggtagccgctggatttgagaaagcttacgctgtattaggacagttcctatttctgaaaaaggatgaagaacattttagggactggctgaaaagcacttgtttagctaattccaaagattcatcggcttgttgggaatgcctcaatgagtggtgttccaaatttttattcgatactaataatacaaaaattccgaggacttctgacaaacccaccgacaaacatgaaaactttgttatagagcctttgggtgaaaaacttgtaacagaattaccagggattgggaaagtccatggtaaacgcttggtagatgccggatttgacaaagcttatgttgtattaggcaaattcctacttttgaaaaaggatcgaggcctttttaggaaatggttggaagaaacttgctcagtcagttccaaaggatcattggattgttggaattacctctataattattgtacaaattttgtgtaattgtacatgacagaccgaagtgtattgtttgtattcccaattagtttaattgtattcccaattttgtattcccaatatcttttgtatagacttttatttttgtaatattaatatttgtaagttcaaattttataactgtatattgtatattataaagggtgtcccaaaagtagaggaacggtcgaatatttcgcgaactgtacatgaaatcgaaaaactgaaaaatacgtgttcaataattttcaaaaatctatcgaatgacaccaaacacgatcccccactccaacccctggatgtggggagggataacattaaaaccttaaatggaaaccctcagttttattacagatttggattccttacgtaaaagtaagcaacttttattcaagacatttttttgaattgtagatagatggcgctataatcggaaaaaaccatttatcgtgatatatatatataatggatttctacggctgtcgccgcctctccatacccagcttccaattttttctatcgtaacacgtatcttcatctaattgcctcgaatccattgcgtcctgaatattgtccctccagcttctccgtggtcgtccctttcttcttctctccggtgggacccactctaatatttttctcggccagcgagtctcattcattcttttaacgtgccgaaccatgtcagctgtctcttttcaatatcgtccattatagttttttccaccttcatacgttctctaattgtttcatttcttacatgttctaatctcgaaacctgacaacttctcctcaaaaagtccatttctgtactaagtagcttcttgttatttcttgcacttatgtcccaaacttctgcacgtagattgtagcgctcttcattatactttcatatattcttcttctttgtttccttcctgatatatttgtcccataaaattgaattgagggatctagtgatgcttctacctttattgatcctgtgttgtatttcatcttcactatttcctcgtttgttaaatatagctcccaaatatttgcattgtttcacaccaacaatatgtccttgttccaatggtaggtttcaatgtcttcgttttcaatgtctttcattgacttccatagttctattatggggacactatcataggccttttctaggtcgataagagcgaagtgggtttcctgatttctctgtattcttttttctagtgctatttttaaattgaagagattgtctacctttgaacgtcccgcacgaaaaccagcttgttcttcagcttgctttccttgaatttattgttctatttcatttcttaatatcctggagtataaccttccaaatactcctgctaactcctctgctccaaatcttaactacatgaataaactcctctccagacacaaggatatctcaactaatcgacttggtccagtataaaactatacatctgtttattacttacagcatgtcagttatttcttctgtctgctaccacagttggaactccttccaccaaacacaaatacaaatttttacaacatatacttttttcaagacttagctaattagcaacgtcgtctcagcagaaactgtcgtgttctcgcgcggtattcaattcacaatgccgtctcctctcctggc

SEQ ID NO: 1944 - DNA, 5016 bp, Diabrotica virgifera
  SmartBlast Evalue=1E-164; Info="Protein Mo25, putative n=5 Tax= Neoptera RepID=E0VEQ6_PEDHC"
cccaagaaggatcactcaaagtgaaaacgaaaaacattaaaaataaaattttgtgaagttttcgcccgtaaattctccaattttagtgtaaaacaattatattttcgtcagatgtgtctttcactagtttctttagttaaacaacgcgtttttgtgatgaacgaggtatcataatcgcaataatcgtttcaaaattttatagatgagattatcaatctaagtattctgtttcgtcggtagtttcgtaaatatttgattgattttgctgaagagatcggcgttttttgtcaggttattaagtttgaaacgatgcccctatttggtaaatctacaaaaggcccagcagatgttgtgaaggctctcaaggaagcagtcaattcactggaaaaaggtgacaaaaaagcggaaaaggcccaggaagatgtatccaagaacctcgtcctgatcaagaacatgctgtacggcacctcagatgcggagccccaggcggatattatcgtagcgcaactagctcaagagctctacaatagcaatttgttgttacttctgattcaaaatctgaaccggatcgacttcgagggcaagaaagatgtggcccaggtgtttaataatatactaagaagacagatcggaacgagatcgccgactgtagaatatatttgtactaaacctgaggttttgtttaccttaatgactgggtatgagcatcaagaaatagctttaaactgtggtactatgttacgtgagtgtgctaggtacgaagctctggcaaaaataatgttatactcagatgatttttataacttttttcgatacgtggaggtttctacttttgatatagcttcagatgcgttttctacatttaaggaattgctaaccagacacaaaatcctatgcgccgatttcttagaaatgaactacgacaaagtatttaatcactatcagagacttctcaattctgagaactacgtcactcggcgtcaaagtctgaagcttctcggggaattgttactggatagacataatttcacagttatgaccaggtatatatcgaaccccgacaacttgaaattaatgatgaatatgcttaaggagaggtctagaaatattcaatttgaagctttccacgtattcaaggtattcgttgccaatccaaataaacctaaaccaattttagacattttattacggaatcaagaaaaactcgtagaatttctgatgcggttccacacggatcgagcagaagacgagcagttcaacgacgaaaaggcgtatctaataaggcaaatcaaggagctgaaaccgataccgggccattaaagatactgatactgatactgtactttgtcaatattatttttacttgctacccattttaatttgcaaaagtcaactagatgtaattgaactaagcaatttatacccacacgattgttgctattacgattttaattcatttatcaatcaaaaactttgtctagccctctttcaatgaaactttaactgttcgataagtaattatagccgatctgcggaaattcaagagaataatacacaaaatggcgcgtgttatgtttaaaagaattgtattacagtataattatcacatatacatgtttttctgcgcagaaagtatttcaacgtacaataaaattgtatctctgacttctaatgtcatggaggtctgtttcttcctcctccccgatccttaatcccttatagagatgtggagacaccatttctctgttctggagtagttgttcctagtcttgaattcctcagttgatcagtgtttttgtttgatccacccaacgacttagagatcttaccctcggtctttttccttcaactgtttaagagatctcagctatgtaaagttatttatatatataatggatttctacggctgtcgccgcctctccatacccagcttccaattttttctatcgtaacacatatcttcatctcgaatccattgcgtcctgaatattgtccctccagcttctccgtggtcgtccctttcttcttctctccggtgggacccactctaatatttttctcggccagcgagtctcattcattcttttaacgtgccgaaccatgtcagctgtctcttttcaatatcgtctattatagttttttccaccttcatacgttctctaattgtttcatttcttacatgttctaatctcgaaacctgacaacttctcctcaaaaagtccatttctgtactaagtagcttcttgttatttcttgcacttatgtcccaaacttctgcacgtagattgtagcgctcttcattatactttcatatattcttcttctttgtttccttcctgatatatttgtcccataaaattgaattgagggatctagtgatgcttctacctttattgatcctgtgttgtatttcatcttcactatttcctcgtttgttaaatatagctcccaaatatttgcattgtttcacaccaacaatatgtccttgttccaatggtaggtttcaatgtcttcgtttcccactatgaagtattctgatttgcccatatttattactaatcctgcctgttggtaatgttcatttagcttccgtatcatatagcttaagtcatcttgatcttgggctataacaacttggtcgtccgcaaagtataatgtaaatagggagtcgtctcccactttcagtcccatcggttttactgcttttgtccacctctgtaaggattggtgaaggtatattttaaagagagtgggagatagacaacatccttgtcggatgccttttaaagtattaaatgcctcagtttgccgtttttgattctggtgttagtggtctcatataacattttagttgcttgtatgagttttccatcgataccgatgtctttaattgacttccatagttctattatggggacactatcataggccttttctaggtcgataagagcgaagtgggtttcctgatttctctgtattcttttttctagtgctatttttaaattgaagagattgtctacctttgaacgtcccgcacgaaaaccagcttgttcttcagcttgctttccttgaatttattgttctatttcatttcttaatatcctggagtataaccttccaaatactcctgctaactcctctgctccaaatcttaactacatgaataaactcctctccagacacaaggatatctcaactaatcgacttggtccagtataaaactatacatctgtttattacttacagcatgtcagttatttcttctgtctggtaccagatttggaactctttccaccaaacacaaatacaacttttcacaacatatactttttttaaaacttggctaattagcaccgtcatttcagcagaaactgtagtgtactcgcccggtattcaattcacaatgccctctcctctcctggcaaaactccattaaaatcattaaatctcccacttcgtttttagtgaaccaatcaggacgtatctctatccaaacaaattttactgtcttctcaataaaaccaactttctactatccaataatccgtaagtcattcttagtaaacacatactaaacattttcaatttctacggaaaaaaggataattaccgatccccgatgattattcactaaacctactctttgtctaaatcttttcattgtttcgtggtataccgtacaatagaaagttcaacatcaaatacttacaaatgtccatctaactaaacgttagaaaaaccaatatattgtcttcttattttctgggaatgcctttaaccgaataagattcactaattccgaaaaacactttctacatctaatgcttaatagtataatatagaggcaacatctcattcaacatctaatgctgcgatttctgttggtcggtgatttgatttttgtcttaatattttctgtttgaattttgaaaaaatatggaaccttattaatacattcctagtaaaaaatcgatttttaacgagctatattgcttaagtgttccatcttcttcttcagatgaaaatccactaacggatgttagcgatcacattttccattaactctgtttcttgcaatgtgtatcagagattgtatgttgttaatctctgtccattgccttatgtttcggagccaggacattttcttgcgtcctattcctctcttgccttcaattttaccctcgattataagtaaggaactggtgtttttcgtttcgcatgatgtgacccagatactccattttccttttcttgataatttcaaaaagttgacgttctttgttgattctcttaaggacatctgcatttgtgactttcatttgtgactttcgccgtccatggtatctttaggatacggcgataaagccacatttcgaaggcttctaatctgtttatatccctcgttttgagtgtccagccctctacgccatatagtagcaccaaccacacgtagcacttagtaaaccttagtctcagttgaagatcgaactctgaacaggtcagtaccttcctgaatttgacgaaagcttgtcgtgcttactcaatgcgacattttactttcctgtccgatgcccagtcttcaaaaattcacgttaagtgttcctataaaatatgaattataaggtactaccgtttcgcagaaacggaatttgttatcgttaaatataaggattttggattattatgtgacataatatctcttcttgatacatttctagttaaagtagatctttatctctccatacttaatgaactcttctctatattgatacatgttggatgcacccccatttcgaacgcctcaatctgtttattggtagttttatctgcgtttgaactgtgtattgtgaagtaatactgatcacgctatcgtttaaagcatacattagcaaaaagtaaagtataacgtgtaataaatcgtgtgggagaacattgtttttacgagatgccaatttataactatattttacatacaccgttttggtatgaatagaaacagaacgttagaaaggcagc

SEQ ID NO: 1945 - DNA, 4995 bp, Diabrotica virgifera
  SmartBlast Evalue=1E-164; Info="Protein Mo25, putative n=5 Tax= Neoptera RepID=E0VEQ6_PEDHC"
cccaagaaggatcactcaaagtgaaaacgaaaaacattaaaaataaaattttgtgaagttttcgcccgtaaattctccaattttagtgtaaaacaattatattttcgtcagatgtgtctttcactagtttctttagttaaacaacgcgtttttgtgatgaacgaggtatcataatcgcaataatcgtttcaaaattttatagatgagattatcaatctaagtattctgtttcgtcggtagtttcgtaaatatttgattgattttgctgaagagatcggcgttttttgtcaggttattaagtttgaaacgatgcccctatttggtaaatctacaaaaggcccagcagatgttgtgaaggctctcaaggaagcagtcaattcactggaaaaaggtgacaaaaaagcggaaaaggcccaggaagatgtatccaagaacctcgtcctgatcaagaacatgctgtacggcacctcagatgcggagccccaggcggatattatcgtagcgcaactagctcaagagctctacaatagcaatttgttgttacttctgattcaaaatctgaaccggatcgacttcgagggcaagaaagatgtggcccaggtgtttaataatatactaagaagacagatcggaacgagatcgccgactgtagaatatatttgtactaaacctgaggttttgtttaccttaatgactgggtatgagcatcaagaaatagctttaaactgtggtactatgttacgtgagtgtgctaggtacgaagctctggcaaaaataatgttatactcagatgatttttataacttttttcgatacgtggaggtttctacttttgatatagcttcagatgcgttttctacatttaaggaattgctaaccagacacaaaatcctatgcgccgatttcttagaaatgaactacgacaaagtatttaatcactatcagagacttctcaattctgagaactacgtcactcggcgtcaaagtctgaagcttctcggggaattgttactggatagacataatttcacagttatgaccaggtatatatcgaaccccgacaacttgaaattaatgatgaatatgcttaaggagaggtctagaaatattcaatttgaagctttccacgtattcaaggtattcgttgccaatccaaataaacctaaaccaattttagacattttattacggaatcaagaaaaactcgtagaatttctgatgcggttccacacggatcgagcagaagacgagcagttcaacgacgaaaaggcgtatctaataaggcaaatcaaggagctgaaaccgataccgggccattaaagatactgatactgatactgtactttgtcaatattatttttacttgctacccattttaatttgcaaaagtcaactagatgtaattgaactaagcaatttatacccacacgattgttgctattacgattttaattcatttatcaatcaaaaactttgtctagccctctttcaatgaaactttaactgttcgataagtaattatagccgatctgcggaaattcaagagaataatacacaaaatggcgcgtgttatgtttaaaagaattgtattacagtataattatcacatatacatgtttttctgcgcagaaagtatttcaacgtacaataaaattgtatctctgacttctaatgtcatggaggtctgtttcttcctcctccccgatccttaatcccttatagagatgtggagacaccatttctctgttctggagtagttgttcctagtcttgaattcctcagttgatcagtgtttttgtttgatccacccaacgacttagagatcttaccctcggtctttttccttcaactgtttaagagatctcagctatgtaaagttatttatatatataatggatttctacggctgtcgccgcctctccatacccagcttccaattttttctatcgtaacacatatcttcatctcgaatccattgcgtcctgaatattgtccctccagcttctccgtggtcgtccctttcttcttctctccggtgggacccactctaatatttttctcggccagcgagtctcattcattcttttaacgtgccgaaccatgtcagctgtctcttttcaatatcgtctattatagttttttccaccttcatacgttctctaattgtttcatttcttacatgttctaatctcgaaacctgacaacttctcctcaaaaagtccatttctgtactaagtagcttcttgttatttcttgcacttatgtcccaaacttctgcacgtagattgtagcgctcttcattatactttcatatattcttcttctttgtttccttcctgatatatttgtcccataaaattgaattgagggatctagtgatgcttctacctttattgatcctgtgttgtatttcatcttcactatttcctcgtttgttaaatatagctcccaaatatttgcattgtttcacaccaacaatatgtccttgttccaatggtaggtttcaatgtcttcgtttcccactatgaagtattctgatttgcccatatttattactaatcctgcctgttggtaatgttcatttagcttccgtatcatatagcttaagtcatcttgatcttgggctataacaacttggtcgtccgcaaagtataatgtaaatagggagtcgtctcccactttcagtcccatcggttttactgcttttgtccacctctgtaaggattggtgaaggtatattttaaagagagtgggagatagacaacatccttgtcggatgccttttaaagtattaaatgcctcagtttgccgtttttgattctggtgttagtggtctcatataacattttagttgcttgtatgagttttccatcgataccgatgtctttaattgacttccatagttctattatggggacactatcataggccttttctaggtcgataagagcgaagtgggtttcctgatttctctgtattcttttttctagtgctatttttaaattgaagagattgtctacctttgaacgtcccgcacgaaaaccagcttgttcttcagcttgctttccttgaatttattgttctatttcatttcttaatatcctggagtataaccttccaaatactcctgctaactcctctgctccaaatcttaactacatgaataaactcctctccagacacaaggatatctcaactaatcgacttggtccagtataaaactatacatctgtttattacttacagcatgtcagttatttcttctgtctggtaccagatttggaactctttccaccaaacacaaatacaacttttcacaacatatactttttttaaaacttggctaattagcaccgtcatttcagcagaaactgtagtgtactcgcccggtattcaattcacaatgccctctcctctcctggcaaaactccattaaaatcattaaatctcccacttcgtttttagtgaaccaatcaggacgtatctctatccaaacaaattttactgtcttctcaataaaaccaactttctactatccaataatccgtaagtcattcttagtaaacacatactaaacattttcaatttctacggaaaaaaggataattaccgatccccgatgattattcactaaacctactctttgtctaaatcttttcattgtttcgtggtataccgtacaatagaaagttcaacatcaaatacttacaaatgtccatctaactaaacgttagaaaaaccaatatattgtcttcttattttctgggaatgcctttaaccgaataagattcactaattccgaaaaacactttctacatctaatgcttaatagtataatatagagggtgctgcgatttctgttggtcggtgatttgatttttgtcttaatattttctgtttgaattttgaaaaaatatggaaccttattaatacattcctagtaaaaaatcgatttttaacgagctatattgcttaagtgttccatcttcttcttcagatgaaaatccactaacggatgttagcgatcacattttccattaactctgtttcttgcaatgtgtatcagagattgtatgttgttaatctctgtccattgccttatgtttcggagccaggacattttcttgcgtcctattcctctcttgccttcaattttaccctcgattataagtaaggaactggtgtttttcgtttcgcatgatgtgacccagatactccattttccttttcttgataatttcaaaaagttgacgttctttgttgattctcttaaggacatctgcatttgtgactttcatttgtgactttcgccgtccatggtatctttaggatacggcgataaagccacatttcgaaggcttctaatctgtttatatccctcgttttgagtgtccagccctctacgccatatagtagcaccaaccacacgtagcacttagtaaaccttagtctcagttgaagatcgaactctgaacaggtcagtaccttcctgaatttgacgaaagcttgtcgtgcttactcaatgcgacattttactttcctgtccgatgcccagtcttcaaaaattcacgttaagtgttcctataaaatatgaattataaggtactaccgtttcgcagaaacggaatttgttatcgttaaatataaggattttggattattatgtgacataatatctcttcttgatacatttctagttaaagtagatctttatctctccatacttaatgaactcttctctatattgatacatgttggatgcacccccatttcgaacgcctcaatctgtttattggtagttttatctgcgtttgaactgtgtattgtgaagtaatactgatcacgctatcgtttaaagcatacattagcaaaaagtaaagtataacgtgtaataaatcgtgtgggagaacattgtttttacgagatgccaatttataactatattttacatacaccgttttggtatgaatagaaacagaacgttagaaaggcagc

SEQ ID NO: 1946 - DNA, 4657 bp, Diabrotica virgifera
  SmartBlast Evalue=1E-164; Info="Protein Mo25, putative n=5 Tax= Neoptera RepID=E0VEQ6_PEDHC"
cccaagaaggatcactcaaagtgaaaacgaaaaacattaaaaataaaattttgtgaagttttcgcccgtaaattctccaattttagtgtaaaacaattatattttcgtcagatgtgtctttcactagtttctttagttaaacaacgcgtttttgtgatgaacgaggtatcataatcgcaataatcgtttcaaaattttatagatgagattatcaatctaagtattctgtttcgtcggtagtttcgtaaatatttgattgattttgctgaagagatcggcgttttttgtcaggttattaagtttgaaacgatgcccctatttggtaaatctacaaaaggcccagcagatgttgtgaaggctctcaaggaagcagtcaattcactggaaaaaggtgacaaaaaagcggaaaaggcccaggaagatgtatccaagaacctcgtcctgatcaagaacatgctgtacggcacctcagatgcggagccccaggcggatattatcgtagcgcaactagctcaagagctctacaatagcaatttgttgttacttctgattcaaaatctgaaccggatcgacttcgagggcaagaaagatgtggcccaggtgtttaataatatactaagaagacagatcggaacgagatcgccgactgtagaatatatttgtactaaacctgaggttttgtttaccttaatgactgggtatgagcatcaagaaatagctttaaactgtggtactatgttacgtgagtgtgctaggtacgaagctctggcaaaaataatgttatactcagatgatttttataacttttttcgatacgtggaggtttctacttttgatatagcttcagatgcgttttctacatttaaggaattgctaaccagacacaaaatcctatgcgccgatttcttagaaatgaactacgacaaagtatttaatcactatcagagacttctcaattctgagaactacgtcactcggcgtcaaagtctgaagcttctcggggaattgttactggatagacataatttcacagttatgaccaggtatatatcgaaccccgacaacttgaaattaatgatgaatatgcttaaggagaggtctagaaatattcaatttgaagctttccacgtattcaaggtattcgttgccaatccaaataaacctaaaccaattttagacattttattacggaatcaagaaaaactcgtagaatttctgatgcggttccacacggatcgagcagaagacgagcagttcaacgacgaaaaggcgtatctaataaggcaaatcaaggagctgaaaccgataccgggccattaaagatactgatactgatactgtactttgtcaatattatttttacttgctacccattttaatttgcaaaagtcaactagatgtaattgaactaagcaatttatacccacacgattgttgctattacgattttaattcatttatcaatcaaaaactttgtctagccctctttcaatgaaactttaactgttcgataagtaattatagccgatctgcggaaattcaagagaataatacacaaaatggcgcgtgttatgtttaaaagaattgtattacagtataattatcacatatacatgtttttctgcgcagaaagtatttcaacgtacaataaaattgtatctctgacttctaatgtcatggaggtctgtttcttcctcctccccgatccttaatcccttatagagatgtggagacaccatttctctgttctggagtagttgttcctagtcttgaattcctcagttgatcagtgtttttgtttgatccacccaacgacttagagatcttaccctcggtctttttccttcaactgtttaagagatctcagctatgtaaagttatttatatatataatggatttctacggctgtcgccgcctctccatacccagcttccaattttttctatcgtaacacatatcttcatctcgaatccattgcgtcctgaatattgtccctccagcttctccgtggtcgtccctttcttcttctctccggtgggacccactctaatatttttctcggccagcgagtctcattcattcttttaacgtgccgaaccatgtcagctgtctcttttcaatatcgtctattatagttttttccaccttcatacgttctctaattgtttcatttcttacatgttctaatctcgaaacctgacaacttctcctcaaaaagtccatttctgtactaagtagcttcttgttatttcttgcacttatgtcccaaacttctgcacgtagattgtagcgctcttcattatactttcatatattcttcttctttgtttccttcctgatatatttgtcccataaaattgaattgagggatctagtgatgcttctacctttattgatcctgtgttgtatttcatcttcactatttcctcgtttgttaaatatagctcccaaatatttgcattgtttcacaccaacaatatgtccttgttccaatggtaggtttcaatgtcttcgttttcaatgtctttcattgacttccatagttctattatggggacactatcataggccttttctaggtcgataagagcgaagtgggtttcctgatttctctgtattcttttttctagtgctatttttaaattgaagagattgtctacctttgaacgtcccgcacgaaaaccagcttgttcttcagcttgctttccttgaatttattgttctatttcatttcttaatatcctggagtataaccttccaaatactcctgctaactcctctgctccaaatcttaactacatgaataaactcctctccagacacaaggatatctcaactaatcgacttggtccagtataaaactatacatctgtttattacttacagcatgtcagttatttcttctgtctggtaccagatttggaactctttccaccaaacacaaatacaacttttcacaacatatactttttttaaaacttggctaattagcaccgtcatttcagcagaaactgtagtgtactcgcccggtattcaattcacaatgccctctcctctcctggcaaaactccattaaaatcattaaatctcccacttcgtttttagtgaaccaatcaggacgtatctctatccaaacaaattttactgtcttctcaataaaaccaactttctactatccaataatccgtaagtcattcttagtaaacacatactaaacattttcaatttctacggaaaaaaggataattaccgatccccgatgattattcactaaacctactctttgtctaaatcttttcattgtttcgtggtataccgtacaatagaaagttcaacatcaaatacttacaaatgtccatctaactaaacgttagaaaaaccaatatattgtcttcttattttctgggaatgcctttaaccgaataagattcactaattccgaaaaacactttctacatctaatgcttaatagtataatatagaggcaacatctcattcaacatctaatgctgcgatttctgttggtcggtgatttgatttttgtcttaatattttctgtttgaattttgaaaaaatatggaaccttattaatacattcctagtaaaaaatcgatttttaacgagctatattgcttaagtgttccatcttcttcttcagatgaaaatccactaacggatgttagcgatcacattttccattaactctgtttcttgcaatgtgtatcagagattgtatgttgttaatctctgtccattgccttatgtttcggagccaggacattttcttgcgtcctattcctctcttgccttcaattttaccctcgattataagtaaggaactggtgtttttcgtttcgcatgatgtgacccagatactccattttccttttcttgataatttcaaaaagttgacgttctttgttgattctcttaaggacatctgcatttgtgactttcatttgtgactttcgccgtccatggtatctttaggatacggcgataaagccacatttcgaaggcttctaatctgtttatatccctcgttttgagtgtccagccctctacgccatatagtagcaccaaccacacgtagcacttagtaaaccttagtctcagttgaagatcgaactctgaacaggtcagtaccttcctgaatttgacgaaagcttgtcgtgcttactcaatgcgacattttactttcctgtccgatgcccagtcttcaaaaattcacgttaagtgttcctataaaatatgaattataaggtactaccgtttcgcagaaacggaatttgttatcgttaaatataaggattttggattattatgtgacataatatctcttcttgatacatttctagttaaagtagatctttatctctccatacttaatgaactcttctctatattgatacatgttggatgcacccccatttcgaacgcctcaatctgtttattggtagttttatctgcgtttgaactgtgtattgtgaagtaatactgatcacgctatcgtttaaagcatacattagcaaaaagtaaagtataacgtgtaataaatcgtgtgggagaacattgtttttacgagatgccaatttataactatattttacatacaccgttttggtatgaatagaaacagaacgttagaaaggcagc

SEQ ID NO: 1947 - DNA, 4636 bp, Diabrotica virgifera
  SmartBlast Evalue=1E-164; Info="Protein Mo25, putative n=5 Tax= Neoptera RepID=E0VEQ6_PEDHC"
cccaagaaggatcactcaaagtgaaaacgaaaaacattaaaaataaaattttgtgaagttttcgcccgtaaattctccaattttagtgtaaaacaattatattttcgtcagatgtgtctttcactagtttctttagttaaacaacgcgtttttgtgatgaacgaggtatcataatcgcaataatcgtttcaaaattttatagatgagattatcaatctaagtattctgtttcgtcggtagtttcgtaaatatttgattgattttgctgaagagatcggcgttttttgtcaggttattaagtttgaaacgatgcccctatttggtaaatctacaaaaggcccagcagatgttgtgaaggctctcaaggaagcagtcaattcactggaaaaaggtgacaaaaaagcggaaaaggcccaggaagatgtatccaagaacctcgtcctgatcaagaacatgctgtacggcacctcagatgcggagccccaggcggatattatcgtagcgcaactagctcaagagctctacaatagcaatttgttgttacttctgattcaaaatctgaaccggatcgacttcgagggcaagaaagatgtggcccaggtgtttaataatatactaagaagacagatcggaacgagatcgccgactgtagaatatatttgtactaaacctgaggttttgtttaccttaatgactgggtatgagcatcaagaaatagctttaaactgtggtactatgttacgtgagtgtgctaggtacgaagctctggcaaaaataatgttatactcagatgatttttataacttttttcgatacgtggaggtttctacttttgatatagcttcagatgcgttttctacatttaaggaattgctaaccagacacaaaatcctatgcgccgatttcttagaaatgaactacgacaaagtatttaatcactatcagagacttctcaattctgagaactacgtcactcggcgtcaaagtctgaagcttctcggggaattgttactggatagacataatttcacagttatgaccaggtatatatcgaaccccgacaacttgaaattaatgatgaatatgcttaaggagaggtctagaaatattcaatttgaagctttccacgtattcaaggtattcgttgccaatccaaataaacctaaaccaattttagacattttattacggaatcaagaaaaactcgtagaatttctgatgcggttccacacggatcgagcagaagacgagcagttcaacgacgaaaaggcgtatctaataaggcaaatcaaggagctgaaaccgataccgggccattaaagatactgatactgatactgtactttgtcaatattatttttacttgctacccattttaatttgcaaaagtcaactagatgtaattgaactaagcaatttatacccacacgattgttgctattacgattttaattcatttatcaatcaaaaactttgtctagccctctttcaatgaaactttaactgttcgataagtaattatagccgatctgcggaaattcaagagaataatacacaaaatggcgcgtgttatgtttaaaagaattgtattacagtataattatcacatatacatgtttttctgcgcagaaagtatttcaacgtacaataaaattgtatctctgacttctaatgtcatggaggtctgtttcttcctcctccccgatccttaatcccttatagagatgtggagacaccatttctctgttctggagtagttgttcctagtcttgaattcctcagttgatcagtgtttttgtttgatccacccaacgacttagagatcttaccctcggtctttttccttcaactgtttaagagatctcagctatgtaaagttatttatatatataatggatttctacggctgtcgccgcctctccatacccagcttccaattttttctatcgtaacacatatcttcatctcgaatccattgcgtcctgaatattgtccctccagcttctccgtggtcgtccctttcttcttctctccggtgggacccactctaatatttttctcggccagcgagtctcattcattcttttaacgtgccgaaccatgtcagctgtctcttttcaatatcgtctattatagttttttccaccttcatacgttctctaattgtttcatttcttacatgttctaatctcgaaacctgacaacttctcctcaaaaagtccatttctgtactaagtagcttcttgttatttcttgcacttatgtcccaaacttctgcacgtagattgtagcgctcttcattatactttcatatattcttcttctttgtttccttcctgatatatttgtcccataaaattgaattgagggatctagtgatgcttctacctttattgatcctgtgttgtatttcatcttcactatttcctcgtttgttaaatatagctcccaaatatttgcattgtttcacaccaacaatatgtccttgttccaatggtaggtttcaatgtcttcgttttcaatgtctttcattgacttccatagttctattatggggacactatcataggccttttctaggtcgataagagcgaagtgggtttcctgatttctctgtattcttttttctagtgctatttttaaattgaagagattgtctacctttgaacgtcccgcacgaaaaccagcttgttcttcagcttgctttccttgaatttattgttctatttcatttcttaatatcctggagtataaccttccaaatactcctgctaactcctctgctccaaatcttaactacatgaataaactcctctccagacacaaggatatctcaactaatcgacttggtccagtataaaactatacatctgtttattacttacagcatgtcagttatttcttctgtctggtaccagatttggaactctttccaccaaacacaaatacaacttttcacaacatatactttttttaaaacttggctaattagcaccgtcatttcagcagaaactgtagtgtactcgcccggtattcaattcacaatgccctctcctctcctggcaaaactccattaaaatcattaaatctcccacttcgtttttagtgaaccaatcaggacgtatctctatccaaacaaattttactgtcttctcaataaaaccaactttctactatccaataatccgtaagtcattcttagtaaacacatactaaacattttcaatttctacggaaaaaaggataattaccgatccccgatgattattcactaaacctactctttgtctaaatcttttcattgtttcgtggtataccgtacaatagaaagttcaacatcaaatacttacaaatgtccatctaactaaacgttagaaaaaccaatatattgtcttcttattttctgggaatgcctttaaccgaataagattcactaattccgaaaaacactttctacatctaatgcttaatagtataatatagagggtgctgcgatttctgttggtcggtgatttgatttttgtcttaatattttctgtttgaattttgaaaaaatatggaaccttattaatacattcctagtaaaaaatcgatttttaacgagctatattgcttaagtgttccatcttcttcttcagatgaaaatccactaacggatgttagcgatcacattttccattaactctgtttcttgcaatgtgtatcagagattgtatgttgttaatctctgtccattgccttatgtttcggagccaggacattttcttgcgtcctattcctctcttgccttcaattttaccctcgattataagtaaggaactggtgtttttcgtttcgcatgatgtgacccagatactccattttccttttcttgataatttcaaaaagttgacgttctttgttgattctcttaaggacatctgcatttgtgactttcatttgtgactttcgccgtccatggtatctttaggatacggcgataaagccacatttcgaaggcttctaatctgtttatatccctcgttttgagtgtccagccctctacgccatatagtagcaccaaccacacgtagcacttagtaaaccttagtctcagttgaagatcgaactctgaacaggtcagtaccttcctgaatttgacgaaagcttgtcgtgcttactcaatgcgacattttactttcctgtccgatgcccagtcttcaaaaattcacgttaagtgttcctataaaatatgaattataaggtactaccgtttcgcagaaacggaatttgttatcgttaaatataaggattttggattattatgtgacataatatctcttcttgatacatttctagttaaagtagatctttatctctccatacttaatgaactcttctctatattgatacatgttggatgcacccccatttcgaacgcctcaatctgtttattggtagttttatctgcgtttgaactgtgtattgtgaagtaatactgatcacgctatcgtttaaagcatacattagcaaaaagtaaagtataacgtgtaataaatcgtgtgggagaacattgtttttacgagatgccaatttataactatattttacatacaccgttttggtatgaatagaaacagaacgttagaaaggcagc

SEQ ID NO: 1948 - DNA, 4238 bp, Diabrotica virgifera
  SmartBlast Evalue=4E-33; Info=Endonuclease-reverse transcriptase n=1 Tax=Bombyx mori RepID=D5LB38_BOMMO
ctaaaacgttgtagtgatatataacatcttctgcagaaaacttaagattgttgtaccctaataataacaaaatgtcgggacctacccaagtacatgaaaactttgttagcgagcctatgggtttgaaacctgtaacaaaattagcaggaattggagaaacacttggtaaacgcttggtagccgctggatttgagaaagcttacgctgtattaggacagttcctatttctgaaaaaggatgaagaacattttagggactggctgaaaagcacttgtttagctaattccaaagattcatcggcttgttgggaatgcctcaatgagtggtgttccaaatttttattcgatactaataatacaaaaattccgaggacttctgacaaacccaccgacaaacatgaaaactttgttatagagcctttgggtgaaaaacttgtaacagaattaccagggattgggaaagtccatggtaaacgcttggtagatgccggatttgacaaagcttatgttgtattaggcaaattcctacttttgaaaaaggatcgaggcctttttaggaaatggttggaagaaacttgctcagtcagttccaaaggatcattggattgttggaattacctctataattattgtacaaattttgtgtaattgtacatgacagaccgaagtgtattgtttgtattcccaattagtttaattgtattcccaattttgtattcccaatatcttttgtatagacttttatttttgtaatattaatatttgtaagttcaaattttataactgtatattgtatattataaagggtgtcccaaaagtagaggaacggtcgaatatttcgcgaactgtacatgaaatcgaaaaactgaaaaatacgtgttcaataattttcaaaaatctatcgaatgacaccaaacacgatcccccactccaacccctggatgtggggagggataacattaaaaccttaaatggaaaccctcagttttattacagatttggattccttacgtaaaagtaagcaacttttattcaagacatttttttgaattgtagatagatggcgctataatcggaaaaaaccatttatcgtgatatatatatataatggatttctacggctgtcgccgcctctccatacccagcttccaattttttctatcgtaacacgtatcttcatctaattgcctcgaatccattgcgtcctgaatattgtccctccagcttctccgtggtcgtccctttcttcttctctccggtgggacccactctaatatttttctcggccagcgagtctcattcattcttttaacgtgccgaaccatgtcagctgtctcttttcaatatcgtccattatagttttttccaccttcatacgttctctaattgtttcatttcttacatgttctaatctcgaaacctgacaacttctcctcaaaaagtccatttctgtactaagtagcttcttgttatttcttgcacttatgtcccaaacttctgcacgtagattgtagcgctcttcattatactttcatatattcttcttctttgtttccttcctgatatatttgtcccataaaattgaattgagggatctagtgatgcttctacctttattgatcctgtgttgtatttcatcttcactatttcctcgtttgttaaatatagctcccaaatatttgcattgtttcacaccaacaatatgtccttgttccaatggtaggtttcaatgtcttcgtttcccactatgaagtattctgatttgcccatatttattactaatcctgcctgttggtaatgttcatttagcttccgtatcatatagcttaagtcatcttgatcttgggctataacaacttggtcgtccgcaaagtataatgtaaatagggagtcgtctcccactttcagtcccatcggttttactgcttttgtccacctctgtaaggattggtgaaggtatattttaaagagagtgggagatagacaacatccttgtcggatgccttttaaagtattaaatgcctcagtttgccgtttttgattctggtgttagtggtctcatataacattttagttgcttgtatgagttttccatcgataccgatgtctttaattgacttccatagttctattatggggacactatcataggccttttctaggtcgataagagcgaagtgggtttcctgatttctctgtattcttttttctagtgctatttttaaattgaagagattgtctacctttgaacgtcccgcacgaaaaccagcttgttcttcagcttgctttccttgaatttattgttctatttcatttcttaatatcctggagtataaccttccaaatactcctgctaactcctctgctccaaatcttaactacatgaataaactcctctccagacacaaggatatctcaactaatcgacttggtccagtataaaactatacatctgtttattacttacagcatgtcagttatttcttctgtctggtaccagatttggaactctttccaccaaacacaaatacaacttttcacaacatatactttttttaaaacttggctaattagcaccgtcatttcagcagaaactgtagtgtactcgcccggtattcaattcacaatgccctctcctctcctggcaaaactccattaaaatcattaaatctcccacttcgtttttagtgaaccaatcaggacgtatctctatccaaacaaattttactgtcttctcaataaaaccaactttctactatccaataatccgtaagtcattcttagtaaacacatactaaacattttcaatttctacggaaaaaaggataattaccgatccccgatgattattcactaaacctactctttgtctaaatcttttcattgtttcgtggtataccgtacaatagaaagttcaacatcaaatacttacaaatgtccatctaactaaacgttagaaaaaccaatatattgtcttcttattttctgggaatgcctttaaccgaataagattcactaattccgaaaaacactttctacatctaatgcttaatagtataatatagaggcaacatctcattcaacatctaatgctgcgatttctgttggtcggtgatttgatttttgtcttaatattttctgtttgaattttgaaaaaatatggaaccttattaatacattcctagtaaaaaatcgatttttaacgagctatattgcttaagtgttccatcttcttcttcagatgaaaatccactaacggatgttagcgatcacattttccattaactctgtttcttgcaatgtgtatcagagattgtatgttgttaatctctgtccattgccttatgtttcggagccaggacattttcttgcgtcctattcctctcttgccttcaattttaccctcgattataagtaaggaactggtgtttttcgtttcgcatgatgtgacccagatactccattttccttttcttgataatttcaaaaagttgacgttctttgttgattctcttaaggacatctgcatttgtgactttcatttgtgactttcgccgtccatggtatctttaggatacggcgataaagccacatttcgaaggcttctaatctgtttatatccctcgttttgagtgtccagccctctacgccatatagtagcaccaaccacacgtagcacttagtaaaccttagtctcagttgaagatcgaactctgaacaggtcagtaccttcctgaatttgacgaaagcttgtcgtgcttactcaatgcgacattttactttcctgtccgatgcccagtcttcaaaaattcacgttaagtgttcctataaaatatgaattataaggtactaccgtttcgcagaaacggaatttgttatcgttaaatataaggattttggattattatgtgacataatatctcttcttgatacatttctagttaaagtagatctttatctctccatacttaatgaactcttctctatattgatacatgttggatgcacccccatttcgaacgcctcaatctgtttattggtagttttatctgcgtttgaactgtgtattgtgaagtaatactgatcacgctatcgtttaaagcatacattagcaaaaagtaaagtataacgtgtaataaatcgtgtgggagaacattgtttttacgagatgccaatttataactatattttacatacaccgttttggtatgaatagaaacagaacgttagaaaggcagc

SEQ ID NO: 1949 - DNA, 4217 bp, Diabrotica virgifera
  SmartBlast Evalue=4E-33; Info=Endonuclease-reverse transcriptase n=1 Tax=Bombyx mori RepID=D5LB38_BOMMO
ctaaaacgttgtagtgatatataacatcttctgcagaaaacttaagattgttgtaccctaataataacaaaatgtcgggacctacccaagtacatgaaaactttgttagcgagcctatgggtttgaaacctgtaacaaaattagcaggaattggagaaacacttggtaaacgcttggtagccgctggatttgagaaagcttacgctgtattaggacagttcctatttctgaaaaaggatgaagaacattttagggactggctgaaaagcacttgtttagctaattccaaagattcatcggcttgttgggaatgcctcaatgagtggtgttccaaatttttattcgatactaataatacaaaaattccgaggacttctgacaaacccaccgacaaacatgaaaactttgttatagagcctttgggtgaaaaacttgtaacagaattaccagggattgggaaagtccatggtaaacgcttggtagatgccggatttgacaaagcttatgttgtattaggcaaattcctacttttgaaaaaggatcgaggcctttttaggaaatggttggaagaaacttgctcagtcagttccaaaggatcattggattgttggaattacctctataattattgtacaaattttgtgtaattgtacatgacagaccgaagtgtattgtttgtattcccaattagtttaattgtattcccaattttgtattcccaatatcttttgtatagacttttatttttgtaatattaatatttgtaagttcaaattttataactgtatattgtatattataaagggtgtcccaaaagtagaggaacggtcgaatatttcgcgaactgtacatgaaatcgaaaaactgaaaaatacgtgttcaataattttcaaaaatctatcgaatgacaccaaacacgatcccccactccaacccctggatgtggggagggataacattaaaaccttaaatggaaaccctcagttttattacagatttggattccttacgtaaaagtaagcaacttttattcaagacatttttttgaattgtagatagatggcgctataatcggaaaaaaccatttatcgtgatatatatatataatggatttctacggctgtcgccgcctctccatacccagcttccaattttttctatcgtaacacgtatcttcatctaattgcctcgaatccattgcgtcctgaatattgtccctccagcttctccgtggtcgtccctttcttcttctctccggtgggacccactctaatatttttctcggccagcgagtctcattcattcttttaacgtgccgaaccatgtcagctgtctcttttcaatatcgtccattatagttttttccaccttcatacgttctctaattgtttcatttcttacatgttctaatctcgaaacctgacaacttctcctcaaaaagtccatttctgtactaagtagcttcttgttatttcttgcacttatgtcccaaacttctgcacgtagattgtagcgctcttcattatactttcatatattcttcttctttgtttccttcctgatatatttgtcccataaaattgaattgagggatctagtgatgcttctacctttattgatcctgtgttgtatttcatcttcactatttcctcgtttgttaaatatagctcccaaatatttgcattgtttcacaccaacaatatgtccttgttccaatggtaggtttcaatgtcttcgtttcccactatgaagtattctgatttgcccatatttattactaatcctgcctgttggtaatgttcatttagcttccgtatcatatagcttaagtcatcttgatcttgggctataacaacttggtcgtccgcaaagtataatgtaaatagggagtcgtctcccactttcagtcccatcggttttactgcttttgtccacctctgtaaggattggtgaaggtatattttaaagagagtgggagatagacaacatccttgtcggatgccttttaaagtattaaatgcctcagtttgccgtttttgattctggtgttagtggtctcatataacattttagttgcttgtatgagttttccatcgataccgatgtctttaattgacttccatagttctattatggggacactatcataggccttttctaggtcgataagagcgaagtgggtttcctgatttctctgtattcttttttctagtgctatttttaaattgaagagattgtctacctttgaacgtcccgcacgaaaaccagcttgttcttcagcttgctttccttgaatttattgttctatttcatttcttaatatcctggagtataaccttccaaatactcctgctaactcctctgctccaaatcttaactacatgaataaactcctctccagacacaaggatatctcaactaatcgacttggtccagtataaaactatacatctgtttattacttacagcatgtcagttatttcttctgtctggtaccagatttggaactctttccaccaaacacaaatacaacttttcacaacatatactttttttaaaacttggctaattagcaccgtcatttcagcagaaactgtagtgtactcgcccggtattcaattcacaatgccctctcctctcctggcaaaactccattaaaatcattaaatctcccacttcgtttttagtgaaccaatcaggacgtatctctatccaaacaaattttactgtcttctcaataaaaccaactttctactatccaataatccgtaagtcattcttagtaaacacatactaaacattttcaatttctacggaaaaaaggataattaccgatccccgatgattattcactaaacctactctttgtctaaatcttttcattgtttcgtggtataccgtacaatagaaagttcaacatcaaatacttacaaatgtccatctaactaaacgttagaaaaaccaatatattgtcttcttattttctgggaatgcctttaaccgaataagattcactaattccgaaaaacactttctacatctaatgcttaatagtataatatagagggtgctgcgatttctgttggtcggtgatttgatttttgtcttaatattttctgtttgaattttgaaaaaatatggaaccttattaatacattcctagtaaaaaatcgatttttaacgagctatattgcttaagtgttccatcttcttcttcagatgaaaatccactaacggatgttagcgatcacattttccattaactctgtttcttgcaatgtgtatcagagattgtatgttgttaatctctgtccattgccttatgtttcggagccaggacattttcttgcgtcctattcctctcttgccttcaattttaccctcgattataagtaaggaactggtgtttttcgtttcgcatgatgtgacccagatactccattttccttttcttgataatttcaaaaagttgacgttctttgttgattctcttaaggacatctgcatttgtgactttcatttgtgactttcgccgtccatggtatctttaggatacggcgataaagccacatttcgaaggcttctaatctgtttatatccctcgttttgagtgtccagccctctacgccatatagtagcaccaaccacacgtagcacttagtaaaccttagtctcagttgaagatcgaactctgaacaggtcagtaccttcctgaatttgacgaaagcttgtcgtgcttactcaatgcgacattttactttcctgtccgatgcccagtcttcaaaaattcacgttaagtgttcctataaaatatgaattataaggtactaccgtttcgcagaaacggaatttgttatcgttaaatataaggattttggattattatgtgacataatatctcttcttgatacatttctagttaaagtagatctttatctctccatacttaatgaactcttctctatattgatacatgttggatgcacccccatttcgaacgcctcaatctgtttattggtagttttatctgcgtttgaactgtgtattgtgaagtaatactgatcacgctatcgtttaaagcatacattagcaaaaagtaaagtataacgtgtaataaatcgtgtgggagaacattgtttttacgagatgccaatttataactatattttacatacaccgttttggtatgaatagaaacagaacgttagaaaggcagc

SEQ ID NO: 1950 - DNA, 3879 bp, Diabrotica virgifera
  SmartBlast Evalue=3E-33; Info=Endonuclease-reverse transcriptase n=1 Tax=Bombyx mori RepID=D5LB38_BOMMO
ctaaaacgttgtagtgatatataacatcttctgcagaaaacttaagattgttgtaccctaataataacaaaatgtcgggacctacccaagtacatgaaaactttgttagcgagcctatgggtttgaaacctgtaacaaaattagcaggaattggagaaacacttggtaaacgcttggtagccgctggatttgagaaagcttacgctgtattaggacagttcctatttctgaaaaaggatgaagaacattttagggactggctgaaaagcacttgtttagctaattccaaagattcatcggcttgttgggaatgcctcaatgagtggtgttccaaatttttattcgatactaataatacaaaaattccgaggacttctgacaaacccaccgacaaacatgaaaactttgttatagagcctttgggtgaaaaacttgtaacagaattaccagggattgggaaagtccatggtaaacgcttggtagatgccggatttgacaaagcttatgttgtattaggcaaattcctacttttgaaaaaggatcgaggcctttttaggaaatggttggaagaaacttgctcagtcagttccaaaggatcattggattgttggaattacctctataattattgtacaaattttgtgtaattgtacatgacagaccgaagtgtattgtttgtattcccaattagtttaattgtattcccaattttgtattcccaatatcttttgtatagacttttatttttgtaatattaatatttgtaagttcaaattttataactgtatattgtatattataaagggtgtcccaaaagtagaggaacggtcgaatatttcgcgaactgtacatgaaatcgaaaaactgaaaaatacgtgttcaataattttcaaaaatctatcgaatgacaccaaacacgatcccccactccaacccctggatgtggggagggataacattaaaaccttaaatggaaaccctcagttttattacagatttggattccttacgtaaaagtaagcaacttttattcaagacatttttttgaattgtagatagatggcgctataatcggaaaaaaccatttatcgtgatatatatatataatggatttctacggctgtcgccgcctctccatacccagcttccaattttttctatcgtaacacgtatcttcatctaattgcctcgaatccattgcgtcctgaatattgtccctccagcttctccgtggtcgtccctttcttcttctctccggtgggacccactctaatatttttctcggccagcgagtctcattcattcttttaacgtgccgaaccatgtcagctgtctcttttcaatatcgtccattatagttttttccaccttcatacgttctctaattgtttcatttcttacatgttctaatctcgaaacctgacaacttctcctcaaaaagtccatttctgtactaagtagcttcttgttatttcttgcacttatgtcccaaacttctgcacgtagattgtagcgctcttcattatactttcatatattcttcttctttgtttccttcctgatatatttgtcccataaaattgaattgagggatctagtgatgcttctacctttattgatcctgtgttgtatttcatcttcactatttcctcgtttgttaaatatagctcccaaatatttgcattgtttcacaccaacaatatgtccttgttccaatggtaggtttcaatgtcttcgttttcaatgtctttcattgacttccatagttctattatggggacactatcataggccttttctaggtcgataagagcgaagtgggtttcctgatttctctgtattcttttttctagtgctatttttaaattgaagagattgtctacctttgaacgtcccgcacgaaaaccagcttgttcttcagcttgctttccttgaatttattgttctatttcatttcttaatatcctggagtataaccttccaaatactcctgctaactcctctgctccaaatcttaactacatgaataaactcctctccagacacaaggatatctcaactaatcgacttggtccagtataaaactatacatctgtttattacttacagcatgtcagttatttcttctgtctggtaccagatttggaactctttccaccaaacacaaatacaacttttcacaacatatactttttttaaaacttggctaattagcaccgtcatttcagcagaaactgtagtgtactcgcccggtattcaattcacaatgccctctcctctcctggcaaaactccattaaaatcattaaatctcccacttcgtttttagtgaaccaatcaggacgtatctctatccaaacaaattttactgtcttctcaataaaaccaactttctactatccaataatccgtaagtcattcttagtaaacacatactaaacattttcaatttctacggaaaaaaggataattaccgatccccgatgattattcactaaacctactctttgtctaaatcttttcattgtttcgtggtataccgtacaatagaaagttcaacatcaaatacttacaaatgtccatctaactaaacgttagaaaaaccaatatattgtcttcttattttctgggaatgcctttaaccgaataagattcactaattccgaaaaacactttctacatctaatgcttaatagtataatatagaggcaacatctcattcaacatctaatgctgcgatttctgttggtcggtgatttgatttttgtcttaatattttctgtttgaattttgaaaaaatatggaaccttattaatacattcctagtaaaaaatcgatttttaacgagctatattgcttaagtgttccatcttcttcttcagatgaaaatccactaacggatgttagcgatcacattttccattaactctgtttcttgcaatgtgtatcagagattgtatgttgttaatctctgtccattgccttatgtttcggagccaggacattttcttgcgtcctattcctctcttgccttcaattttaccctcgattataagtaaggaactggtgtttttcgtttcgcatgatgtgacccagatactccattttccttttcttgataatttcaaaaagttgacgttctttgttgattctcttaaggacatctgcatttgtgactttcatttgtgactttcgccgtccatggtatctttaggatacggcgataaagccacatttcgaaggcttctaatctgtttatatccctcgttttgagtgtccagccctctacgccatatagtagcaccaaccacacgtagcacttagtaaaccttagtctcagttgaagatcgaactctgaacaggtcagtaccttcctgaatttgacgaaagcttgtcgtgcttactcaatgcgacattttactttcctgtccgatgcccagtcttcaaaaattcacgttaagtgttcctataaaatatgaattataaggtactaccgtttcgcagaaacggaatttgttatcgttaaatataaggattttggattattatgtgacataatatctcttcttgatacatttctagttaaagtagatctttatctctccatacttaatgaactcttctctatattgatacatgttggatgcacccccatttcgaacgcctcaatctgtttattggtagttttatctgcgtttgaactgtgtattgtgaagtaatactgatcacgctatcgtttaaagcatacattagcaaaaagtaaagtataacgtgtaataaatcgtgtgggagaacattgtttttacgagatgccaatttataactatattttacatacaccgttttggtatgaatagaaacagaacgttagaaaggcagc

SEQ ID NO: 1951 - DNA, 3858 bp, Diabrotica virgifera
  SmartBlast Evalue=3E-33; Info=Endonuclease-reverse transcriptase n=1 Tax=Bombyx mori RepID=D5LB38_BOMMO
ctaaaacgttgtagtgatatataacatcttctgcagaaaacttaagattgttgtaccctaataataacaaaatgtcgggacctacccaagtacatgaaaactttgttagcgagcctatgggtttgaaacctgtaacaaaattagcaggaattggagaaacacttggtaaacgcttggtagccgctggatttgagaaagcttacgctgtattaggacagttcctatttctgaaaaaggatgaagaacattttagggactggctgaaaagcacttgtttagctaattccaaagattcatcggcttgttgggaatgcctcaatgagtggtgttccaaatttttattcgatactaataatacaaaaattccgaggacttctgacaaacccaccgacaaacatgaaaactttgttatagagcctttgggtgaaaaacttgtaacagaattaccagggattgggaaagtccatggtaaacgcttggtagatgccggatttgacaaagcttatgttgtattaggcaaattcctacttttgaaaaaggatcgaggcctttttaggaaatggttggaagaaacttgctcagtcagttccaaaggatcattggattgttggaattacctctataattattgtacaaattttgtgtaattgtacatgacagaccgaagtgtattgtttgtattcccaattagtttaattgtattcccaattttgtattcccaatatcttttgtatagacttttatttttgtaatattaatatttgtaagttcaaattttataactgtatattgtatattataaagggtgtcccaaaagtagaggaacggtcgaatatttcgcgaactgtacatgaaatcgaaaaactgaaaaatacgtgttcaataattttcaaaaatctatcgaatgacaccaaacacgatcccccactccaacccctggatgtggggagggataacattaaaaccttaaatggaaaccctcagttttattacagatttggattccttacgtaaaagtaagcaacttttattcaagacatttttttgaattgtagatagatggcgctataatcggaaaaaaccatttatcgtgatatatatatataatggatttctacggctgtcgccgcctctccatacccagcttccaattttttctatcgtaacacgtatcttcatctaattgcctcgaatccattgcgtcctgaatattgtccctccagcttctccgtggtcgtccctttcttcttctctccggtgggacccactctaatatttttctcggccagcgagtctcattcattcttttaacgtgccgaaccatgtcagctgtctcttttcaatatcgtccattatagttttttccaccttcatacgttctctaattgtttcatttcttacatgttctaatctcgaaacctgacaacttctcctcaaaaagtccatttctgtactaagtagcttcttgttatttcttgcacttatgtcccaaacttctgcacgtagattgtagcgctcttcattatactttcatatattcttcttctttgtttccttcctgatatatttgtcccataaaattgaattgagggatctagtgatgcttctacctttattgatcctgtgttgtatttcatcttcactatttcctcgtttgttaaatatagctcccaaatatttgcattgtttcacaccaacaatatgtccttgttccaatggtaggtttcaatgtcttcgttttcaatgtctttcattgacttccatagttctattatggggacactatcataggccttttctaggtcgataagagcgaagtgggtttcctgatttctctgtattcttttttctagtgctatttttaaattgaagagattgtctacctttgaacgtcccgcacgaaaaccagcttgttcttcagcttgctttccttgaatttattgttctatttcatttcttaatatcctggagtataaccttccaaatactcctgctaactcctctgctccaaatcttaactacatgaataaactcctctccagacacaaggatatctcaactaatcgacttggtccagtataaaactatacatctgtttattacttacagcatgtcagttatttcttctgtctggtaccagatttggaactctttccaccaaacacaaatacaacttttcacaacatatactttttttaaaacttggctaattagcaccgtcatttcagcagaaactgtagtgtactcgcccggtattcaattcacaatgccctctcctctcctggcaaaactccattaaaatcattaaatctcccacttcgtttttagtgaaccaatcaggacgtatctctatccaaacaaattttactgtcttctcaataaaaccaactttctactatccaataatccgtaagtcattcttagtaaacacatactaaacattttcaatttctacggaaaaaaggataattaccgatccccgatgattattcactaaacctactctttgtctaaatcttttcattgtttcgtggtataccgtacaatagaaagttcaacatcaaatacttacaaatgtccatctaactaaacgttagaaaaaccaatatattgtcttcttattttctgggaatgcctttaaccgaataagattcactaattccgaaaaacactttctacatctaatgcttaatagtataatatagagggtgctgcgatttctgttggtcggtgatttgatttttgtcttaatattttctgtttgaattttgaaaaaatatggaaccttattaatacattcctagtaaaaaatcgatttttaacgagctatattgcttaagtgttccatcttcttcttcagatgaaaatccactaacggatgttagcgatcacattttccattaactctgtttcttgcaatgtgtatcagagattgtatgttgttaatctctgtccattgccttatgtttcggagccaggacattttcttgcgtcctattcctctcttgccttcaattttaccctcgattataagtaaggaactggtgtttttcgtttcgcatgatgtgacccagatactccattttccttttcttgataatttcaaaaagttgacgttctttgttgattctcttaaggacatctgcatttgtgactttcatttgtgactttcgccgtccatggtatctttaggatacggcgataaagccacatttcgaaggcttctaatctgtttatatccctcgttttgagtgtccagccctctacgccatatagtagcaccaaccacacgtagcacttagtaaaccttagtctcagttgaagatcgaactctgaacaggtcagtaccttcctgaatttgacgaaagcttgtcgtgcttactcaatgcgacattttactttcctgtccgatgcccagtcttcaaaaattcacgttaagtgttcctataaaatatgaattataaggtactaccgtttcgcagaaacggaatttgttatcgttaaatataaggattttggattattatgtgacataatatctcttcttgatacatttctagttaaagtagatctttatctctccatacttaatgaactcttctctatattgatacatgttggatgcacccccatttcgaacgcctcaatctgtttattggtagttttatctgcgtttgaactgtgtattgtgaagtaatactgatcacgctatcgtttaaagcatacattagcaaaaagtaaagtataacgtgtaataaatcgtgtgggagaacattgtttttacgagatgccaatttataactatattttacatacaccgttttggtatgaatagaaacagaacgttagaaaggcagc

SEQ ID NO: 1952 - DNA, 3423 bp, Diabrotica virgifera
  SmartBlast Evalue=1E-164; Info="Protein Mo25, putative n=5 Tax= Neoptera RepID=E0VEQ6_PEDHC"
cccaagaaggatcactcaaagtgaaaacgaaaaacattaaaaataaaattttgtgaagttttcgcccgtaaattctccaattttagtgtaaaacaattatattttcgtcagatgtgtctttcactagtttctttagttaaacaacgcgtttttgtgatgaacgaggtatcataatcgcaataatcgtttcaaaattttatagatgagattatcaatctaagtattctgtttcgtcggtagtttcgtaaatatttgattgattttgctgaagagatcggcgttttttgtcaggttattaagtttgaaacgatgcccctatttggtaaatctacaaaaggcccagcagatgttgtgaaggctctcaaggaagcagtcaattcactggaaaaaggtgacaaaaaagcggaaaaggcccaggaagatgtatccaagaacctcgtcctgatcaagaacatgctgtacggcacctcagatgcggagccccaggcggatattatcgtagcgcaactagctcaagagctctacaatagcaatttgttgttacttctgattcaaaatctgaaccggatcgacttcgagggcaagaaagatgtggcccaggtgtttaataatatactaagaagacagatcggaacgagatcgccgactgtagaatatatttgtactaaacctgaggttttgtttaccttaatgactgggtatgagcatcaagaaatagctttaaactgtggtactatgttacgtgagtgtgctaggtacgaagctctggcaaaaataatgttatactcagatgatttttataacttttttcgatacgtggaggtttctacttttgatatagcttcagatgcgttttctacatttaaggaattgctaaccagacacaaaatcctatgcgccgatttcttagaaatgaactacgacaaagtatttaatcactatcagagacttctcaattctgagaactacgtcactcggcgtcaaagtctgaagcttctcggggaattgttactggatagacataatttcacagttatgaccaggtatatatcgaaccccgacaacttgaaattaatgatgaatatgcttaaggagaggtctagaaatattcaatttgaagctttccacgtattcaaggtattcgttgccaatccaaataaacctaaaccaattttagacattttattacggaatcaagaaaaactcgtagaatttctgatgcggttccacacggatcgagcagaagacgagcagttcaacgacgaaaaggcgtatctaataaggcaaatcaaggagctgaaaccgataccgggccattaaagatactgatactgatactgtactttgtcaatattatttttacttgctacccattttaatttgcaaaagtcaactagatgtaattgaactaagcaatttatacccacacgattgttgctattacgattttaattcatttatcaatcaaaaactttgtctagccctctttcaatgaaactttaactgttcgataagtaattatagccgatctgcggaaattcaagagaataatacacaaaatggcgcgtgttatgtttaaaagaattgtattacagtataattatcacatatacatgtttttctgcgcagaaagtatttcaacgtacaataaaattgtatctctgacttctaatgtcatggaggtctgtttcttcctcctccccgatccttaatcccttatagagatgtggagacaccatttctctgttctggagtagttgttcctagtcttgaattcctcagttgatcagtgtttttgtttgatccacccaacgacttagagatcttaccctcggtctttttccttcaactgtttaagagatctcagctatgtaaagttatttatatatataatggatttctacggctgtcgccgcctctccatacccagcttccaattttttctatcgtaacacatatcttcatctcgaatccattgcgtcctgaatattgtccctccagcttctccgtggtcgtccctttcttcttctctccggtgggacccactctaatatttttctcggccagcgagtctcattcattcttttaacgtgccgaaccatgtcagctgtctcttttcaatatcgtctattatagttttttccaccttcatacgttctctaattgtttcatttcttacatgttctaatctcgaaacctgacaacttctcctcaaaaagtccatttctgtactaagtagcttcttgttatttcttgcacttatgtcccaaacttctgcacgtagattgtagcgctcttcattatactttcatatattcttcttctttgtttccttcctgatatatttgtcccataaaattgaattgagggatctagtgatgcttctacctttattgatcctgtgttgtatttcatcttcactatttcctcgtttgttaaatatagctcccaaatatttgcattgtttcacaccaacaatatgtccttgttccaatggtaggtttcaatgtcttcgtttcccactatgaagtattctgatttgcccatatttattactaatcctgcctgttggtaatgttcatttagcttccgtatcatatagcttaagtcatcttgatcttgggctataacaacttggtcgtccgcaaagtataatgtaaatagggagtcgtctcccactttcagtcccatcggttttactgcttttgtccacctctgtaaggattggtgaaggtatattttaaagagagtgggagatagacaacatccttgtcggatgccttttaaagtattaaatgcctcagtttgccgtttttgattctggtgttagtggtctcatataacattttagttgcttgtatgagttttccatcgataccgatgtctttaattgacttccatagttctattatggggacactatcataggccttttctaggtcgataagagcgaagtgggtttcctgatttctctgtattcttttttctagtgctatttttaaattgaagagattgtctacctttgaacgtcccgcacgaaaaccagcttgttcttcagcttgctttccttgaatttattgttctatttcatttcttaatatcctggagtataaccttccaaatactcctgctaactcctctgctccaaatcttaactacatgaataaactcctctccagacacaaggatatctcaactaatcgacttggtccagtataaaactatacatctgtttattacttacagcatgtcagttatttcttctgtctgctaccacagttggaactccttccaccaaacacaaatacaaatttttacaacatatacttttttcaagacttagctaattagcaacgtcgtctcagcagaaactgtcgtgttctcgcgcggtattcaattcacaatgccgtctcctctcctggc

SEQ ID NO: 1953 - DNA, 3081 bp, Diabrotica virgifera
  SmartBlast Evalue=4E-21; Info=Putative uncharacterized transposon-derived protein F52C9.6 (Fragment) n=2 Tax= Camponotus floridanus RepID=E2ALS0_9HYME
gcgccctggtctatagggagtaagcattttgacaggtattattatactcaattttaaatttagtataaaatctaaactagaactacaaaaacagaaactggaagtaaattttttgaaaatttttacttatctggaatataaatagcatctgacttcattatcatcaatagtgttattacaactcttcttaagtccttgcgcgtatactattgccttccatatttgtgggtctgtgccactatttcccattttctccagatgtcctccgactggatcttttcacctttttctgggccgtcctgcagacattttcccatatggtcttttccaaaacacattgtttataaggcgattgtcattactccgtatcacatgtcctgtccatcttagtctattggccgttatatatcttactagatttatctttccgaagagtcattctaactcgttgttatgtctgcgcctccattcttttgtcatgctatctctgcaggggccaaatattactcgaaggattttactttagcataccaacaatttatttatttatttttttgttagcgtccatatttcttttccatacgcgacagctggtcgtattatggtttttatatcttgatttttgcacctcttgagagaagttttgacctcatgagatgttgcaatcatcagggaaataaattaatacaaaaattaaagatatttgtacaaactccaaacattaggttatttattgaaaaagtgactagattcacttcacaacattccaatatagtaaaacaatgttcatcaacaacgtccttaaaatttcaataagtatacaatatagtgctataaaagtttaacgcttgttgtaaaatccaatattttaatcaaatttatatagttttcttaataaaacaatatgaataagtgttaatcatttacatgactcaatatttcttgtcagcttatgttaatatgggtttttattaatgtttttggtttgaaaatggaatgttttgtattgtagggattttcatgttatttggcagtttttgttgctgctttatcagccgcctcattctccattatccatgtttttggtatccctatgggatggtacccataataatattttgtttttgtcacgtgtttgggcattatataatacctgtcttttatttgtgttcaattcccatgagtaggatacatttgtttgaccccactgaagacacccagagaatctgatataataagaaaatttatatcagatatattgttgatacattggtttagtgcgttggtgattacttgcagttctccagtatatgctacactccttggctaggcgggtgacagaggtactatcttcgaaaatagctgcagcagctataccactgctgcttttggaggcatcagtaaaaattattttgaaataaagatatctatagatggtagacaggaattgttgttttatttcagaagaattgtgtgaatgtttgggatagttgaataagttgataataatagtctcccgttttataccgctcacgcggctttgagattatatcagggtagtctgctatatctagggcctacggtatataaggaaggtaacagggtcagtgctacgcttcaaccgcctattattacccctggttttacccaaggtactcaatttattcaggctgagtcgacctggggcctatagacattttaaaaatgtttagttgctcttgccggcggtgagatttgaaccccggactaccagcacgcgagtcaagcatatactaccgccttagaaggcaaattaccgtatactaccgcccgttgaataagttaaaatctacttttggtatttgaactttccagggaatagactggaatatgtttgtagaaatggctgtcattttgatgtatatcgtcttcaaatcgatttatgcgttcattgaatggtacgtttgtaaggtagtaatttgaatacagatttggagagtttttgcttattaaactggttatgaaggagttttcatttgcactgagatagttgttggtacaacattgaaaaatgttgccttccaagaattaattgcggttctcctgctcagacttgaaggctgctatactttgtttaacgttaagaacaaaacattgcgcttatggagatcagtgttgccaaacctctcgggcacgggtggctatactcgactgccgatatacgattcattctactcgtacggcgtggcatcggcgcgcttctatcgtccataagaaatacattgcactatctaaggcgcgttccgtttttatcgtgaaacgctctataattgggcgtagctctgaaagctccgaaaactatgtgcaatgttgtggattggatgatatccagttggttaagttaacttttaatagcagtttcgtagcatatacatccataatctaatttacttctaattggagattgatataatcgtagaagaatggttgtgtctgcaccccatttgtgattagaaaggattttatagtccttttactaacagtatttttattagaataaacgatgaaaatcagtagaactgatacaccgtatgttcgaatattttgaaaaagaatactgctggtaaacccagtttaggtttgttcaattaaaacacatctttgacccagaaaaaattgattggcaaatatatctacaattaattaccactacaactaaggcacatatctcattatttgaccaaccgatgtataccctgctttaagaattcttgtgagtgttggtagaagaactgttttacggcattttgtatttctccgtccgactgcaaacgatattaccttgaacgcctttttcggtagacaaaacatgtgaaaatcgcaatgccataaatctgaactatagggtggatgctctaatatcctctatttatttcgttgtagattttctttcactactttggcaacatgaggccgagcattgtcgtgtagaagaatgaccccacgtgagagcttcctcatggcgtaacagaggccccccgcagcgtgaagcttgcgggggccccatcttgtcgtctgatattatgtaaaatctgttacagg

SEQ ID NO: 1954 - DNA, 3032 bp, Diabrotica virgifera
  SmartBlast Evalue=4E-21; Info=Putative uncharacterized transposon-derived protein F52C9.6 (Fragment) n=2 Tax= Camponotus floridanus RepID=E2ALS0_9HYME
gcgccctggtctatagggagtaagcattttgacaggtattattatactcaattttaaatttagtataaaatctaaactagaactacaaaaacagaaactggaagtaaattttttgaaaatttttacttatctggaatataaatagcatctgacttcattatcatcaatagtgttattacaactcttcttaagtccttgcgcgtatactattgccttccatatttgtgggtctgtgccactatttcccattttctccagatgtcctccgactggatcttttcacctttttctgggccgtcctgcagacattttcccatatggtcttttccaaaacacattgtttataaggcgattgtcattactccgtatcacatgtcctgtccatcttagtctattggccgttatatatcttactagatttatctttccgaagagtcattctaactcgttgttatgtctgcgcctccattcttttgtcatgctatctctgcaggggccaaatattactcgaaggattttactttagcataccaacaatttatttatttatttttttgttagcgtccatatttcttttccatacgcgacagctggtcgtattatggtttttatatcttgatttttgcacctcttgagagaagttttgacctcatgagatgttgcaatcatcagggaaataaattaatacaaaaattaaagatatttgtacaaactccaaacattaggttatttattgaaaaagtgactagattcacttcacaacattccaatatagtaaaacaatgttcatcaacaacgtccttaaaatttcaataagtatacaatatagtgctataaaagtttaacgcttgttgtaaaatccaatattttaatcaaatttatatagttttcttaataaaacaatatgaataagtgttaatcatttacatgactcaatatttcttgtcagcttatgttaatatgggtttttattaatgtttttggtttgaaaatggaatgttttgtattgtagggattttcatgttatttggcagtttttgttgctgctttatcagccgcctcattctccattatccatgtttttggtatccctatgggatggtacccataataatattttgtttttgtcacgtgtttgggcattatataatacctgtcttttatttgtgttcaattcccatgagtaggatacatttgtttgaccccactgaagacacccagagaatctgatataataagaaaatttatatcagatatattgttgatacattggtttagtgcgttggtgattacttgcagttctccagtatatgctacactccttggctaggcgggtgacagaggtactatcttcgaaaatagctgcagcagctataccactgctgcttttggaggcatcagtaaaaattattttgaaataaagatatctatagatggtagacaggaattgttgttttatttcagaagaattgtgtgaatgtttgggatagttgaataagttgataataatagtctcccgttttataccgctcacgcggctttgggattatatcagggtagtctgctatatctagggcctacggtatataaggaaggtaacagggtcagtgctacgcttcaaccgcctattattacccctggttttacccaaggtactcactttattcaggctgagtcgacctggggcctatagacattttaaaaatgtttagttgttcttgccggcggtgagatttgaaccccggactaccagcacgcgagtcaagcatatactaccgccttagaaggcaaattaccgcatactaccgcccgttgaataagttaaaatctacttttggtatttgaactttccagggaatagactggaatatgtttgtagaaatggctgtcattttgatgtatatcgtcttcaaatcgatttatgcgttcattgaatggtacgtttgtaaggtagtaatttgaatacagatttggagagtttttgcttattaaactggttatgaaggagttttcatttgcactgagatagttgttggtacaacattgaaaaatgttgccttccaagaattaattgcggttctcctgctcagacttgaaggctgctatactttgtttaacgttaagaacaaaacattgcgcttatggagatcagtgttgccaaacctctcgggcacgggtggctatactcgactgccgatatacgattcattctactcgtacggcgtggcatcggcgcgcttctatcgtccataagaaatacattgcactatctaaggcgcgttccgtttttatgtgcaatgttgtggattggatgatatccagttggttaagttaacttttaatagcagtttcgtagcatatacatccataatctaatttacttctaattggagattgatataatcgtagaagaatggttgtgtctgcaccccatttgtgattagaaaggattttatagtccttttactaacagtatttttattagaataaacgatgaaaatcagtagaactgatacaccgtatgttcgaatattttgaaaaagaatactgctggtaaacccagtttaggtttgttcaattaaaacacatctttgacccagaaaaaattgattggcaaatatatctacaattaattaccactacaactaaggcacatatctcattatttgaccaaccgatgtataccctgctttaagaattcttgtgagtgttggtagaagaactgttttacggcattttgtatttctccgtccgactgcaaacgatattaccttgaacgcctttttcggtagacaaaacatgtgaaaatcgcaatgccataaatctgaactatagggtggatgctctaatatcctctatttatttcgttgtagattttctttcactactttggcaacatgaggccgagcattgtcgtgtagaagaatgaccccacgtgagagcttcctcatggcgtaacagaggccccccgcagcgtgaagcttgcgggggccccatcttgtcgtctgatattatgtaaaatctgttacagg

SEQ ID NO: 1955 - DNA, 3032 bp, Diabrotica virgifera
  SmartBlast Evalue=4E-21; Info=Putative uncharacterized transposon-derived protein F52C9.6 (Fragment) n=2 Tax= Camponotus floridanus RepID=E2ALS0_9HYME
gcgccctggtctatagggagtaagcattttgacaggtattattatactcaattttaaatttagtataaaatctaaactagaactacaaaaacagaaactggaagtaaattttttgaaaatttttacttatctggaatataaatagcatctgacttcattatcatcaatagtgttattacaactcttcttaagtccttgcgcgtatactattgccttccatatttgtgggtctgtgccactatttcccattttctccagatgtcctccgactggatcttttcacctttttctgggccgtcctgcagacattttcccatatggtcttttccaaaacacattgtttataaggcgattgtcattactccgtatcacatgtcctgtccatcttagtctattggccgttatatatcttactagatttatctttccgaagagtcattctaactcgttgttatgtctgcgcctccattcttttgtcatgctatctctgcaggggccaaatattactcgaaggattttactttagcataccaacaatttatttatttatttttttgttagcgtccatatttcttttccatacgcgacagctggtcgtattatggtttttatatcttgatttttgcacctcttgagagaagttttgacctcatgagatgttgcaatcatcagggaaataaattaatacaaaaattaaagatatttgtacaaactccaaacattaggttatttattgaaaaagtgactagattcacttcacaacattccaatatagtaaaacaatgttcatcaacaacgtccttaaaatttcaataagtatacaatatagtgctataaaagtttaacgcttgttgtaaaatccaatattttaatcaaatttatatagttttcttaataaaacaatatgaataagtgttaatcatttacatgactcaatatttcttgtcagcttatgttaatatgggtttttattaatgtttttggtttgaaaatggaatgttttgtattgtagggattttcatgttatttggcagtttttgttgctgctttatcagccgcctcattctccattatccatgtttttggtatccctatgggatggtacccataataatattttgtttttgtcacgtgtttgggcattatataatacctgtcttttatttgtgttcaattcccatgagtaggatacatttgtttgaccccactgaagacacccagagaatctgatataataagaaaatttatatcagatatattgttgatacattggtttagtgcgttggtgattacttgcagttctccagtatatgctacactccttggctaggcgggtgacagaggtactatcttcgaaaatagctgcagcagctataccactgctgcttttggaggcatcagtaaaaattattttgaaataaagatatctatagatggtagacaggaattgttgttttatttcagaagaattgtgtgaatgtttgggatagttgaataagttgataataatagtctcccgttttataccgctcacgcggctttgagattatatcagggtagtctgctatatctagggcctacggtatataaggaaggtaacagggtcagtgctacgcttcaaccgcctattattacccctggttttacccaaggtactcaatttattcaggctgagtcgacctggggcctatagacattttaaaaatgtttagttgctcttgccggcggtgagatttgaaccccggactaccagcacgcgagtcaagcatatactaccgccttagaaggcaaattaccgtatactaccgcccgttgaataagttaaaatctacttttggtatttgaactttccagggaatagactggaatatgtttgtagaaatggctgtcattttgatgtatatcgtcttcaaatcgatttatgcgttcattgaatggtacgtttgtaaggtagtaatttgaatacagatttggagagtttttgcttattaaactggttatgaaggagttttcatttgcactgagatagttgttggtacaacattgaaaaatgttgccttccaagaattaattgcggttctcctgctcagacttgaaggctgctatactttgtttaacgttaagaacaaaacattgcgcttatggagatcagtgttgccaaacctctcgggcacgggtggctatactcgactgccgatatacgattcattctactcgtacggcgtggcatcggcgcgcttctatcgtccataagaaatacattgcactatctaaggcgcgttccgtttttatgtgcaatgttgtggattggatgatatccagttggttaagttaacttttaatagcagtttcgtagcatatacatccataatctaatttacttctaattggagattgatataatcgtagaagaatggttgtgtctgcaccccatttgtgattagaaaggattttatagtccttttactaacagtatttttattagaataaacgatgaaaatcagtagaactgatacaccgtatgttcgaatattttgaaaaagaatactgctggtaaacccagtttaggtttgttcaattaaaacacatctttgacccagaaaaaattgattggcaaatatatctacaattaattaccactacaactaaggcacatatctcattatttgaccaaccgatgtataccctgctttaagaattcttgtgagtgttggtagaagaactgttttacggcattttgtatttctccgtccgactgcaaacgatattaccttgaacgcctttttcggtagacaaaacatgtgaaaatcgcaatgccataaatctgaactatagggtggatgctctaatatcctctatttatttcgttgtagattttctttcactactttggcaacatgaggccgagcattgtcgtgtagaagaatgaccccacgtgagagcttcctcatggcgtaacagaggccccccgcagcgtgaagcttgcgggggccccatcttgtcgtctgatattatgtaaaatctgttacagg

SEQ ID NO: 1956 - DNA, 4483 bp, Diabrotica virgifera
  SmartBlast Evalue=8E-79; Info=Calcyphosine-like protein n=1 Tax= Manduca sexta RepID=Q9U506_MANSE
gcgccctggtctatagggagtaagcattttgacaggtattattatactcaattttaaatttagtataaaatctaaactagaactacaaaaacagaaactggaagtaaattttttgaaaatttttacttatctggaatataaatagcatctgacttcattatcatcaatagtgttattacaactcttcttaagtccttgcgcgtatactattgccttccatatttgtgggtctgtgccactatttcccattttctccagatgtcctccgactggatcttttcacctttttctgggccgtcctgcagacattttcccatatggtcttttccaaaacacattgtttataaggcgattgtcattactccgtatcacatgtcctgtccatcttagtctattggccgttatatatcttactagatttatctttccgaagagtcattctaactcgttgttatgtctgcgcctccattcttttgtcatgctatctctgcaggggccaaatattactcgaaggattttactttagcataccaacaatttatttatttatttttttgttagcgtccatatttcttttccatacgcgacagctggtcgtattatggtttttatatcttgatttttgcacctcttgagagaagttttgacctcatgagatgttgcaatcatcagggaaataaattaatacaaaaattaaagatatttgtacaaactccaaacattaggttatttattgaaaaagtgactagattcacttcacaacattccaatatagtaaaacaatgttcatcaacaacgtccttaaaatttcaataagtatacaatatagtgctataaaagtttaacgcttgttgtaaaatccaatattttaatcaaatttatatagttttcttaataaaacaatatgaataagtgttaatcatttacatgactcaatatttcttgtcagcttatgttaatatgggtttttattaatgtttttggtttgaaaatggaatgttttgtattgtagggattttcatgttatttggcagtttttgttgctgctttatcagccgcctcattctccattatccatgtttttggtatccctatgggatggtacccataataatattttgtttttgtcacgtgtttgggcattatataatacctgtcttttatttgtgttcaattcccatgagtaggatacatttgtttgaccccactgaagacacccagagaatctgatataataagaaaatttatatcagatatattgttgatacattggtttagtgcgttggtgattacttgcagttctccagtatatgctacactccttggctaggcgggtgacagaggtactatcttcgaaaatagctgcagcagctataccactgctgcttttggaggcatcagtaaaaattattttgaaataaagatatctatagatggtagacaggaattgttgttttatttcagaagaattgtgtgaatgtttgggatagttgaataagttgataataatagtctcccgttttataccgctcacgcggctttgggattatatcagggtagtctgctatatctagggcctacggtatataaggaaggtaacagggtcagtgctacgcttcaaccgcctattattacccctggttttacccaaggtactcactttattcaggctgagtcgacctggggcctatagacattttaaaaatgtttagttgttcttgccggcggtgagatttgaaccccggactaccagcacgcgagtcaagcatatactaccgccttagaaggcaaattaccgcatactaccgcccgttgaataagttaaaatctacttttggtatttgaactttccagggaatagactggaatatgtttgtagaaatggctgtcattttgatgtatatcgtcttcaaatcgatttatgcgttcattgaatggtacgtttgtaaggtagtaatttgaatacagatttggagagtttttgcttattaaactggttatgaaggagttttcatttgcactgagatagttgttggtacaacattgaaaaatgttgccttccaagaattaattgcggttctcctgctcagacttgaaggctgctatactttgtttaacgttaagaacaaaacattgcgcttatggagatcagtgttgccaaacctctcgggcacgggtggctatactcgactgccgatatacgattcattctactcgtacggcgtggcatcggcgcgcttctatcgtccataagaaatacattgcactatctaaggcgcgttccgtttttatcgtgaaacgctctataattgggcgtagctctgaaagctccgaaaactatgtgcaatgttgtggattggatgatatccagttggttaagttaacttttaatagcagtttcgtagcatatacatccataatctaatttacttctaattggagattgatataatcgtagaagaatggttgtgtctgcaccccatttgtgattagaaaggattttatagtccttttactaacagtatttttattagaataaacgatgaaaatcagtagaactgatacaccgtatgttcgaatattttgaaaaagaatactgctggtaaacccagtttaggtttgttcaattaaaacacatctttgacccagaaaaaattgattggcaaatatatctacaattaattaccactacaactaaggcacatatctcattatttgaccaaccgatgtataccctgctttaagaattcttgtgagtgttggtagaagaactgttttacggcattttgtatttctccgtccgactgcaaacgatattaccttgaacgcctttttcggtagacaaaacatgtgaaaatcgcaatgccataaatctgaactatagggtggatgctctaatatcctctatttatttcgttgtagattttctttcactactttggcaacatgaggccgagcattgtcgtgtagaagaatgacaccacgtgagagcttcctcatggcgtaacagaggcctccgcagcgtgaagcttgcgggggccccaatcgagcaggggccccatcttgtcgtctgatattatgtaaaatctgttataggtatatgattttactttgtgtgtttaaatttaaaaacgtaaatttctaaataggcgtattcggcaagtgaatcatctcatatctagaaacttaatcctttccggtttcacgaacttttatgggtgacgacaataaactataatgctttgtacgtgactattgaaagatttgagaattgcaattttagaacaatatttctaaatctagaaatgggttttctctttacctacgtttagtatttcgatacaattatctggacattttcgtgtgaaactgatcagtgccacatttacaagcataactaacatggcacaacgtcagtttggtgattacaattgtttccaaagctaacctggccaaagatgagtttcaattattgaacaagcgtatattttaactatataaaatagataaaatttaatgtggactattttttatatttagtactttttgttttgttttctggccttggtttagttagaaccttttaccacaactttaatataatttatttttaggacttaaaataaagtaagatttaaaatattggatctaacattttatatagtcttttataacgttggccatattacatttattcttaaaaatatagttaaagagaacaagcaaatacatttcgatgtcaaatacttcaaaaacaaacaatttataacttataagcttgtcgcatcattaaatcgaaataacaatcattgtcgatcgaggcacttattccagaatagtaattcaaaaattcttcgcgtgtgacctttccatctctggtcgagtcggtttcgaaatttcctaaaaatctagtgaggatggattcttctgtttcttctcctgagatgtagcgggggtgcgctttcacgttgtagacatttttcaaatcgtcgattgttatttcgccgtctccagtcttgtccagtttctggaatgcttcgtctatgacttttttgcgggtttcgcttagtggtggtcttatatgaactaaaaattcatctatattcacgctaccatctccattcgtatcaaatttctgaaacatctcctgggcttcttctccacttaaatctaatcctacttctttaaggccatgtaaaaactcttctttatttaagtttttattgccgtcatcatccattattctaaataaccttccaagtcctaagattccggtagctcctctagataaacatatcagcctaagacgttggacgggatctcctccgttgccaagcgcttgaagttctcgcatactttttgaagccatttctgtttcttgccttgacgtggcactttggggtcgaagcattcttctactcatcctggctaattcacggattttcttgcacggaaaactgatgctctgaacccgctagtagag

SEQ ID NO: 1957 - DNA, 4483 bp, Diabrotica virgifera
  SmartBlast Evalue=8E-79; Info=Calcyphosine-like protein n=1 Tax= Manduca sexta RepID=Q9U506_MANSE
gcgccctggtctatagggagtaagcattttgacaggtattattatactcaattttaaatttagtataaaatctaaactagaactacaaaaacagaaactggaagtaaattttttgaaaatttttacttatctggaatataaatagcatctgacttcattatcatcaatagtgttattacaactcttcttaagtccttgcgcgtatactattgccttccatatttgtgggtctgtgccactatttcccattttctccagatgtcctccgactggatcttttcacctttttctgggccgtcctgcagacattttcccatatggtcttttccaaaacacattgtttataaggcgattgtcattactccgtatcacatgtcctgtccatcttagtctattggccgttatatatcttactagatttatctttccgaagagtcattctaactcgttgttatgtctgcgcctccattcttttgtcatgctatctctgcaggggccaaatattactcgaaggattttactttagcataccaacaatttatttatttatttttttgttagcgtccatatttcttttccatacgcgacagctggtcgtattatggtttttatatcttgatttttgcacctcttgagagaagttttgacctcatgagatgttgcaatcatcagggaaataaattaatacaaaaattaaagatatttgtacaaactccaaacattaggttatttattgaaaaagtgactagattcacttcacaacattccaatatagtaaaacaatgttcatcaacaacgtccttaaaatttcaataagtatacaatatagtgctataaaagtttaacgcttgttgtaaaatccaatattttaatcaaatttatatagttttcttaataaaacaatatgaataagtgttaatcatttacatgactcaatatttcttgtcagcttatgttaatatgggtttttattaatgtttttggtttgaaaatggaatgttttgtattgtagggattttcatgttatttggcagtttttgttgctgctttatcagccgcctcattctccattatccatgtttttggtatccctatgggatggtacccataataatattttgtttttgtcacgtgtttgggcattatataatacctgtcttttatttgtgttcaattcccatgagtaggatacatttgtttgaccccactgaagacacccagagaatctgatataataagaaaatttatatcagatatattgttgatacattggtttagtgcgttggtgattacttgcagttctccagtatatgctacactccttggctaggcgggtgacagaggtactatcttcgaaaatagctgcagcagctataccactgctgcttttggaggcatcagtaaaaattattttgaaataaagatatctatagatggtagacaggaattgttgttttatttcagaagaattgtgtgaatgtttgggatagttgaataagttgataataatagtctcccgttttataccgctcacgcggctttgagattatatcagggtagtctgctatatctagggcctacggtatataaggaaggtaacagggtcagtgctacgcttcaaccgcctattattacccctggttttacccaaggtactcaatttattcaggctgagtcgacctggggcctatagacattttaaaaatgtttagttgctcttgccggcggtgagatttgaaccccggactaccagcacgcgagtcaagcatatactaccgccttagaaggcaaattaccgtatactaccgcccgttgaataagttaaaatctacttttggtatttgaactttccagggaatagactggaatatgtttgtagaaatggctgtcattttgatgtatatcgtcttcaaatcgatttatgcgttcattgaatggtacgtttgtaaggtagtaatttgaatacagatttggagagtttttgcttattaaactggttatgaaggagttttcatttgcactgagatagttgttggtacaacattgaaaaatgttgccttccaagaattaattgcggttctcctgctcagacttgaaggctgctatactttgtttaacgttaagaacaaaacattgcgcttatggagatcagtgttgccaaacctctcgggcacgggtggctatactcgactgccgatatacgattcattctactcgtacggcgtggcatcggcgcgcttctatcgtccataagaaatacattgcactatctaaggcgcgttccgtttttatcgtgaaacgctctataattgggcgtagctctgaaagctccgaaaactatgtgcaatgttgtggattggatgatatccagttggttaagttaacttttaatagcagtttcgtagcatatacatccataatctaatttacttctaattggagattgatataatcgtagaagaatggttgtgtctgcaccccatttgtgattagaaaggattttatagtccttttactaacagtatttttattagaataaacgatgaaaatcagtagaactgatacaccgtatgttcgaatattttgaaaaagaatactgctggtaaacccagtttaggtttgttcaattaaaacacatctttgacccagaaaaaattgattggcaaatatatctacaattaattaccactacaactaaggcacatatctcattatttgaccaaccgatgtataccctgctttaagaattcttgtgagtgttggtagaagaactgttttacggcattttgtatttctccgtccgactgcaaacgatattaccttgaacgcctttttcggtagacaaaacatgtgaaaatcgcaatgccataaatctgaactatagggtggatgctctaatatcctctatttatttcgttgtagattttctttcactactttggcaacatgaggccgagcattgtcgtgtagaagaatgacaccacgtgagagcttcctcatggcgtaacagaggcctccgcagcgtgaagcttgcgggggccccaatcgagcaggggccccatcttgtcgtctgatattatgtaaaatctgttataggtatatgattttactttgtgtgtttaaatttaaaaacgtaaatttctaaataggcgtattcggcaagtgaatcatctcatatctagaaacttaatcctttccggtttcacgaacttttatgggtgacgacaataaactataatgctttgtacgtgactattgaaagatttgagaattgcaattttagaacaatatttctaaatctagaaatgggttttctctttacctacgtttagtatttcgatacaattatctggacattttcgtgtgaaactgatcagtgccacatttacaagcataactaacatggcacaacgtcagtttggtgattacaattgtttccaaagctaacctggccaaagatgagtttcaattattgaacaagcgtatattttaactatataaaatagataaaatttaatgtggactattttttatatttagtactttttgttttgttttctggccttggtttagttagaaccttttaccacaactttaatataatttatttttaggacttaaaataaagtaagatttaaaatattggatctaacattttatatagtcttttataacgttggccatattacatttattcttaaaaatatagttaaagagaacaagcaaatacatttcgatgtcaaatacttcaaaaacaaacaatttataacttataagcttgtcgcatcattaaatcgaaataacaatcattgtcgatcgaggcacttattccagaatagtaattcaaaaattcttcgcgtgtgacctttccatctctggtcgagtcggtttcgaaatttcctaaaaatctagtgaggatggattcttctgtttcttctcctgagatgtagcgggggtgcgctttcacgttgtagacatttttcaaatcgtcgattgttatttcgccgtctccagtcttgtccagtttctggaatgcttcgtctatgacttttttgcgggtttcgcttagtggtggtcttatatgaactaaaaattcatctatattcacgctaccatctccattcgtatcaaatttctgaaacatctcctgggcttcttctccacttaaatctaatcctacttctttaaggccatgtaaaaactcttctttatttaagtttttattgccgtcatcatccattattctaaataaccttccaagtcctaagattccggtagctcctctagataaacatatcagcctaagacgttggacgggatctcctccgttgccaagcgcttgaagttctcgcatactttttgaagccatttctgtttcttgccttgacgtggcactttggggtcgaagcattcttctactcatcctggctaattcacggattttcttgcacggaaaactgatgctctgaacccgctagtagag

SEQ ID NO: 1958 - DNA, 4434 bp, Diabrotica virgifera
  SmartBlast Evalue=8E-79; Info=Calcyphosine-like protein n=1 Tax= Manduca sexta RepID=Q9U506_MANSE
gcgccctggtctatagggagtaagcattttgacaggtattattatactcaattttaaatttagtataaaatctaaactagaactacaaaaacagaaactggaagtaaattttttgaaaatttttacttatctggaatataaatagcatctgacttcattatcatcaatagtgttattacaactcttcttaagtccttgcgcgtatactattgccttccatatttgtgggtctgtgccactatttcccattttctccagatgtcctccgactggatcttttcacctttttctgggccgtcctgcagacattttcccatatggtcttttccaaaacacattgtttataaggcgattgtcattactccgtatcacatgtcctgtccatcttagtctattggccgttatatatcttactagatttatctttccgaagagtcattctaactcgttgttatgtctgcgcctccattcttttgtcatgctatctctgcaggggccaaatattactcgaaggattttactttagcataccaacaatttatttatttatttttttgttagcgtccatatttcttttccatacgcgacagctggtcgtattatggtttttatatcttgatttttgcacctcttgagagaagttttgacctcatgagatgttgcaatcatcagggaaataaattaatacaaaaattaaagatatttgtacaaactccaaacattaggttatttattgaaaaagtgactagattcacttcacaacattccaatatagtaaaacaatgttcatcaacaacgtccttaaaatttcaataagtatacaatatagtgctataaaagtttaacgcttgttgtaaaatccaatattttaatcaaatttatatagttttcttaataaaacaatatgaataagtgttaatcatttacatgactcaatatttcttgtcagcttatgttaatatgggtttttattaatgtttttggtttgaaaatggaatgttttgtattgtagggattttcatgttatttggcagtttttgttgctgctttatcagccgcctcattctccattatccatgtttttggtatccctatgggatggtacccataataatattttgtttttgtcacgtgtttgggcattatataatacctgtcttttatttgtgttcaattcccatgagtaggatacatttgtttgaccccactgaagacacccagagaatctgatataataagaaaatttatatcagatatattgttgatacattggtttagtgcgttggtgattacttgcagttctccagtatatgctacactccttggctaggcgggtgacagaggtactatcttcgaaaatagctgcagcagctataccactgctgcttttggaggcatcagtaaaaattattttgaaataaagatatctatagatggtagacaggaattgttgttttatttcagaagaattgtgtgaatgtttgggatagttgaataagttgataataatagtctcccgttttataccgctcacgcggctttgggattatatcagggtagtctgctatatctagggcctacggtatataaggaaggtaacagggtcagtgctacgcttcaaccgcctattattacccctggttttacccaaggtactcactttattcaggctgagtcgacctggggcctatagacattttaaaaatgtttagttgttcttgccggcggtgagatttgaaccccggactaccagcacgcgagtcaagcatatactaccgccttagaaggcaaattaccgcatactaccgcccgttgaataagttaaaatctacttttggtatttgaactttccagggaatagactggaatatgtttgtagaaatggctgtcattttgatgtatatcgtcttcaaatcgatttatgcgttcattgaatggtacgtttgtaaggtagtaatttgaatacagatttggagagtttttgcttattaaactggttatgaaggagttttcatttgcactgagatagttgttggtacaacattgaaaaatgttgccttccaagaattaattgcggttctcctgctcagacttgaaggctgctatactttgtttaacgttaagaacaaaacattgcgcttatggagatcagtgttgccaaacctctcgggcacgggtggctatactcgactgccgatatacgattcattctactcgtacggcgtggcatcggcgcgcttctatcgtccataagaaatacattgcactatctaaggcgcgttccgtttttatgtgcaatgttgtggattggatgatatccagttggttaagttaacttttaatagcagtttcgtagcatatacatccataatctaatttacttctaattggagattgatataatcgtagaagaatggttgtgtctgcaccccatttgtgattagaaaggattttatagtccttttactaacagtatttttattagaataaacgatgaaaatcagtagaactgatacaccgtatgttcgaatattttgaaaaagaatactgctggtaaacccagtttaggtttgttcaattaaaacacatctttgacccagaaaaaattgattggcaaatatatctacaattaattaccactacaactaaggcacatatctcattatttgaccaaccgatgtataccctgctttaagaattcttgtgagtgttggtagaagaactgttttacggcattttgtatttctccgtccgactgcaaacgatattaccttgaacgcctttttcggtagacaaaacatgtgaaaatcgcaatgccataaatctgaactatagggtggatgctctaatatcctctatttatttcgttgtagattttctttcactactttggcaacatgaggccgagcattgtcgtgtagaagaatgacaccacgtgagagcttcctcatggcgtaacagaggcctccgcagcgtgaagcttgcgggggccccaatcgagcaggggccccatcttgtcgtctgatattatgtaaaatctgttataggtatatgattttactttgtgtgtttaaatttaaaaacgtaaatttctaaataggcgtattcggcaagtgaatcatctcatatctagaaacttaatcctttccggtttcacgaacttttatgggtgacgacaataaactataatgctttgtacgtgactattgaaagatttgagaattgcaattttagaacaatatttctaaatctagaaatgggttttctctttacctacgtttagtatttcgatacaattatctggacattttcgtgtgaaactgatcagtgccacatttacaagcataactaacatggcacaacgtcagtttggtgattacaattgtttccaaagctaacctggccaaagatgagtttcaattattgaacaagcgtatattttaactatataaaatagataaaatttaatgtggactattttttatatttagtactttttgttttgttttctggccttggtttagttagaaccttttaccacaactttaatataatttatttttaggacttaaaataaagtaagatttaaaatattggatctaacattttatatagtcttttataacgttggccatattacatttattcttaaaaatatagttaaagagaacaagcaaatacatttcgatgtcaaatacttcaaaaacaaacaatttataacttataagcttgtcgcatcattaaatcgaaataacaatcattgtcgatcgaggcacttattccagaatagtaattcaaaaattcttcgcgtgtgacctttccatctctggtcgagtcggtttcgaaatttcctaaaaatctagtgaggatggattcttctgtttcttctcctgagatgtagcgggggtgcgctttcacgttgtagacatttttcaaatcgtcgattgttatttcgccgtctccagtcttgtccagtttctggaatgcttcgtctatgacttttttgcgggtttcgcttagtggtggtcttatatgaactaaaaattcatctatattcacgctaccatctccattcgtatcaaatttctgaaacatctcctgggcttcttctccacttaaatctaatcctacttctttaaggccatgtaaaaactcttctttatttaagtttttattgccgtcatcatccattattctaaataaccttccaagtcctaagattccggtagctcctctagataaacatatcagcctaagacgttggacgggatctcctccgttgccaagcgcttgaagttctcgcatactttttgaagccatttctgtttcttgccttgacgtggcactttggggtcgaagcattcttctactcatcctggctaattcacggattttcttgcacggaaaactgatgctctgaacccgctagtagag

SEQ ID NO: 1959 - DNA, 4434 bp, Diabrotica virgifera
  SmartBlast Evalue=8E-79; Info=Calcyphosine-like protein n=1 Tax= Manduca sexta RepID=Q9U506_MANSE
gcgccctggtctatagggagtaagcattttgacaggtattattatactcaattttaaatttagtataaaatctaaactagaactacaaaaacagaaactggaagtaaattttttgaaaatttttacttatctggaatataaatagcatctgacttcattatcatcaatagtgttattacaactcttcttaagtccttgcgcgtatactattgccttccatatttgtgggtctgtgccactatttcccattttctccagatgtcctccgactggatcttttcacctttttctgggccgtcctgcagacattttcccatatggtcttttccaaaacacattgtttataaggcgattgtcattactccgtatcacatgtcctgtccatcttagtctattggccgttatatatcttactagatttatctttccgaagagtcattctaactcgttgttatgtctgcgcctccattcttttgtcatgctatctctgcaggggccaaatattactcgaaggattttactttagcataccaacaatttatttatttatttttttgttagcgtccatatttcttttccatacgcgacagctggtcgtattatggtttttatatcttgatttttgcacctcttgagagaagttttgacctcatgagatgttgcaatcatcagggaaataaattaatacaaaaattaaagatatttgtacaaactccaaacattaggttatttattgaaaaagtgactagattcacttcacaacattccaatatagtaaaacaatgttcatcaacaacgtccttaaaatttcaataagtatacaatatagtgctataaaagtttaacgcttgttgtaaaatccaatattttaatcaaatttatatagttttcttaataaaacaatatgaataagtgttaatcatttacatgactcaatatttcttgtcagcttatgttaatatgggtttttattaatgtttttggtttgaaaatggaatgttttgtattgtagggattttcatgttatttggcagtttttgttgctgctttatcagccgcctcattctccattatccatgtttttggtatccctatgggatggtacccataataatattttgtttttgtcacgtgtttgggcattatataatacctgtcttttatttgtgttcaattcccatgagtaggatacatttgtttgaccccactgaagacacccagagaatctgatataataagaaaatttatatcagatatattgttgatacattggtttagtgcgttggtgattacttgcagttctccagtatatgctacactccttggctaggcgggtgacagaggtactatcttcgaaaatagctgcagcagctataccactgctgcttttggaggcatcagtaaaaattattttgaaataaagatatctatagatggtagacaggaattgttgttttatttcagaagaattgtgtgaatgtttgggatagttgaataagttgataataatagtctcccgttttataccgctcacgcggctttgagattatatcagggtagtctgctatatctagggcctacggtatataaggaaggtaacagggtcagtgctacgcttcaaccgcctattattacccctggttttacccaaggtactcaatttattcaggctgagtcgacctggggcctatagacattttaaaaatgtttagttgctcttgccggcggtgagatttgaaccccggactaccagcacgcgagtcaagcatatactaccgccttagaaggcaaattaccgtatactaccgcccgttgaataagttaaaatctacttttggtatttgaactttccagggaatagactggaatatgtttgtagaaatggctgtcattttgatgtatatcgtcttcaaatcgatttatgcgttcattgaatggtacgtttgtaaggtagtaatttgaatacagatttggagagtttttgcttattaaactggttatgaaggagttttcatttgcactgagatagttgttggtacaacattgaaaaatgttgccttccaagaattaattgcggttctcctgctcagacttgaaggctgctatactttgtttaacgttaagaacaaaacattgcgcttatggagatcagtgttgccaaacctctcgggcacgggtggctatactcgactgccgatatacgattcattctactcgtacggcgtggcatcggcgcgcttctatcgtccataagaaatacattgcactatctaaggcgcgttccgtttttatgtgcaatgttgtggattggatgatatccagttggttaagttaacttttaatagcagtttcgtagcatatacatccataatctaatttacttctaattggagattgatataatcgtagaagaatggttgtgtctgcaccccatttgtgattagaaaggattttatagtccttttactaacagtatttttattagaataaacgatgaaaatcagtagaactgatacaccgtatgttcgaatattttgaaaaagaatactgctggtaaacccagtttaggtttgttcaattaaaacacatctttgacccagaaaaaattgattggcaaatatatctacaattaattaccactacaactaaggcacatatctcattatttgaccaaccgatgtataccctgctttaagaattcttgtgagtgttggtagaagaactgttttacggcattttgtatttctccgtccgactgcaaacgatattaccttgaacgcctttttcggtagacaaaacatgtgaaaatcgcaatgccataaatctgaactatagggtggatgctctaatatcctctatttatttcgttgtagattttctttcactactttggcaacatgaggccgagcattgtcgtgtagaagaatgacaccacgtgagagcttcctcatggcgtaacagaggcctccgcagcgtgaagcttgcgggggccccaatcgagcaggggccccatcttgtcgtctgatattatgtaaaatctgttataggtatatgattttactttgtgtgtttaaatttaaaaacgtaaatttctaaataggcgtattcggcaagtgaatcatctcatatctagaaacttaatcctttccggtttcacgaacttttatgggtgacgacaataaactataatgctttgtacgtgactattgaaagatttgagaattgcaattttagaacaatatttctaaatctagaaatgggttttctctttacctacgtttagtatttcgatacaattatctggacattttcgtgtgaaactgatcagtgccacatttacaagcataactaacatggcacaacgtcagtttggtgattacaattgtttccaaagctaacctggccaaagatgagtttcaattattgaacaagcgtatattttaactatataaaatagataaaatttaatgtggactattttttatatttagtactttttgttttgttttctggccttggtttagttagaaccttttaccacaactttaatataatttatttttaggacttaaaataaagtaagatttaaaatattggatctaacattttatatagtcttttataacgttggccatattacatttattcttaaaaatatagttaaagagaacaagcaaatacatttcgatgtcaaatacttcaaaaacaaacaatttataacttataagcttgtcgcatcattaaatcgaaataacaatcattgtcgatcgaggcacttattccagaatagtaattcaaaaattcttcgcgtgtgacctttccatctctggtcgagtcggtttcgaaatttcctaaaaatctagtgaggatggattcttctgtttcttctcctgagatgtagcgggggtgcgctttcacgttgtagacatttttcaaatcgtcgattgttatttcgccgtctccagtcttgtccagtttctggaatgcttcgtctatgacttttttgcgggtttcgcttagtggtggtcttatatgaactaaaaattcatctatattcacgctaccatctccattcgtatcaaatttctgaaacatctcctgggcttcttctccacttaaatctaatcctacttctttaaggccatgtaaaaactcttctttatttaagtttttattgccgtcatcatccattattctaaataaccttccaagtcctaagattccggtagctcctctagataaacatatcagcctaagacgttggacgggatctcctccgttgccaagcgcttgaagttctcgcatactttttgaagccatttctgtttcttgccttgacgtggcactttggggtcgaagcattcttctactcatcctggctaattcacggattttcttgcacggaaaactgatgctctgaacccgctagtagag

SEQ ID NO: 1960 - DNA, 3618 bp, Diabrotica virgifera
  SmartBlast Evalue=5E-21; Info=Putative uncharacterized transposon-derived protein F52C9.6 (Fragment) n=2 Tax= Camponotus floridanus RepID=E2ALS0_9HYME
gcgccctggtctatagggagtaagcattttgacaggtattattatactcaattttaaatttagtataaaatctaaactagaactacaaaaacagaaactggaagtaaattttttgaaaatttttacttatctggaatataaatagcatctgacttcattatcatcaatagtgttattacaactcttcttaagtccttgcgcgtatactattgccttccatatttgtgggtctgtgccactatttcccattttctccagatgtcctccgactggatcttttcacctttttctgggccgtcctgcagacattttcccatatggtcttttccaaaacacattgtttataaggcgattgtcattactccgtatcacatgtcctgtccatcttagtctattggccgttatatatcttactagatttatctttccgaagagtcattctaactcgttgttatgtctgcgcctccattcttttgtcatgctatctctgcaggggccaaatattactcgaaggattttactttagcataccaacaatttatttatttatttttttgttagcgtccatatttcttttccatacgcgacagctggtcgtattatggtttttatatcttgatttttgcacctcttgagagaagttttgacctcatgagatgttgcaatcatcagggaaataaattaatacaaaaattaaagatatttgtacaaactccaaacattaggttatttattgaaaaagtgactagattcacttcacaacattccaatatagtaaaacaatgttcatcaacaacgtccttaaaatttcaataagtatacaatatagtgctataaaagtttaacgcttgttgtaaaatccaatattttaatcaaatttatatagttttcttaataaaacaatatgaataagtgttaatcatttacatgactcaatatttcttgtcagcttatgttaatatgggtttttattaatgtttttggtttgaaaatggaatgttttgtattgtagggattttcatgttatttggcagtttttgttgctgctttatcagccgcctcattctccattatccatgtttttggtatccctatgggatggtacccataataatattttgtttttgtcacgtgtttgggcattatataatacctgtcttttatttgtgttcaattcccatgagtaggatacatttgtttgaccccactgaagacacccagagaatctgatataataagaaaatttatatcagatatattgttgatacattggtttagtgcgttggtgattacttgcagttctccagtatatgctacactccttggctaggcgggtgacagaggtactatcttcgaaaatagctgcagcagctataccactgctgcttttggaggcatcagtaaaaattattttgaaataaagatatctatagatggtagacaggaattgttgttttatttcagaagaattgtgtgaatgtttgggatagttgaataagttgataataatagtctcccgttttataccgctcacgcggctttgggattatatcagggtagtctgctatatctagggcctacggtatataaggaaggtaacagggtcagtgctacgcttcaaccgcctattattacccctggttttacccaaggtactcactttattcaggctgagtcgacctggggcctatagacattttaaaaatgtttagttgttcttgccggcggtgagatttgaaccccggactaccagcacgcgagtcaagcatatactaccgccttagaaggcaaattaccgcatactaccgcccgttgaataagttaaaatctacttttggtatttgaactttccagggaatagactggaatatgtttgtagaaatggctgtcattttgatgtatatcgtcttcaaatcgatttatgcgttcattgaatggtacgtttgtaaggtagtaatttgaatacagatttggagagtttttgcttattaaactggttatgaaggagttttcatttgcactgagatagttgttggtacaacattgaaaaatgttgccttccaagaattaattgcggttctcctgctcagacttgaaggctgctatactttgtttaacgttaagaacaaaacattgcgcttatggagatcagtgttgccaaacctctcgggcacgggtggctatactcgactgccgatatacgattcattctactcgtacggcgtggcatcggcgcgcttctatcgtccataagaaatacattgcactatctaaggcgcgttccgtttttatcgtgaaacgctctataattgggcgtagctctgaaagctccgaaaactatgtgcaatgttgtggattggatgatatccagttggttaagttaacttttaatagcagtttcgtagcatatacatccataatctaatttacttctaattggagattgatataatcgtagaagaatggttgtgtctgcaccccatttgtgattagaaaggattttatagtccttttactaacagtatttttattagaataaacgatgaaaatcagtagaactgatacaccgtatgttcgaatattttgaaaaagaatactgctggtaaacccagtttaggtttgttcaattaaaacacatctttgacccagaaaaaattgattggcaaatatatctacaattaattaccactacaactaaggcacatatctcattatttgaccaaccgatgtataccctgctttaagaattcttgtgagtgttggtagaagaactgttttacggcattttgtatttctccgtccgactgcaaacgatattaccttgaacgcctttttcggtagacaaaacatgtgaaaatcgcaatgccataaatctgaactatagggtggatgctctaatatcctctatttatttcgttgtagattttctttcactactttggcaacatgaggccgagcattgtcgtgtagaagaatgacaccacgtgagagcttcctcatggcgtaacagaggcctccgcagcgtgaagcttgcgggggccccaatcgagcaggggccccatcttgtcgtctgatattatgtaaaatctgttataggtatatgattttactttgtgtgtttaaatttaaaaacgtaaatttctaaataggcgtattcggcaagtgaatcatctcatatctagaaacttaatcctttccggtttcacgaacttttatgggtgacgacaataaactataatgctttgtacgtaactattgaaagatttgagaattgcaatttgccgaattttagaacaatatttctaaatctagaaatggggtttctctttattatttacctacgtttagtatttcgatacaattatccagaagcgtaacagaggcccccgtagcaggaagggggctataccaataaagatgaaaaatgtaagtcgtcataaacaatgtatgaatacaccaatagctcagtaaatgacagttttggagtgaaattatcagcttcacgacggacgtattagcttgacaatttggatttaggttctagttacactccacttcaaagttggatttatgccgtaaattgttggatttatgttgtaaagtggatttatgctttta

SEQ ID NO: 1961 - DNA, 3618 bp, Diabrotica virgifera
  SmartBlast Evalue=5E-21; Info=Putative uncharacterized transposon-derived protein F52C9.6 (Fragment) n=2 Tax= Camponotus floridanus RepID=E2ALS0_9HYME
gcgccctggtctatagggagtaagcattttgacaggtattattatactcaattttaaatttagtataaaatctaaactagaactacaaaaacagaaactggaagtaaattttttgaaaatttttacttatctggaatataaatagcatctgacttcattatcatcaatagtgttattacaactcttcttaagtccttgcgcgtatactattgccttccatatttgtgggtctgtgccactatttcccattttctccagatgtcctccgactggatcttttcacctttttctgggccgtcctgcagacattttcccatatggtcttttccaaaacacattgtttataaggcgattgtcattactccgtatcacatgtcctgtccatcttagtctattggccgttatatatcttactagatttatctttccgaagagtcattctaactcgttgttatgtctgcgcctccattcttttgtcatgctatctctgcaggggccaaatattactcgaaggattttactttagcataccaacaatttatttatttatttttttgttagcgtccatatttcttttccatacgcgacagctggtcgtattatggtttttatatcttgatttttgcacctcttgagagaagttttgacctcatgagatgttgcaatcatcagggaaataaattaatacaaaaattaaagatatttgtacaaactccaaacattaggttatttattgaaaaagtgactagattcacttcacaacattccaatatagtaaaacaatgttcatcaacaacgtccttaaaatttcaataagtatacaatatagtgctataaaagtttaacgcttgttgtaaaatccaatattttaatcaaatttatatagttttcttaataaaacaatatgaataagtgttaatcatttacatgactcaatatttcttgtcagcttatgttaatatgggtttttattaatgtttttggtttgaaaatggaatgttttgtattgtagggattttcatgttatttggcagtttttgttgctgctttatcagccgcctcattctccattatccatgtttttggtatccctatgggatggtacccataataatattttgtttttgtcacgtgtttgggcattatataatacctgtcttttatttgtgttcaattcccatgagtaggatacatttgtttgaccccactgaagacacccagagaatctgatataataagaaaatttatatcagatatattgttgatacattggtttagtgcgttggtgattacttgcagttctccagtatatgctacactccttggctaggcgggtgacagaggtactatcttcgaaaatagctgcagcagctataccactgctgcttttggaggcatcagtaaaaattattttgaaataaagatatctatagatggtagacaggaattgttgttttatttcagaagaattgtgtgaatgtttgggatagttgaataagttgataataatagtctcccgttttataccgctcacgcggctttgagattatatcagggtagtctgctatatctagggcctacggtatataaggaaggtaacagggtcagtgctacgcttcaaccgcctattattacccctggttttacccaaggtactcaatttattcaggctgagtcgacctggggcctatagacattttaaaaatgtttagttgctcttgccggcggtgagatttgaaccccggactaccagcacgcgagtcaagcatatactaccgccttagaaggcaaattaccgtatactaccgcccgttgaataagttaaaatctacttttggtatttgaactttccagggaatagactggaatatgtttgtagaaatggctgtcattttgatgtatatcgtcttcaaatcgatttatgcgttcattgaatggtacgtttgtaaggtagtaatttgaatacagatttggagagtttttgcttattaaactggttatgaaggagttttcatttgcactgagatagttgttggtacaacattgaaaaatgttgccttccaagaattaattgcggttctcctgctcagacttgaaggctgctatactttgtttaacgttaagaacaaaacattgcgcttatggagatcagtgttgccaaacctctcgggcacgggtggctatactcgactgccgatatacgattcattctactcgtacggcgtggcatcggcgcgcttctatcgtccataagaaatacattgcactatctaaggcgcgttccgtttttatcgtgaaacgctctataattgggcgtagctctgaaagctccgaaaactatgtgcaatgttgtggattggatgatatccagttggttaagttaacttttaatagcagtttcgtagcatatacatccataatctaatttacttctaattggagattgatataatcgtagaagaatggttgtgtctgcaccccatttgtgattagaaaggattttatagtccttttactaacagtatttttattagaataaacgatgaaaatcagtagaactgatacaccgtatgttcgaatattttgaaaaagaatactgctggtaaacccagtttaggtttgttcaattaaaacacatctttgacccagaaaaaattgattggcaaatatatctacaattaattaccactacaactaaggcacatatctcattatttgaccaaccgatgtataccctgctttaagaattcttgtgagtgttggtagaagaactgttttacggcattttgtatttctccgtccgactgcaaacgatattaccttgaacgcctttttcggtagacaaaacatgtgaaaatcgcaatgccataaatctgaactatagggtggatgctctaatatcctctatttatttcgttgtagattttctttcactactttggcaacatgaggccgagcattgtcgtgtagaagaatgacaccacgtgagagcttcctcatggcgtaacagaggcctccgcagcgtgaagcttgcgggggccccaatcgagcaggggccccatcttgtcgtctgatattatgtaaaatctgttataggtatatgattttactttgtgtgtttaaatttaaaaacgtaaatttctaaataggcgtattcggcaagtgaatcatctcatatctagaaacttaatcctttccggtttcacgaacttttatgggtgacgacaataaactataatgctttgtacgtaactattgaaagatttgagaattgcaatttgccgaattttagaacaatatttctaaatctagaaatggggtttctctttattatttacctacgtttagtatttcgatacaattatccagaagcgtaacagaggcccccgtagcaggaagggggctataccaataaagatgaaaaatgtaagtcgtcataaacaatgtatgaatacaccaatagctcagtaaatgacagttttggagtgaaattatcagcttcacgacggacgtattagcttgacaatttggatttaggttctagttacactccacttcaaagttggatttatgccgtaaattgttggatttatgttgtaaagtggatttatgctttta

SEQ ID NO: 1962 - DNA, 3569 bp, Diabrotica virgifera
  SmartBlast Evalue=5E-21; Info=Putative uncharacterized transposon-derived protein F52C9.6 (Fragment) n=2 Tax= Camponotus floridanus RepID=E2ALS0_9HYME
gcgccctggtctatagggagtaagcattttgacaggtattattatactcaattttaaatttagtataaaatctaaactagaactacaaaaacagaaactggaagtaaattttttgaaaatttttacttatctggaatataaatagcatctgacttcattatcatcaatagtgttattacaactcttcttaagtccttgcgcgtatactattgccttccatatttgtgggtctgtgccactatttcccattttctccagatgtcctccgactggatcttttcacctttttctgggccgtcctgcagacattttcccatatggtcttttccaaaacacattgtttataaggcgattgtcattactccgtatcacatgtcctgtccatcttagtctattggccgttatatatcttactagatttatctttccgaagagtcattctaactcgttgttatgtctgcgcctccattcttttgtcatgctatctctgcaggggccaaatattactcgaaggattttactttagcataccaacaatttatttatttatttttttgttagcgtccatatttcttttccatacgcgacagctggtcgtattatggtttttatatcttgatttttgcacctcttgagagaagttttgacctcatgagatgttgcaatcatcagggaaataaattaatacaaaaattaaagatatttgtacaaactccaaacattaggttatttattgaaaaagtgactagattcacttcacaacattccaatatagtaaaacaatgttcatcaacaacgtccttaaaatttcaataagtatacaatatagtgctataaaagtttaacgcttgttgtaaaatccaatattttaatcaaatttatatagttttcttaataaaacaatatgaataagtgttaatcatttacatgactcaatatttcttgtcagcttatgttaatatgggtttttattaatgtttttggtttgaaaatggaatgttttgtattgtagggattttcatgttatttggcagtttttgttgctgctttatcagccgcctcattctccattatccatgtttttggtatccctatgggatggtacccataataatattttgtttttgtcacgtgtttgggcattatataatacctgtcttttatttgtgttcaattcccatgagtaggatacatttgtttgaccccactgaagacacccagagaatctgatataataagaaaatttatatcagatatattgttgatacattggtttagtgcgttggtgattacttgcagttctccagtatatgctacactccttggctaggcgggtgacagaggtactatcttcgaaaatagctgcagcagctataccactgctgcttttggaggcatcagtaaaaattattttgaaataaagatatctatagatggtagacaggaattgttgttttatttcagaagaattgtgtgaatgtttgggatagttgaataagttgataataatagtctcccgttttataccgctcacgcggctttgggattatatcagggtagtctgctatatctagggcctacggtatataaggaaggtaacagggtcagtgctacgcttcaaccgcctattattacccctggttttacccaaggtactcactttattcaggctgagtcgacctggggcctatagacattttaaaaatgtttagttgttcttgccggcggtgagatttgaaccccggactaccagcacgcgagtcaagcatatactaccgccttagaaggcaaattaccgcatactaccgcccgttgaataagttaaaatctacttttggtatttgaactttccagggaatagactggaatatgtttgtagaaatggctgtcattttgatgtatatcgtcttcaaatcgatttatgcgttcattgaatggtacgtttgtaaggtagtaatttgaatacagatttggagagtttttgcttattaaactggttatgaaggagttttcatttgcactgagatagttgttggtacaacattgaaaaatgttgccttccaagaattaattgcggttctcctgctcagacttgaaggctgctatactttgtttaacgttaagaacaaaacattgcgcttatggagatcagtgttgccaaacctctcgggcacgggtggctatactcgactgccgatatacgattcattctactcgtacggcgtggcatcggcgcgcttctatcgtccataagaaatacattgcactatctaaggcgcgttccgtttttatgtgcaatgttgtggattggatgatatccagttggttaagttaacttttaatagcagtttcgtagcatatacatccataatctaatttacttctaattggagattgatataatcgtagaagaatggttgtgtctgcaccccatttgtgattagaaaggattttatagtccttttactaacagtatttttattagaataaacgatgaaaatcagtagaactgatacaccgtatgttcgaatattttgaaaaagaatactgctggtaaacccagtttaggtttgttcaattaaaacacatctttgacccagaaaaaattgattggcaaatatatctacaattaattaccactacaactaaggcacatatctcattatttgaccaaccgatgtataccctgctttaagaattcttgtgagtgttggtagaagaactgttttacggcattttgtatttctccgtccgactgcaaacgatattaccttgaacgcctttttcggtagacaaaacatgtgaaaatcgcaatgccataaatctgaactatagggtggatgctctaatatcctctatttatttcgttgtagattttctttcactactttggcaacatgaggccgagcattgtcgtgtagaagaatgacaccacgtgagagcttcctcatggcgtaacagaggcctccgcagcgtgaagcttgcgggggccccaatcgagcaggggccccatcttgtcgtctgatattatgtaaaatctgttataggtatatgattttactttgtgtgtttaaatttaaaaacgtaaatttctaaataggcgtattcggcaagtgaatcatctcatatctagaaacttaatcctttccggtttcacgaacttttatgggtgacgacaataaactataatgctttgtacgtaactattgaaagatttgagaattgcaatttgccgaattttagaacaatatttctaaatctagaaatggggtttctctttattatttacctacgtttagtatttcgatacaattatccagaagcgtaacagaggcccccgtagcaggaagggggctataccaataaagatgaaaaatgtaagtcgtcataaacaatgtatgaatacaccaatagctcagtaaatgacagttttggagtgaaattatcagcttcacgacggacgtattagcttgacaatttggatttaggttctagttacactccacttcaaagttggatttatgccgtaaattgttggatttatgttgtaaagtggatttatgctttta

SEQ ID NO: 1963 - DNA, 3569 bp, Diabrotica virgifera
  SmartBlast Evalue=5E-21; Info=Putative uncharacterized transposon-derived protein F52C9.6 (Fragment) n=2 Tax= Camponotus floridanus RepID=E2ALS0_9HYME
gcgccctggtctatagggagtaagcattttgacaggtattattatactcaattttaaatttagtataaaatctaaactagaactacaaaaacagaaactggaagtaaattttttgaaaatttttacttatctggaatataaatagcatctgacttcattatcatcaatagtgttattacaactcttcttaagtccttgcgcgtatactattgccttccatatttgtgggtctgtgccactatttcccattttctccagatgtcctccgactggatcttttcacctttttctgggccgtcctgcagacattttcccatatggtcttttccaaaacacattgtttataaggcgattgtcattactccgtatcacatgtcctgtccatcttagtctattggccgttatatatcttactagatttatctttccgaagagtcattctaactcgttgttatgtctgcgcctccattcttttgtcatgctatctctgcaggggccaaatattactcgaaggattttactttagcataccaacaatttatttatttatttttttgttagcgtccatatttcttttccatacgcgacagctggtcgtattatggtttttatatcttgatttttgcacctcttgagagaagttttgacctcatgagatgttgcaatcatcagggaaataaattaatacaaaaattaaagatatttgtacaaactccaaacattaggttatttattgaaaaagtgactagattcacttcacaacattccaatatagtaaaacaatgttcatcaacaacgtccttaaaatttcaataagtatacaatatagtgctataaaagtttaacgcttgttgtaaaatccaatattttaatcaaatttatatagttttcttaataaaacaatatgaataagtgttaatcatttacatgactcaatatttcttgtcagcttatgttaatatgggtttttattaatgtttttggtttgaaaatggaatgttttgtattgtagggattttcatgttatttggcagtttttgttgctgctttatcagccgcctcattctccattatccatgtttttggtatccctatgggatggtacccataataatattttgtttttgtcacgtgtttgggcattatataatacctgtcttttatttgtgttcaattcccatgagtaggatacatttgtttgaccccactgaagacacccagagaatctgatataataagaaaatttatatcagatatattgttgatacattggtttagtgcgttggtgattacttgcagttctccagtatatgctacactccttggctaggcgggtgacagaggtactatcttcgaaaatagctgcagcagctataccactgctgcttttggaggcatcagtaaaaattattttgaaataaagatatctatagatggtagacaggaattgttgttttatttcagaagaattgtgtgaatgtttgggatagttgaataagttgataataatagtctcccgttttataccgctcacgcggctttgagattatatcagggtagtctgctatatctagggcctacggtatataaggaaggtaacagggtcagtgctacgcttcaaccgcctattattacccctggttttacccaaggtactcaatttattcaggctgagtcgacctggggcctatagacattttaaaaatgtttagttgctcttgccggcggtgagatttgaaccccggactaccagcacgcgagtcaagcatatactaccgccttagaaggcaaattaccgtatactaccgcccgttgaataagttaaaatctacttttggtatttgaactttccagggaatagactggaatatgtttgtagaaatggctgtcattttgatgtatatcgtcttcaaatcgatttatgcgttcattgaatggtacgtttgtaaggtagtaatttgaatacagatttggagagtttttgcttattaaactggttatgaaggagttttcatttgcactgagatagttgttggtacaacattgaaaaatgttgccttccaagaattaattgcggttctcctgctcagacttgaaggctgctatactttgtttaacgttaagaacaaaacattgcgcttatggagatcagtgttgccaaacctctcgggcacgggtggctatactcgactgccgatatacgattcattctactcgtacggcgtggcatcggcgcgcttctatcgtccataagaaatacattgcactatctaaggcgcgttccgtttttatgtgcaatgttgtggattggatgatatccagttggttaagttaacttttaatagcagtttcgtagcatatacatccataatctaatttacttctaattggagattgatataatcgtagaagaatggttgtgtctgcaccccatttgtgattagaaaggattttatagtccttttactaacagtatttttattagaataaacgatgaaaatcagtagaactgatacaccgtatgttcgaatattttgaaaaagaatactgctggtaaacccagtttaggtttgttcaattaaaacacatctttgacccagaaaaaattgattggcaaatatatctacaattaattaccactacaactaaggcacatatctcattatttgaccaaccgatgtataccctgctttaagaattcttgtgagtgttggtagaagaactgttttacggcattttgtatttctccgtccgactgcaaacgatattaccttgaacgcctttttcggtagacaaaacatgtgaaaatcgcaatgccataaatctgaactatagggtggatgctctaatatcctctatttatttcgttgtagattttctttcactactttggcaacatgaggccgagcattgtcgtgtagaagaatgacaccacgtgagagcttcctcatggcgtaacagaggcctccgcagcgtgaagcttgcgggggccccaatcgagcaggggccccatcttgtcgtctgatattatgtaaaatctgttataggtatatgattttactttgtgtgtttaaatttaaaaacgtaaatttctaaataggcgtattcggcaagtgaatcatctcatatctagaaacttaatcctttccggtttcacgaacttttatgggtgacgacaataaactataatgctttgtacgtaactattgaaagatttgagaattgcaatttgccgaattttagaacaatatttctaaatctagaaatggggtttctctttattatttacctacgtttagtatttcgatacaattatccagaagcgtaacagaggcccccgtagcaggaagggggctataccaataaagatgaaaaatgtaagtcgtcataaacaatgtatgaatacaccaatagctcagtaaatgacagttttggagtgaaattatcagcttcacgacggacgtattagcttgacaatttggatttaggttctagttacactccacttcaaagttggatttatgccgtaaattgttggatttatgttgtaaagtggatttatgctttta

SEQ ID NO: 1964 - DNA, 3081 bp, Diabrotica virgifera
  SmartBlast Evalue=4E-21; Info=Putative uncharacterized transposon-derived protein F52C9.6 (Fragment) n=2 Tax= Camponotus floridanus RepID=E2ALS0_9HYME
gcgccctggtctatagggagtaagcattttgacaggtattattatactcaattttaaatttagtataaaatctaaactagaactacaaaaacagaaactggaagtaaattttttgaaaatttttacttatctggaatataaatagcatctgacttcattatcatcaatagtgttattacaactcttcttaagtccttgcgcgtatactattgccttccatatttgtgggtctgtgccactatttcccattttctccagatgtcctccgactggatcttttcacctttttctgggccgtcctgcagacattttcccatatggtcttttccaaaacacattgtttataaggcgattgtcattactccgtatcacatgtcctgtccatcttagtctattggccgttatatatcttactagatttatctttccgaagagtcattctaactcgttgttatgtctgcgcctccattcttttgtcatgctatctctgcaggggccaaatattactcgaaggattttactttagcataccaacaatttatttatttatttttttgttagcgtccatatttcttttccatacgcgacagctggtcgtattatggtttttatatcttgatttttgcacctcttgagagaagttttgacctcatgagatgttgcaatcatcagggaaataaattaatacaaaaattaaagatatttgtacaaactccaaacattaggttatttattgaaaaagtgactagattcacttcacaacattccaatatagtaaaacaatgttcatcaacaacgtccttaaaatttcaataagtatacaatatagtgctataaaagtttaacgcttgttgtaaaatccaatattttaatcaaatttatatagttttcttaataaaacaatatgaataagtgttaatcatttacatgactcaatatttcttgtcagcttatgttaatatgggtttttattaatgtttttggtttgaaaatggaatgttttgtattgtagggattttcatgttatttggcagtttttgttgctgctttatcagccgcctcattctccattatccatgtttttggtatccctatgggatggtacccataataatattttgtttttgtcacgtgtttgggcattatataatacctgtcttttatttgtgttcaattcccatgagtaggatacatttgtttgaccccactgaagacacccagagaatctgatataataagaaaatttatatcagatatattgttgatacattggtttagtgcgttggtgattacttgcagttctccagtatatgctacactccttggctaggcgggtgacagaggtactatcttcgaaaatagctgcagcagctataccactgctgcttttggaggcatcagtaaaaattattttgaaataaagatatctatagatggtagacaggaattgttgttttatttcagaagaattgtgtgaatgtttgggatagttgaataagttgataataatagtctcccgttttataccgctcacgcggctttgggattatatcagggtagtctgctatatctagggcctacggtatataaggaaggtaacagggtcagtgctacgcttcaaccgcctattattacccctggttttacccaaggtactcactttattcaggctgagtcgacctggggcctatagacattttaaaaatgtttagttgttcttgccggcggtgagatttgaaccccggactaccagcacgcgagtcaagcatatactaccgccttagaaggcaaattaccgcatactaccgcccgttgaataagttaaaatctacttttggtatttgaactttccagggaatagactggaatatgtttgtagaaatggctgtcattttgatgtatatcgtcttcaaatcgatttatgcgttcattgaatggtacgtttgtaaggtagtaatttgaatacagatttggagagtttttgcttattaaactggttatgaaggagttttcatttgcactgagatagttgttggtacaacattgaaaaatgttgccttccaagaattaattgcggttctcctgctcagacttgaaggctgctatactttgtttaacgttaagaacaaaacattgcgcttatggagatcagtgttgccaaacctctcgggcacgggtggctatactcgactgccgatatacgattcattctactcgtacggcgtggcatcggcgcgcttctatcgtccataagaaatacattgcactatctaaggcgcgttccgtttttatcgtgaaacgctctataattgggcgtagctctgaaagctccgaaaactatgtgcaatgttgtggattggatgatatccagttggttaagttaacttttaatagcagtttcgtagcatatacatccataatctaatttacttctaattggagattgatataatcgtagaagaatggttgtgtctgcaccccatttgtgattagaaaggattttatagtccttttactaacagtatttttattagaataaacgatgaaaatcagtagaactgatacaccgtatgttcgaatattttgaaaaagaatactgctggtaaacccagtttaggtttgttcaattaaaacacatctttgacccagaaaaaattgattggcaaatatatctacaattaattaccactacaactaaggcacatatctcattatttgaccaaccgatgtataccctgctttaagaattcttgtgagtgttggtagaagaactgttttacggcattttgtatttctccgtccgactgcaaacgatattaccttgaacgcctttttcggtagacaaaacatgtgaaaatcgcaatgccataaatctgaactatagggtggatgctctaatatcctctatttatttcgttgtagattttctttcactactttggcaacatgaggccgagcattgtcgtgtagaagaatgaccccacgtgagagcttcctcatggcgtaacagaggccccccgcagcgtgaagcttgcgggggccccatcttgtcgtctgatattatgtaaaatctgttacagg

SEQ ID NO: 1965 - DNA, 3154 bp, Diabrotica virgifera
  SmartBlast Evalue=1E-168; Info=Hexokinase n=1 Tax=Locusta migratoria RepID=C0KJJ7_LOCMI
cggcaaaattgttcagcagttttgtgtctacgtctacgtaaatacgtagattctgtagattgtttccatttcagtatttttttagttgtttgtttgtagtgttgtacaagtcgaaaatgggttacaaaaggaacatccaggccacacctttgataagagacaaatgcagagagttgattttaaccaatgaaaaactacacaaattgatgaaagtatttttggaaaatgttcacagaggtttgaaaaaagaaacacacccaacatcgatcgtgaaatgttttccaacatacgtgcaagatcttccaaacggaacagaaaacggcaaatttctagccctagacctgggtggcacgaacttcagagtcctcctcatcgagctcagtggcgaacactttgaaatgaaatccaagatcttcgccattccccaacacattatgttaggatcaggcgaacaacttttcgatcacatcgccgagtgtctggctattttcgtcaaagaagagcaggtggccgaccaaaagctacctttgggtttcacattcagtttccccttgtcgcagaaaggattgacagttggataccttgaaagatggaccaagggattcaattgctccaacgtagtgggaaacgacgtggtgcaaatgttgaacgaagctattgaaagacgtggggacttcgaaatatcagtcatggcaatattgaacgattccactggcactctaatgtcctgtgcttggttgaatcgtcagtgccgaattggtgccatcgttggtaccggctccaacacttgttacgtggaaaaacaagcgaacgccgaaacatggagcgacgtggacatgggctctggaaacgtgctgatcaacctggaatggggagcgtttggggatgacggcgctttagacttcatcaggactgaatatgatgaggacatcgatagaaactctgtaaaccccggaaagcaaaagcacgagaagatgatttctggaatgtacatgggagaattagtgagactggctttagaaagattcacgaaagaagctttactcttcggcggaaaaggatcagacatgttattcgaaagaggacgattctacacaaaatacgtatcagaaatagaaagtgacccaccaggagtattcaacaatcttagagatatttgtgaagaattaggacttaaacacgccacagaacaggactttatcaacatcagatacatctgtgagtgtatatcgagaagatccgcccatctagtgtctgctggtttggccactttacttaacaaaatgggcgagaagaaagtcaccattggcgtcgacggatcagtatacaggtttcacccacatttccacaacctcatgatggagaaaatcaaagaattggccgatcccagcatagagtttgatttgatgctctccgaagacggcagcggtcgaggagcagccctagtagcagcggtggcagcaagactacaaaaagaagcaggccgaacataacatcagctagtttaaaatataaatttgttattttttattagaaaaaaacgattattcatgattgaatacaaaacaaaaactcatagaaaaatgttaattgggttcctatagactgcatttgtagatattaaacataaaggaatctttacttttttcccgtcgatcctcagatttttttaatcattgagtagttttttttgtgcctgaggagtgactttttaaccctctttaatcactatgtgactatcagaaagctaaatcctaaaatttttattcgagatcttcttactaaaatttcaggattcaatatttttataaagttattctgttaacccttatcaaaaccaaccccggaaacttttttgaggtttcagtcgctatttttgagcgaaatacggcatttgtgaggttatgtccaagttttcgatccaaaataaacctaattatctatgttattttcataaaagttcagtttaaatacattttagaaacatttcgaatgaatacaaaatgccgaaaacaactattatgatgagaatcgtttcaatttggtttatttttatatatctaagacttgtgacaaacttcacagtatgacgtcatcaccaatatggcgtgtagtatgaggttgctttccggggtcggtttgataatcgaaaaattatttattttagatttgttgtcattacattgtgattttgcattgccttttgagaaagaatactccataatgcattcaatggagtccgagttgtacataaaagcaaaaaaatgtccatctagttcaaaaatggcggcatgtagtgaaatgagttgctggacaacgtatatgtaaggccgtttttggataatttgtaattttatcgtttgattttgtcaaatcatacaattagtgattgatatgtagcggatttcggtctacgaatctcaatttcttttcgataacatttttggtactaagtatagtttatgaaaaaatgtagttttaaaatttataatgattcacacgtcagtgtattaacagtatttttttctttttactatgttttggacgatctagaaatacctacattgctataatgttgtttttattttaaaaaatatggatttgtcagttaatatgacaataaatttacattagttaagacgaacacaattcaaaaatgattatcgaactagaaatataactagacactccgcaatttacttttttttgtagaaacccaccattggcatctgaaaaacaagatattgtaccaatacattcacaaatattgattcatttaaccatttgtacaaaaaaatcagtattttaaagcactaaaagataattcatgttttttaaactaacataacctagaaaaaagtttcttatacgttttttactgtctttaagcttttatgtacaatgttcgacttttccatcttgtttttattgaatgctgtatagtttttgcaactagtatgatgtaatatgtgatcttagctactagatctacaacttataaatgtatatacacacaatcttgcgcgttcgctgtgaagagtactgtgagtactgggtaatctagagaaacggtacttaacgatgttttataccaaggcaatggtttattttattgtaaaaataaaatatatagtgtagttaacacgcaaaaaaa

SEQ ID NO: 1966 - DNA, 3154 bp, Diabrotica virgifera
  SmartBlast Evalue=1E-172; Info=Hexokinase n=1 Tax=Locusta migratoria RepID=C0KJJ7_LOCMI
cggcaaaattgttcagcagttttgtgtctacgtctacgtaaatacgtagattctgtagattgtttccatttcagtatttttttagttgtttgtttgtagtgttgtacaagtcgaaaatgggttacaaaaggaacatccaggccacacctttgataagagacaaatgcagagagttgattttaaccaatgaaaaactacacaaattgatgaaagtatttttggaaaatgttcacagaggtttgaaaaaagaaacacacccaacatcgatcgtgaaatgttttccaacatacgtgcaagatcttccaaacggaacagaaaacggcaaatttctagccctagacctgggtggcacgaacttcagagtcctcctcatcgagctcagtggcgaacactttgaaatgaaatccaagatcttcgccattccccaacacattatgttaggatcaggcgaacaacttttcgatcacatcgccgagtgtctggctattttcgtcaaagaagagcaggtggccgaccaaaagctacctttgggtttcacattcagtttccccttgtcgcagaaaggattgacagttggataccttgaaagatggaccaagggattcaattgctccaacgtagtgggaaacgacgtggtgcaaatgttgaacgaagctattgaaagacgtggggacgtacagattgagatatgtgctattttgaatgacactacaggaacactaatgtcttgcgcttggaaaaatcactcaacacggataggttctattgtgggtaccggctccaacacttgttacgtggaaaaacaagcgaacgccgaaacatggagcgacgtggacatgggctctggaaacgtgctgatcaacctggaatggggagcctttggagatgacggcgctttggacttcatcaggactgaatatgatgaggacatcgatagaaactctgtaaaccccggaaagcaaaagcacgagaagatgatttctggaatgtacatgggagaattagtgagactggctttagaaagattcacgaaagaagctttactcttcggcggaaaaggatcagacatgttattcgaaagaggacgattctacacaaaatacgtatcagaaatagaaagtgacccaccaggagtattcaacaatcttagagatatttgtgaagaattaggacttaaacacgccacagaacaggactttatcaacatcagatacatctgtgagtgtatatcgagaagatccgcccatctagtgtctgctggtttggccactttacttaacaaaatgggcgagaagaaagtcaccattggcgtcgacggatcagtatacaggtttcacccacatttccacaacctcatgatggagaaaatcaaagaattggccgatcccagcatagagtttgatttgatgctctccgaagacggcagcggtcgaggagcagccctagtagcagcggtggcagcaagactacaaaaagaagcaggccgaacataacatcagctagtttaaaatataaatttgttattttttattagaaaaaaacgattattcatgattgaatacaaaacaaaaactcatagaaaaatgttaattgggttcctatagactgcatttgtagatattaaacataaaggaatctttacttttttcccgtcgatcctcagatttttttaatcattgagtagttttttttgtgcctgaggagtgactttttaaccctctttaatcactatgtgactatcagaaagctaaatcctaaaatttttattcgagatcttcttactaaaatttcaggattcaatatttttataaagttattctgttaacccttatcaaaaccaaccccggaaacttttttgaggtttcagtcgctatttttgagcgaaatacggcatttgtgaggttatgtccaagttttcgatccaaaataaacctaattatctatgttattttcataaaagttcagtttaaatacattttagaaacatttcgaatgaatacaaaatgccgaaaacaactattatgatgagaatcgtttcaatttggtttatttttatatatctaagacttgtgacaaacttcacagtatgacgtcatcaccaatatggcgtgtagtatgaggttgctttccggggtcggtttgataatcgaaaaattatttattttagatttgttgtcattacattgtgattttgcattgccttttgagaaagaatactccataatgcattcaatggagtccgagttgtacataaaagcaaaaaaatgtccatctagttcaaaaatggcggcatgtagtgaaatgagttgctggacaacgtatatgtaaggccgtttttggataatttgtaattttatcgtttgattttgtcaaatcatacaattagtgattgatatgtagcggatttcggtctacgaatctcaatttcttttcgataacatttttggtactaagtatagtttatgaaaaaatgtagttttaaaatttataatgattcacacgtcagtgtattaacagtatttttttctttttactatgttttggacgatctagaaatacctacattgctataatgttgtttttattttaaaaaatatggatttgtcagttaatatgacaataaatttacattagttaagacgaacacaattcaaaaatgattatcgaactagaaatataactagacactccgcaatttacttttttttgtagaaacccaccattggcatctgaaaaacaagatattgtaccaatacattcacaaatattgattcatttaaccatttgtacaaaaaaatcagtattttaaagcactaaaagataattcatgttttttaaactaacataacctagaaaaaagtttcttatacgttttttactgtctttaagcttttatgtacaatgttcgacttttccatcttgtttttattgaatgctgtatagtttttgcaactagtatgatgtaatatgtgatcttagctactagatctacaacttataaatgtatatacacacaatcttgcgcgttcgctgtgaagagtactgtgagtactgggtaatctagagaaacggtacttaacgatgttttataccaaggcaatggtttattttattgtaaaaataaaatatatagtgtagttaacacgcaaaaaaa

SEQ ID NO: 1967 - DNA, 3154 bp, Diabrotica virgifera
  SmartBlast Evalue=1E-168; Info=Hexokinase n=1 Tax=Locusta migratoria RepID=C0KJJ7_LOCMI
cggcaaaattgttcagcagttttgtgtctacgtctacgtaaatacgtagattctgtagattgtttccatttcagtatttttttagttgtttgtttgtagtgttgtacaagtcgaaaatgggttacaaaaggaacatccaggccacacctttgataagagacaaatgcagagagttgattttaaccaatgaaaaactacacaaattgatgaaagtatttttggaaaatgttcacagaggtttgaaaaaagaaacacacccaacatcgatcgtgaaatgttttccaacatacgtgcaagatcttccaaacggaacagaaaacggcaaatttctagccctagacctgggtggcacgaacttcagagtcctcctcatcgagctcagtggcgaacactttgaaatgaaatccaagatcttcgccattccccaacacattatgttaggatcaggcgaacaacttttcgatcacatcgccgagtgtctggctattttcgtcaaagaagagcaggtggccgaccaaaagctacctttgggtttcacattcagtttccccttgtcgcagaaaggattgacagttggataccttgaaagatggaccaagggattcaattgctccaacgtagtgggaaacgacgtggtgcaaatgttgaacgaagctattgaaagacgtggggacttcgaaatatcagtcatggcaatattgaacgattccactggcactctaatgtcctgtgcttggttgaatcgtcagtgccgaattggtgccatcgttggtaccggctccaacacttgttacgtggaaaaacaagcgaacgccgaaacatggagcgacgtggacatgggctctggaaacgtgctgatcaacctggaatggggagcctttggagatgacggcgctttggacttcatcaggactgaatatgatgaggacatcgatagaaactctgtaaaccccggaaagcaaaagcacgagaagatgatttctggaatgtacatgggagaattagtgagactggctttagaaagattcacgaaagaagctttactcttcggcggaaaaggatcagacatgttattcgaaagaggacgattctacacaaaatacgtatcagaaatagaaagtgacccaccaggagtattcaacaatcttagagatatttgtgaagaattaggacttaaacacgccacagaacaggactttatcaacatcagatacatctgtgagtgtatatcgagaagatccgcccatctagtgtctgctggtttggccactttacttaacaaaatgggcgagaagaaagtcaccattggcgtcgacggatcagtatacaggtttcacccacatttccacaacctcatgatggagaaaatcaaagaattggccgatcccagcatagagtttgatttgatgctctccgaagacggcagcggtcgaggagcagccctagtagcagcggtggcagcaagactacaaaaagaagcaggccgaacataacatcagctagtttaaaatataaatttgttattttttattagaaaaaaacgattattcatgattgaatacaaaacaaaaactcatagaaaaatgttaattgggttcctatagactgcatttgtagatattaaacataaaggaatctttacttttttcccgtcgatcctcagatttttttaatcattgagtagttttttttgtgcctgaggagtgactttttaaccctctttaatcactatgtgactatcagaaagctaaatcctaaaatttttattcgagatcttcttactaaaatttcaggattcaatatttttataaagttattctgttaacccttatcaaaaccaaccccggaaacttttttgaggtttcagtcgctatttttgagcgaaatacggcatttgtgaggttatgtccaagttttcgatccaaaataaacctaattatctatgttattttcataaaagttcagtttaaatacattttagaaacatttcgaatgaatacaaaatgccgaaaacaactattatgatgagaatcgtttcaatttggtttatttttatatatctaagacttgtgacaaacttcacagtatgacgtcatcaccaatatggcgtgtagtatgaggttgctttccggggtcggtttgataatcgaaaaattatttattttagatttgttgtcattacattgtgattttgcattgccttttgagaaagaatactccataatgcattcaatggagtccgagttgtacataaaagcaaaaaaatgtccatctagttcaaaaatggcggcatgtagtgaaatgagttgctggacaacgtatatgtaaggccgtttttggataatttgtaattttatcgtttgattttgtcaaatcatacaattagtgattgatatgtagcggatttcggtctacgaatctcaatttcttttcgataacatttttggtactaagtatagtttatgaaaaaatgtagttttaaaatttataatgattcacacgtcagtgtattaacagtatttttttctttttactatgttttggacgatctagaaatacctacattgctataatgttgtttttattttaaaaaatatggatttgtcagttaatatgacaataaatttacattagttaagacgaacacaattcaaaaatgattatcgaactagaaatataactagacactccgcaatttacttttttttgtagaaacccaccattggcatctgaaaaacaagatattgtaccaatacattcacaaatattgattcatttaaccatttgtacaaaaaaatcagtattttaaagcactaaaagataattcatgttttttaaactaacataacctagaaaaaagtttcttatacgttttttactgtctttaagcttttatgtacaatgttcgacttttccatcttgtttttattgaatgctgtatagtttttgcaactagtatgatgtaatatgtgatcttagctactagatctacaacttataaatgtatatacacacaatcttgcgcgttcgctgtgaagagtactgtgagtactgggtaatctagagaaacggtacttaacgatgttttataccaaggcaatggtttattttattgtaaaaataaaatatatagtgtagttaacacgcaaaaaaa

SEQ ID NO: 1968 - DNA, 3209 bp, Diabrotica virgifera
  SmartBlast Evalue=1E-172; Info=Hexokinase n=6 Tax=Culicidae RepID=Q16VW5_AEDAE
tcagttcaagttcagctttattcattgcaccatcagtttgtgctgaggcgattgctggtcgctttctgtgtttctaccaagacaaaaatgaggttccacactatttttgagcaagtcgacgagctcggaagagtggaagttgatctgttggggctccatggtcatggaggctccgagagttctgttgagtaccacatcactaacgagataagagacaaatgcagagagttgattttaaccaatgaaaaactacacaaattgatgaaagtatttttggaaaatgttcacagaggtttgaaaaaagaaacacacccaacatcgatcgtgaaatgttttccaacatacgtgcaagatcttccaaacggaacagaaaacggcaaatttctagccctagacctgggtggcacgaacttcagagtcctcctcatcgagctcagtggcgaacactttgaaatgaaatccaagatcttcgccattccccaacacattatgttaggatcaggcgaacaacttttcgatcacatcgccgagtgtctggctattttcgtcaaagaagagcaggtggccgaccaaaagctacctttgggtttcacattcagtttccccttgtcgcagaaaggattgacagttggataccttgaaagatggaccaagggattcaattgctccaacgtagtgggaaacgacgtggtgcaaatgttgaacgaagctattgaaagacgtggggacgtacagattgagatatgtgctattttgaatgacactacaggaacactaatgtcttgcgcttggaaaaatcactcaacacggataggttctattgtgggtaccggctccaacacttgttacgtggaaaaacaagcgaacgccgaaacatggagcgacgtggacatgggctctggaaacgtgctgatcaacctggaatggggagcgtttggggatgacggcgctttagacttcatcaggactgaatatgatgaggacatcgatagaaactctgtaaaccccggaaagcaaaagcacgagaagatgatttctggaatgtacatgggagaattagtgagactggctttagaaagattcacgaaagaagctttactcttcggcggaaaaggatcagacatgttattcgaaagaggacgattctacacaaaatacgtatcagaaatagaaagtgacccaccaggagtattcaacaatcttagagatatttgtgaagaattaggacttaaacacgccacagaacaggactttatcaacatcagatacatctgtgagtgtatatcgagaagatccgcccatctagtgtctgctggtttggccactttacttaacaaaatgggcgagaagaaagtcaccattggcgtcgacggatcagtatacaggtttcacccacatttccacaacctcatgatggagaaaatcaaagaattggccgatcccagcatagagtttgatttgatgctctccgaagacggcagcggtcgaggagcagccctagtagcagcggtggcagcaagactacaaaaagaagcaggccgaacataacatcagctagtttaaaatataaatttgttattttttattagaaaaaaacgattattcatgattgaatacaaaacaaaaactcatagaaaaatgttaattgggttcctatagactgcatttgtagatattaaacataaaggaatctttacttttttcccgtcgatcctcagatttttttaatcattgagtagttttttttgtgcctgaggagtgactttttaaccctctttaatcactatgtgactatcagaaagctaaatcctaaaatttttattcgagatcttcttactaaaatttcaggattcaatatttttataaagttattctgttaacccttatcaaaaccaaccccggaaacttttttgaggtttcagtcgctatttttgagcgaaatacggcatttgtgaggttatgtccaagttttcgatccaaaataaacctaattatctatgttattttcataaaagttcagtttaaatacattttagaaacatttcgaatgaatacaaaatgccgaaaacaactattatgatgagaatcgtttcaatttggtttatttttatatatctaagacttgtgacaaacttcacagtatgacgtcatcaccaatatggcgtgtagtatgaggttgctttccggggtcggtttgataatcgaaaaattatttattttagatttgttgtcattacattgtgattttgcattgccttttgagaaagaatactccataatgcattcaatggagtccgagttgtacataaaagcaaaaaaatgtccatctagttcaaaaatggcggcatgtagtgaaatgagttgctggacaacgtatatgtaaggccgtttttggataatttgtaattttatcgtttgattttgtcaaatcatacaattagtgattgatatgtagcggatttcggtctacgaatctcaatttcttttcgataacatttttggtactaagtatagtttatgaaaaaatgtagttttaaaatttataatgattcacacgtcagtgtattaacagtatttttttctttttactatgttttggacgatctagaaatacctacattgctataatgttgtttttattttaaaaaatatggatttgtcagttaatatgacaataaatttacattagttaagacgaacacaattcaaaaatgattatcgaactagaaatataactagacactccgcaatttacttttttttgtagaaacccaccattggcatctgaaaaacaagatattgtaccaatacattcacaaatattgattcatttaaccatttgtacaaaaaaatcagtattttaaagcactaaaagataattcatgttttttaaactaacataacctagaaaaaagtttcttatacgttttttactgtctttaagcttttatgtacaatgttcgacttttccatcttgtttttattgaatgctgtatagtttttgcaactagtatgatgtaatatgtgatcttagctactagatctacaacttataaatgtatatacacacaatcttgcgcgttcgctgtgaagagtactgtgagtactgggtaatctagagaaacggtacttaacgatgttttataccaaggcaatggtttattttattgtaaaaataaaatatatagtgtagttaacacgcaaaaaaa

SEQ ID NO: 1969 - DNA, 3209 bp, Diabrotica virgifera; identical to SEQ ID NO: 1968
  SmartBlast Evalue=1E-172; Info=Hexokinase n=6 Tax=Culicidae RepID=Q16VW5_AEDAE

SEQ ID NO: 1970 - DNA, 3209 bp, Diabrotica virgifera
  SmartBlast Evalue=1E-168; Info=Hexokinase n=1 Tax=Locusta migratoria RepID=C0KJJ7_LOCMI
tcagttcaagttcagctttattcattgcaccatcagtttgtgctgaggcgattgctggtcgctttctgtgtttctaccaagacaaaaatgaggttccacactatttttgagcaagtcgacgagctcggaagagtggaagttgatctgttggggctccatggtcatggaggctccgagagttctgttgagtaccacatcactaacgagataagagacaaatgcagagagttgattttaaccaatgaaaaactacacaaattgatgaaagtatttttggaaaatgttcacagaggtttgaaaaaagaaacacacccaacatcgatcgtgaaatgttttccaacatacgtgcaagatcttccaaacggaacagaaaacggcaaatttctagccctagacctgggtggcacgaacttcagagtcctcctcatcgagctcagtggcgaacactttgaaatgaaatccaagatcttcgccattccccaacacattatgttaggatcaggcgaacaacttttcgatcacatcgccgagtgtctggctattttcgtcaaagaagagcaggtggccgaccaaaagctacctttgggtttcacattcagtttccccttgtcgcagaaaggattgacagttggataccttgaaagatggaccaagggattcaattgctccaacgtagtgggaaacgacgtggtgcaaatgttgaacgaagctattgaaagacgtggggacttcgaaatatcagtcatggcaatattgaacgattccactggcactctaatgtcctgtgcttggttgaatcgtcagtgccgaattggtgccatcgttggtaccggctccaacacttgttacgtggaaaaacaagcgaacgccgaaacatggagcgacgtggacatgggctctggaaacgtgctgatcaacctggaatggggagcgtttggggatgacggcgctttagacttcatcaggactgaatatgatgaggacatcgatagaaactctgtaaaccccggaaagcaaaagcacgagaagatgatttctggaatgtacatgggagaattagtgagactggctttagaaagattcacgaaagaagctttactcttcggcggaaaaggatcagacatgttattcgaaagaggacgattctacacaaaatacgtatcagaaatagaaagtgacccaccaggagtattcaacaatcttagagatatttgtgaagaattaggacttaaacacgccacagaacaggactttatcaacatcagatacatctgtgagtgtatatcgagaagatccgcccatctagtgtctgctggtttggccactttacttaacaaaatgggcgagaagaaagtcaccattggcgtcgacggatcagtatacaggtttcacccacatttccacaacctcatgatggagaaaatcaaagaattggccgatcccagcatagagtttgatttgatgctctccgaagacggcagcggtcgaggagcagccctagtagcagcggtggcagcaagactacaaaaagaagcaggccgaacataacatcagctagtttaaaatataaatttgttattttttattagaaaaaaacgattattcatgattgaatacaaaacaaaaactcatagaaaaatgttaattgggttcctatagactgcatttgtagatattaaacataaaggaatctttacttttttcccgtcgatcctcagatttttttaatcattgagtagttttttttgtgcctgaggagtgactttttaaccctctttaatcactatgtgactatcagaaagctaaatcctaaaatttttattcgagatcttcttactaaaatttcaggattcaatatttttataaagttattctgttaacccttatcaaaaccaaccccggaaacttttttgaggtttcagtcgctatttttgagcgaaatacggcatttgtgaggttatgtccaagttttcgatccaaaataaacctaattatctatgttattttcataaaagttcagtttaaatacattttagaaacatttcgaatgaatacaaaatgccgaaaacaactattatgatgagaatcgtttcaatttggtttatttttatatatctaagacttgtgacaaacttcacagtatgacgtcatcaccaatatggcgtgtagtatgaggttgctttccggggtcggtttgataatcgaaaaattatttattttagatttgttgtcattacattgtgattttgcattgccttttgagaaagaatactccataatgcattcaatggagtccgagttgtacataaaagcaaaaaaatgtccatctagttcaaaaatggcggcatgtagtgaaatgagttgctggacaacgtatatgtaaggccgtttttggataatttgtaattttatcgtttgattttgtcaaatcatacaattagtgattgatatgtagcggatttcggtctacgaatctcaatttcttttcgataacatttttggtactaagtatagtttatgaaaaaatgtagttttaaaatttataatgattcacacgtcagtgtattaacagtatttttttctttttactatgttttggacgatctagaaatacctacattgctataatgttgtttttattttaaaaaatatggatttgtcagttaatatgacaataaatttacattagttaagacgaacacaattcaaaaatgattatcgaactagaaatataactagacactccgcaatttacttttttttgtagaaacccaccattggcatctgaaaaacaagatattgtaccaatacattcacaaatattgattcatttaaccatttgtacaaaaaaatcagtattttaaagcactaaaagataattcatgttttttaaactaacataacctagaaaaaagtttcttatacgttttttactgtctttaagcttttatgtacaatgttcgacttttccatcttgtttttattgaatgctgtatagtttttgcaactagtatgatgtaatatgtgatcttagctactagatctacaacttataaatgtatatacacacaatcttgcgcgttcgctgtgaagagtactgtgagtactgggtaatctagagaaacggtacttaacgatgttttataccaaggcaatggtttattttattgtaaaaataaaatatatagtgtagttaacacgcaaaaaaa

SEQ ID NO: 1971 - DNA, 3209 bp, Diabrotica virgifera; identical to SEQ ID NO: 1970
  SmartBlast Evalue=1E-168; Info=Hexokinase n=1 Tax=Locusta migratoria RepID=C0KJJ7_LOCMI

SEQ ID NO: 1972 - DNA, 3209 bp, Diabrotica virgifera
  SmartBlast Evalue=1E-172; Info=Hexokinase n=6 Tax=Culicidae RepID=Q16VW5_AEDAE
tcagttcaagttcagctttattcattgcaccatcagtttgtgctgaggcgattgctggtcgctttctgtgtttctaccaagacaaaaatgaggttccacactatttttgagcaagtcgacgagctcggaagagtggaagttgatctgttggggctccatggtcatggaggctccgagagttctgttgagtaccacatcactaacgagataagagacaaatgcagagagttgattttaaccaatgaaaaactacacaaattgatgaaagtatttttggaaaatgttcacagaggtttgaaaaaagaaacacacccaacatcgatcgtgaaatgttttccaacatacgtgcaagatcttccaaacggaacagaaaacggcaaatttctagccctagacctgggtggcacgaacttcagagtcctcctcatcgagctcagtggcgaacactttgaaatgaaatccaagatcttcgccattccccaacacattatgttaggatcaggcgaacaacttttcgatcacatcgccgagtgtctggctattttcgtcaaagaagagcaggtggccgaccaaaagctacctttgggtttcacattcagtttccccttgtcgcagaaaggattgacagttggataccttgaaagatggaccaagggattcaattgctccaacgtagtgggaaacgacgtggtgcaaatgttgaacgaagctattgaaagacgtggggacgtacagattgagatatgtgctattttgaatgacactacaggaacactaatgtcttgcgcttggaaaaatcactcaacacggataggttctattgtgggtaccggctccaacacttgttacgtggaaaaacaagcgaacgccgaaacatggagcgacgtggacatgggctctggaaacgtgctgatcaacctggaatggggagcctttggagatgacggcgctttggacttcatcaggactgaatatgatgaggacatcgatagaaactctgtaaaccccggaaagcaaaagcacgagaagatgatttctggaatgtacatgggagaattagtgagactggctttagaaagattcacgaaagaagctttactcttcggcggaaaaggatcagacatgttattcgaaagaggacgattctacacaaaatacgtatcagaaatagaaagtgacccaccaggagtattcaacaatcttagagatatttgtgaagaattaggacttaaacacgccacagaacaggactttatcaacatcagatacatctgtgagtgtatatcgagaagatccgcccatctagtgtctgctggtttggccactttacttaacaaaatgggcgagaagaaagtcaccattggcgtcgacggatcagtatacaggtttcacccacatttccacaacctcatgatggagaaaatcaaagaattggccgatcccagcatagagtttgatttgatgctctccgaagacggcagcggtcgaggagcagccctagtagcagcggtggcagcaagactacaaaaagaagcaggccgaacataacatcagctagtttaaaatataaatttgttattttttattagaaaaaaacgattattcatgattgaatacaaaacaaaaactcatagaaaaatgttaattgggttcctatagactgcatttgtagatattaaacataaaggaatctttacttttttcccgtcgatcctcagatttttttaatcattgagtagttttttttgtgcctgaggagtgactttttaaccctctttaatcactatgtgactatcagaaagctaaatcctaaaatttttattcgagatcttcttactaaaatttcaggattcaatatttttataaagttattctgttaacccttatcaaaaccaaccccggaaacttttttgaggtttcagtcgctatttttgagcgaaatacggcatttgtgaggttatgtccaagttttcgatccaaaataaacctaattatctatgttattttcataaaagttcagtttaaatacattttagaaacatttcgaatgaatacaaaatgccgaaaacaactattatgatgagaatcgtttcaatttggtttatttttatatatctaagacttgtgacaaacttcacagtatgacgtcatcaccaatatggcgtgtagtatgaggttgctttccggggtcggtttgataatcgaaaaattatttattttagatttgttgtcattacattgtgattttgcattgccttttgagaaagaatactccataatgcattcaatggagtccgagttgtacataaaagcaaaaaaatgtccatctagttcaaaaatggcggcatgtagtgaaatgagttgctggacaacgtatatgtaaggccgtttttggataatttgtaattttatcgtttgattttgtcaaatcatacaattagtgattgatatgtagcggatttcggtctacgaatctcaatttcttttcgataacatttttggtactaagtatagtttatgaaaaaatgtagttttaaaatttataatgattcacacgtcagtgtattaacagtatttttttctttttactatgttttggacgatctagaaatacctacattgctataatgttgtttttattttaaaaaatatggatttgtcagttaatatgacaataaatttacattagttaagacgaacacaattcaaaaatgattatcgaactagaaatataactagacactccgcaatttacttttttttgtagaaacccaccattggcatctgaaaaacaagatattgtaccaatacattcacaaatattgattcatttaaccatttgtacaaaaaaatcagtattttaaagcactaaaagataattcatgttttttaaactaacataacctagaaaaaagtttcttatacgttttttactgtctttaagcttttatgtacaatgttcgacttttccatcttgtttttattgaatgctgtatagtttttgcaactagtatgatgtaatatgtgatcttagctactagatctacaacttataaatgtatatacacacaatcttgcgcgttcgctgtgaagagtactgtgagtactgggtaatctagagaaacggtacttaacgatgttttataccaaggcaatggtttattttattgtaaaaataaaatatatagtgtagttaacacgcaaaaaaa

SEQ ID NO: 1973 - DNA, 3209 bp, Diabrotica virgifera
  SmartBlast Evalue=1E-168; Info=Hexokinase n=1 Tax=Locusta migratoria RepID=C0KJJ7_LOCMI
tcagttcaagttcagctttattcattgcaccatcagtttgtgctgaggcgattgctggtcgctttctgtgtttctaccaagacaaaaatgaggttccacactatttttgagcaagtcgacgagctcggaagagtggaagttgatctgttggggctccatggtcatggaggctccgagagttctgttgagtaccacatcactaacgagataagagacaaatgcagagagttgattttaaccaatgaaaaactacacaaattgatgaaagtatttttggaaaatgttcacagaggtttgaaaaaagaaacacacccaacatcgatcgtgaaatgttttccaacatacgtgcaagatcttccaaacggaacagaaaacggcaaatttctagccctagacctgggtggcacgaacttcagagtcctcctcatcgagctcagtggcgaacactttgaaatgaaatccaagatcttcgccattccccaacacattatgttaggatcaggcgaacaacttttcgatcacatcgccgagtgtctggctattttcgtcaaagaagagcaggtggccgaccaaaagctacctttgggtttcacattcagtttccccttgtcgcagaaaggattgacagttggataccttgaaagatggaccaagggattcaattgctccaacgtagtgggaaacgacgtggtgcaaatgttgaacgaagctattgaaagacgtggggacttcgaaatatcagtcatggcaatattgaacgattccactggcactctaatgtcctgtgcttggttgaatcgtcagtgccgaattggtgccatcgttggtaccggctccaacacttgttacgtggaaaaacaagcgaacgccgaaacatggagcgacgtggacatgggctctggaaacgtgctgatcaacctggaatggggagcctttggagatgacggcgctttggacttcatcaggactgaatatgatgaggacatcgatagaaactctgtaaaccccggaaagcaaaagcacgagaagatgatttctggaatgtacatgggagaattagtgagactggctttagaaagattcacgaaagaagctttactcttcggcggaaaaggatcagacatgttattcgaaagaggacgattctacacaaaatacgtatcagaaatagaaagtgacccaccaggagtattcaacaatcttagagatatttgtgaagaattaggacttaaacacgccacagaacaggactttatcaacatcagatacatctgtgagtgtatatcgagaagatccgcccatctagtgtctgctggtttggccactttacttaacaaaatgggcgagaagaaagtcaccattggcgtcgacggatcagtatacaggtttcacccacatttccacaacctcatgatggagaaaatcaaagaattggccgatcccagcatagagtttgatttgatgctctccgaagacggcagcggtcgaggagcagccctagtagcagcggtggcagcaagactacaaaaagaagcaggccgaacataacatcagctagtttaaaatataaatttgttattttttattagaaaaaaacgattattcatgattgaatacaaaacaaaaactcatagaaaaatgttaattgggttcctatagactgcatttgtagatattaaacataaaggaatctttacttttttcccgtcgatcctcagatttttttaatcattgagtagttttttttgtgcctgaggagtgactttttaaccctctttaatcactatgtgactatcagaaagctaaatcctaaaatttttattcgagatcttcttactaaaatttcaggattcaatatttttataaagttattctgttaacccttatcaaaaccaaccccggaaacttttttgaggtttcagtcgctatttttgagcgaaatacggcatttgtgaggttatgtccaagttttcgatccaaaataaacctaattatctatgttattttcataaaagttcagtttaaatacattttagaaacatttcgaatgaatacaaaatgccgaaaacaactattatgatgagaatcgtttcaatttggtttatttttatatatctaagacttgtgacaaacttcacagtatgacgtcatcaccaatatggcgtgtagtatgaggttgctttccggggtcggtttgataatcgaaaaattatttattttagatttgttgtcattacattgtgattttgcattgccttttgagaaagaatactccataatgcattcaatggagtccgagttgtacataaaagcaaaaaaatgtccatctagttcaaaaatggcggcatgtagtgaaatgagttgctggacaacgtatatgtaaggccgtttttggataatttgtaattttatcgtttgattttgtcaaatcatacaattagtgattgatatgtagcggatttcggtctacgaatctcaatttcttttcgataacatttttggtactaagtatagtttatgaaaaaatgtagttttaaaatttataatgattcacacgtcagtgtattaacagtatttttttctttttactatgttttggacgatctagaaatacctacattgctataatgttgtttttattttaaaaaatatggatttgtcagttaatatgacaataaatttacattagttaagacgaacacaattcaaaaatgattatcgaactagaaatataactagacactccgcaatttacttttttttgtagaaacccaccattggcatctgaaaaacaagatattgtaccaatacattcacaaatattgattcatttaaccatttgtacaaaaaaatcagtattttaaagcactaaaagataattcatgttttttaaactaacataacctagaaaaaagtttcttatacgttttttactgtctttaagcttttatgtacaatgttcgacttttccatcttgtttttattgaatgctgtatagtttttgcaactagtatgatgtaatatgtgatcttagctactagatctacaacttataaatgtatatacacacaatcttgcgcgttcgctgtgaagagtactgtgagtactgggtaatctagagaaacggtacttaacgatgttttataccaaggcaatggtttattttattgtaaaaataaaatatatagtgtagttaacacgcaaaaaaa

SEQ ID NO: 1974 - DNA, 3154 bp, Diabrotica virgifera
  SmartBlast Evalue=1E-172; Info=Hexokinase n=1 Tax=Locusta migratoria RepID=C0KJJ7_LOCMI
cggcaaaattgttcagcagttttgtgtctacgtctacgtaaatacgtagattctgtagattgtttccatttcagtatttttttagttgtttgtttgtagtgttgtacaagtcgaaaatgggttacaaaaggaacatccaggccacacctttgataagagacaaatgcagagagttgattttaaccaatgaaaaactacacaaattgatgaaagtatttttggaaaatgttcacagaggtttgaaaaaagaaacacacccaacatcgatcgtgaaatgttttccaacatacgtgcaagatcttccaaacggaacagaaaacggcaaatttctagccctagacctgggtggcacgaacttcagagtcctcctcatcgagctcagtggcgaacactttgaaatgaaatccaagatcttcgccattccccaacacattatgttaggatcaggcgaacaacttttcgatcacatcgccgagtgtctggctattttcgtcaaagaagagcaggtggccgaccaaaagctacctttgggtttcacattcagtttccccttgtcgcagaaaggattgacagttggataccttgaaagatggaccaagggattcaattgctccaacgtagtgggaaacgacgtggtgcaaatgttgaacgaagctattgaaagacgtggggacgtacagattgagatatgtgctattttgaatgacactacaggaacactaatgtcttgcgcttggaaaaatcactcaacacggataggttctattgtgggtaccggctccaacacttgttacgtggaaaaacaagcgaacgccgaaacatggagcgacgtggacatgggctctggaaacgtgctgatcaacctggaatggggagcgtttggggatgacggcgctttagacttcatcaggactgaatatgatgaggacatcgatagaaactctgtaaaccccggaaagcaaaagcacgagaagatgatttctggaatgtacatgggagaattagtgagactggctttagaaagattcacgaaagaagctttactcttcggcggaaaaggatcagacatgttattcgaaagaggacgattctacacaaaatacgtatcagaaatagaaagtgacccaccaggagtattcaacaatcttagagatatttgtgaagaattaggacttaaacacgccacagaacaggactttatcaacatcagatacatctgtgagtgtatatcgagaagatccgcccatctagtgtctgctggtttggccactttacttaacaaaatgggcgagaagaaagtcaccattggcgtcgacggatcagtatacaggtttcacccacatttccacaacctcatgatggagaaaatcaaagaattggccgatcccagcatagagtttgatttgatgctctccgaagacggcagcggtcgaggagcagccctagtagcagcggtggcagcaagactacaaaaagaagcaggccgaacataacatcagctagtttaaaatataaatttgttattttttattagaaaaaaacgattattcatgattgaatacaaaacaaaaactcatagaaaaatgttaattgggttcctatagactgcatttgtagatattaaacataaaggaatctttacttttttcccgtcgatcctcagatttttttaatcattgagtagttttttttgtgcctgaggagtgactttttaaccctctttaatcactatgtgactatcagaaagctaaatcctaaaatttttattcgagatcttcttactaaaatttcaggattcaatatttttataaagttattctgttaacccttatcaaaaccaaccccggaaacttttttgaggtttcagtcgctatttttgagcgaaatacggcatttgtgaggttatgtccaagttttcgatccaaaataaacctaattatctatgttattttcataaaagttcagtttaaatacattttagaaacatttcgaatgaatacaaaatgccgaaaacaactattatgatgagaatcgtttcaatttggtttatttttatatatctaagacttgtgacaaacttcacagtatgacgtcatcaccaatatggcgtgtagtatgaggttgctttccggggtcggtttgataatcgaaaaattatttattttagatttgttgtcattacattgtgattttgcattgccttttgagaaagaatactccataatgcattcaatggagtccgagttgtacataaaagcaaaaaaatgtccatctagttcaaaaatggcggcatgtagtgaaatgagttgctggacaacgtatatgtaaggccgtttttggataatttgtaattttatcgtttgattttgtcaaatcatacaattagtgattgatatgtagcggatttcggtctacgaatctcaatttcttttcgataacatttttggtactaagtatagtttatgaaaaaatgtagttttaaaatttataatgattcacacgtcagtgtattaacagtatttttttctttttactatgttttggacgatctagaaatacctacattgctataatgttgtttttattttaaaaaatatggatttgtcagttaatatgacaataaatttacattagttaagacgaacacaattcaaaaatgattatcgaactagaaatataactagacactccgcaatttacttttttttgtagaaacccaccattggcatctgaaaaacaagatattgtaccaatacattcacaaatattgattcatttaaccatttgtacaaaaaaatcagtattttaaagcactaaaagataattcatgttttttaaactaacataacctagaaaaaagtttcttatacgttttttactgtctttaagcttttatgtacaatgttcgacttttccatcttgtttttattgaatgctgtatagtttttgcaactagtatgatgtaatatgtgatcttagctactagatctacaacttataaatgtatatacacacaatcttgcgcgttcgctgtgaagagtactgtgagtactgggtaatctagagaaacggtacttaacgatgttttataccaaggcaatggtttattttattgtaaaaataaaatatatagtgtagttaacacgcaaaaaaa

SEQ ID NO: 1975 - DNA, 3154 bp, Diabrotica virgifera; identical to SEQ ID NO: 1974
  SmartBlast Evalue=1E-172; Info=Hexokinase n=1 Tax=Locusta migratoria RepID=C0KJJ7_LOCMI

SEQ ID NO: 1976 - DNA, 3154 bp, Diabrotica virgifera; identical to SEQ ID NO: 1965
  SmartBlast Evalue=1E-168; Info=Hexokinase n=1 Tax=Locusta migratoria RepID=C0KJJ7_LOCMI

SEQ ID NO: 1977 - DNA, 1276 bp, Diabrotica virgifera
  SmartBlast Evalue=1E-47; Info=Endonuclease-reverse transcriptase n=1 Tax=Bombyx mori RepID=D7F170_BOMMO
aggatgccatacttctcgccccgcatcacatgtccgagatactgtagctttttttctttaattgtaagttcaacttccttctctttacctattcttctcagcacttcattgttagtaactctatctacccaggaatccctcataattcttctataggtccacatttgaaatgtggacctatagaagaattagggaaaaaaggtccaccttaatttaataaacaagcctaaagtaggctaggagaaattaacaatttgataaatgtgaaattgttcacactcaaaaagtgtctagtttgttgtgaaaattagtagatttattatttaaagtttcaattaagtccgtaatttttgttgttcatcatcatcatcattggctcgacagccctttctgggtcttggcctgttccaggattcttctccattctgatctgtttcgtgctttttttctccagttttttatttttaaggttattatatcattttctatttgttctaaatatctcagcttcggtcttcctcttgttctttttcctactggcatctgtttgaatattttgtttggtatttcgccttcttccattctttctacatgtcccatccaacgcagccgtcctattttaatgaatgttatgatatccggatcctggtatatttcgtatagttcaaagttgtaccttcttcgccaaattctaggtgtccagtgtccaggtttctgagccgtatgtgagtaccggtcttattaaggttttgtatatttggcattttgtttttcttgcgacgttatctgatcttagttgccgaattaagccatggtaacttttattggcaataaatattcgccttttcacttcctccgcagcgttattatcagacgtgactagggatcccaagtatgtaaagttttttaccccctcaatgttgtattctcctattgttatattttgtggctgccttatttctgcgttttacttacctgcatatattttgttttgttctggttttattttctgtatacttttatataaaaacagttgttcagaactgttcagcgacgtattagtataatacaatatgaatggattagcgtagaaggccaatatgttcaaccaaaaaagatgtatttggtgacctttcagtgactttcttgggtgtgaatctgtctttccagtgtactcctcctcgttcaaaaacaaaccatagacgagcagggattgactatgtgcgttctttatcatattttcttctgttaattgtatccgccaatatcgtattaa

SEQ ID NO: 1978 - DNA, 1096 bp, Diabrotica virgifera
  SmartBlast Evalue=9E-61; Info=Endonuclease-reverse transcriptase n=1 Tax=Bombyx mori RepID=D7F170_BOMMO
ttcaaatttggcatctatacaattgcaataatataaaaatagtgcctactcaaatgacgggacctctagatagataatgttataactctctcatttgtacatacatcatcatcatcatcattggctcgacagccctttctgggtcttggcctgttccaggattcttctccattctgatctgtttcgtgctttttttctccagttttttatttttaaggttattatatcattttctatttgttctaaatatctcagcttcggtcttcctcttgttctttttcctactggcatctgtttgaatattttgtttggtatttcgccttcttccattctttctacatgtcccatccaacgcagccgtcctattttaatgaatgttatgatatccggatcctggtatatttcgtatagttcaaagttgtaccttcttcgccaaattccattttcttttgtgcccttatatatgtgtcgcaagatttttctttcaaaggtggctagcaatgtttcctctcttttagtgagtgtccaggtttctgagccgtatgtgagtaccggtcttattagggttttgtatatttggcattttgttttccttgcgacgttgtctgatcttagttgccgaattaagccatgataacttttattggcaataaatattcgcctcttcacttcctctgctacgttattatcagatgtgactagggatcccaagtatgtaaagttttttaccccctcaatgttgtattctcctattgttatattttgtggctgccttatttctgcgttttacttacctgcatatattttgttttgttctggttttattttctgtatacttttatataaaaacagttgttcagaactgttcagcgacgtattagtataatacaatatgaatggattagcgtagaaggccaatatgttcaaccaaaaaagatgtatttggtgacctttctagtgactttcttgggtgtgaatctgtctttccagtgtactcctcctcgttcaaaaacaaaccatagacgagcagggattgactatgtgcgttctttatcatattttcttctgttaattgtatccgccaatatcgtattaa

SEQ ID NO: 1979 - DNA, 1024 bp, Diabrotica virgifera
  SmartBlast Evalue=1E-47; Info=Endonuclease-reverse transcriptase n=1 Tax=Bombyx mori RepID=D7F170_BOMMO
ttcaaatttggcatctatacaattgcaataatataaaaatagtgcctactcaaatgacgggacctctagatagataatgttataactctctcatttgtacatacatcatcatcatcatcattggctcgacagccctttctgggtcttggcctgttccaggattcttctccattctgatctgtttcgtgctttttttctccagttttttatttttaaggttattatatcattttctatttgttctaaatatctcagcttcggtcttcctcttgttctttttcctactggcatctgtttgaatattttgtttggtatttcgccttcttccattctttctacatgtcccatccaacgcagccgtcctattttaatgaatgttatgatatccggatcctggtatatttcgtatagttcaaagttgtaccttcttcgccaaattctaggtgtccagtgtccaggtttctgagccgtatgtgagtaccggtcttattaaggttttgtatatttggcattttgtttttcttgcgacgttatctgatcttagttgccgaattaagccatggtaacttttattggcaataaatattcgccttttcacttcctccgcagcgttattatcagacgtgactagggatcccaagtatgtaaagttttttaccccctcaatgttgtattctcctattgttatattttgtggctgccttatttctgcgttttacttacctgcatatattttgttttgttctggttttattttctgtatacttttatataaaaacagttgttcagaactgttcagcgacgtattagtataatacaatatgaatggattagcgtagaaggccaatatgttcaaccaaaaaagatgtatttggtgacctttcagtgactttcttgggtgtgaatctgtctttccagtgtactcctcctcgttcaaaaacaaaccatagacgagcagggattgactatgtgcgttctttatcatattttcttctgttaattgtatccgccaatatcgtattaa

SEQ ID NO: 1980 - DNA, 3140 bp, Diabrotica virgifera
  misc_feature (29)..(29): n is a, c, g, or t
  SmartBlast Evalue=1E-131; Info=Endonuclease-reverse transcriptase n=1 Tax=Bombyx mori RepID=D7F170_BOMMO
ttttgtgtcacattggaactactaaaaancgtatttttttgtaacaaagaaatcgaacgtcactgacttggcaacatttcgcaccgatgtgtaataaaaattattgtttttgatagtataaacgtcactgtcagtgtcgaattaccgacgaactgttgcctcatttttgaaagttcgcagaactttcgcaatcttggaccgcgtttgttgctacctgttgatcgctactgtttgctcttaacttgaatcgattcatttttttttggcgtagtttctctgtgtactaacagatgacacctaatattggtttacccttatacgtgcacaatctcagacagcagctatcaacgtttcaggacaacactttatccaaacactctttgaaataaccatatgacacagccaaatttgtccactgtcggacataggcctcgtcaagatgtcttcacccttctctgtccttcgcaactgcaatccagtttgtagctattcttttaatgtcgtccgtccatctgatcggtagtcttccacgatttctcttgtctgcccttgaccaccactctaaaatctttgtccatctgttctctctgtcttgcgacgtgtcctggccatttccacttcaacttcattatgcattttatgttttccactccagttcttgttctttgccatatctcgtcatttcttattctgtcactcaaatttaggccaagcatgtatctttccatttttcgttgtgctactttttttgtgaatttgatggccttggtcaagcaaattagccagacattaattctgctacttgtaataattttcttattcttattgatgctttagtcaatgtcagtgtttcagctccataagtgagcaccggaagtacgcactggttaaatgcttttctttttagctttactgggatgttttcgatgaatacgtctcttagtttgccatacgctgcccatcctaaagctatcatcatcatcactggctcgacaaccctttctgggtcttggcctgttccaggattcttctccattctgatctgtttcgtgctttttttctccagttttttatttttaaggttattatatcattttctatttgttctaaatatctcagcttcggtcttcctcttgttctttttcctactggcatctgtttgaatattttgtttggtatttcgccttcttccattctttctacatgtcccatccaacgcagccgtcctattttaatgaatgttatgatatccggatcctggtatatttcgtatagttcaaagttgtaccttcttcgccaaattccattttcttttgtgcccttatatatgtgtcgcaagatttttctttcaaaggtggctagcaatgtttcctctcttttagtgagtgtccaggtttctgagccgtatgtgagtaccggtcttattagggttttgtatatttggcattttgttttccttgcgacgttgtctgatcttagttgccgaattaagccatgataacttttattggcaataaatattcgcctcttcacttcctctgctacgttattatcagatgtgactagggatcccaagtatgtaaagttttttaccccctcaatgttgtattctcctattgttatattttgtggctgccttatttctgtcgtttttacttacctgcatatattttgttttgttctggttgattttaaggccactattttgtgcagctcgttctatttgattgaatgcctctatcatttctcttcttgatcttgcgattatgtcaacatcatctgcaaatgctagtatttgcacgcttttattaattattgttcctcgagtattgactgttgtgtccctcattattttctcgagtacgatgttgaacaagatgcatgatagagcgtctccctggcgtagtccctttttcacatctttgtttccgttagttcgttttgtatccggattttactttctacttttagagattcttttatcagttctattagttgtgttggtatattaaattctttcattgcttttattaagaattctcggtttatattgtcatatgcgctttcgaagtctatgaagagatgatgtgtgtcgatgttatgttcacttgttttttcgaggatctgtcgcagaacaaatatctggtctattgttgacttctgtctacagaagccactttggtatttgccaactattttttcagcgtgtggtctaagtctttcataaatgacgttggacattattttgtatgctgcattcagcagcgtaattccacggtagtttccacattccaaccgatctccttttttatgtaatggtacaataataccgctattccactccgctggtagctgtttatttgaccatatctttgttatcaattcatgtattgttttctgtagtgcgtctcctccttccttctagataattcgcatgtttggttgtgtctacctatctatttatacagatagatgtatttttcaacagttttcgatggttccatatgccagttttctagtttcaatggttcgcaaggtactcacacccttcgtattgtgcatataagacaaataaaagcaatagaaacaacttgtagcttgtaggcaaaagcatacaaaacgggccttctacagatcaatattgtttagatgtgacagctaaattagatgaataatgtcgcatggatagctcagtggactggtagattcacttcgatctgagtaattaagtgggttgactgttcgagccacacaagaaacagatattcagccctattctgtaacttttaacaaatcgaatagaaatgaccaagtcgaatcataattaccctaaattggaatgtttcgatatctatcgcgtcattttcgtgtttggattggcattctgtaactcacatcgtaagcaggttaaatcgaaatcgacaatttctatttcacgcggtcaggaggggtggcaaccccgcattgtcaagcgaaattagtgttctgtggcctgcttgttactggttctaaatttgaaatacgacaccgttgccatatcttcaatttttcatactatcacattacatacagttgatttaaaaaatagttttcaaataacaaaaaaggaaagttttgaaaagtaaacaacaaaatattag

SEQ ID NO: 1981 - DNA, 3068 bp, Diabrotica virgifera
  misc_feature (29)..(29): n is a, c, g, or t
  SmartBlast Evalue=1E-121; Info=Endonuclease-reverse transcriptase n=1 Tax=Bombyx mori RepID=D7F170_BOMMO
ttttgtgtcacattggaactactaaaaancgtatttttttgtaacaaagaaatcgaacgtcactgacttggcaacatttcgcaccgatgtgtaataaaaattattgtttttgatagtataaacgtcactgtcagtgtcgaattaccgacgaactgttgcctcatttttgaaagttcgcagaactttcgcaatcttggaccgcgtttgttgctacctgttgatcgctactgtttgctcttaacttgaatcgattcatttttttttggcgtagtttctctgtgtactaacagatgacacctaatattggtttacccttatacgtgcacaatctcagacagcagctatcaacgtttcaggacaacactttatccaaacactctttgaaataaccatatgacacagccaaatttgtccactgtcggacataggcctcgtcaagatgtcttcacccttctctgtccttcgcaactgcaatccagtttgtagctattcttttaatgtcgtccgtccatctgatcggtagtcttccacgatttctcttgtctgcccttgaccaccactctaaaatctttgtccatctgttctctctgtcttgcgacgtgtcctggccatttccacttcaacttcattatgcattttatgttttccactccagttcttgttctttgccatatctcgtcatttcttattctgtcactcaaatttaggccaagcatgtatctttccatttttcgttgtgctactttttttgtgaatttgatggccttggtcaagcaaattagccagacattaattctgctacttgtaataattttcttattcttattgatgctttagtcaatgtcagtgtttcagctccataagtgagcaccggaagtacgcactggttaaatgcttttctttttagctttactgggatgttttcgatgaatacgtctcttagtttgccatacgctgcccatcctaaagctatcatcatcatcactggctcgacaaccctttctgggtcttggcctgttccaggattcttctccattctgatctgtttcgtgctttttttctccagttttttatttttaaggttattatatcattttctatttgttctaaatatctcagcttcggtcttcctcttgttctttttcctactggcatctgtttgaatattttgtttggtatttcgccttcttccattctttctacatgtcccatccaacgcagccgtcctattttaatgaatgttatgatatccggatcctggtatatttcgtatagttcaaagttgtaccttcttcgccaaattctaggtgtccagtgtccaggtttctgagccgtatgtgagtaccggtcttattaaggttttgtatatttggcattttgtttttcttgcgacgttatctgatcttagttgccgaattaagccatggtaacttttattggcaataaatattcgccttttcacttcctccgcagcgttattatcagacgtgactagggatcccaagtatgtaaagttttttaccccctcaatgttgtattctcctattgttatattttgtggctgccttatttctgtgtttttacttacctgcatatattttgttttgttctggttgattttaaggccactattttgtgcagctcgttctatttgattgaatgcctctatcatttctcttcttgatcttgcgattatgtcaacatcatctgcaaatgctagtatttgcacgcttttattaattattgttcctcgagtattgactgttgtgtccctcattattttctcgagtacgatgttgaacaagatgcatgatagagcgtctccctggcgtagtccctttttcacatctttgtttccgttagttcgttttgtatccggattttactttctacttttagagattcttttatcagttctattagttgtgttggtatattaaattctttcattgcttttattaagaattctcggtttatattgtcatatgcgctttcgaagtctatgaagagatgatgtgtgtcgatgttatgttcacttgttttttcgaggatctgtcgcagaacaaatatctggtctattgttgacttctgtctacagaagccactttggtatttgccaactattttttcagcgtgtggtctaagtctttcataaatgacgttggacattattttgtatgctgcattcagcagcgtaattccacggtagtttccacattccaaccgatctccttttttatgtaatggtacaataataccgctattccactccgctggtagctgtttatttgaccatatctttgttatcaattcatgtattgttttctgtagtgcgtctcctccttccttctagataattcgcatgtttggttgtgtctacctatctatttatacagatagatgtatttttcaacagttttcgatggttccatatgccagttttctagtttcaatggttcgcaaggtactcacacccttcgtattgtgcatataagacaaataaaagcaatagaaacaacttgtagcttgtaggcaaaagcatacaaaacgggccttctacagatcaatattgtttagatgtgacagctaaattagatgaataatgtcgcatggatagctcagtggactggtagattcacttcgatctgagtaattaagtgggttgactgttcgagccacacaagaaacagatattcagccctattctgtaacttttaacaaatcgaatagaaatgaccaagtcgaatcataattaccctaaattggaatgtttcgatatctatcgcgtcattttcgtgtttggattggcattctgtaactcacatcgtaagcaggttaaatcgaaatcgacaatttctatttcacgcggtcaggaggggtggcaaccccgcattgtcaagcgaaattagtgttctgtggcctgcttgttactggttctaaatttgaaatacgacaccgttgccatatcttcaatttttcatactatcacattacatacagttgatttaaaaaatagttttcaaataacaaaaaaggaaagttttgaaaagtaaacaacaaaatattag

SEQ ID NO: 1982 - DNA, 2528 bp, Diabrotica virgifera
  SmartBlast Evalue=1E-131; Info=Endonuclease-reverse transcriptase n=1 Tax=Bombyx mori RepID=D7F170_BOMMO
aggatgccatacttctcgccccgcatcacatgtccgagatactgtagctttttttctttaattgtaagttcaacttccttctctttacctattcttctcagcacttcattgttagtaactctatctacccaggaatccctcataattcttctataggtccacatttgaaatgtggacctatagaagaattagggaaaaaaggtccaccttaatttaataaacaagcctaaagtaggctaggagaaattaacaatttgataaatgtgaaattgttcacactcaaaaagtgtctagtttgttgtgaaaattagtagatttattatttaaagtttcaattaagtccgtaatttttgttgttcatcatcatcatcattggctcgacagccctttctgggtcttggcctgttccaggattcttctccattctgatctgtttcgtgctttttttctccagttttttatttttaaggttattatatcattttctatttgttctaaatatctcagcttcggtcttcctcttgttctttttcctactggcatctgtttgaatattttgtttggtatttcgccttcttccattctttctacatgtcccatccaacgcagccgtcctattttaatgaatgttatgatatccggatcctggtatatttcgtatagttcaaagttgtaccttcttcgccaaattccattttcttttgtgcccttatatatgtgtcgcaagatttttctttcaaaggtggctagcaatgtttcctctcttttagtgagtgtccaggtttctgagccgtatgtgagtaccggtcttattagggttttgtatatttggcattttgttttccttgcgacgttgtctgatcttagttgccgaattaagccatgataacttttattggcaataaatattcgcctcttcacttcctctgctacgttattatcagatgtgactagggatcccaagtatgtaaagttttttaccccctcaatgttgtattctcctattgttatattttgtggctgccttatttctgtcgtttttacttacctgcatatattttgttttgttctggttgattttaaggccactattttgtgcagctcgttctatttgattgaatgcctctatcatttctcttcttgatcttgcgattatgtcaacatcatctgcaaatgctagtatttgcacgcttttattaattattgttcctcgagtattgactgttgtgtccctcattattttctcgagtacgatgttgaacaagatgcatgatagagcgtctccctggcgtagtccctttttcacatctttgtttccgttagttcgttttgtatccggattttactttctacttttagagattcttttatcagttctattagttgtgttggtatattaaattctttcattgcttttattaagaattctcggtttatattgtcatatgcgctttcgaagtctatgaagagatgatgtgtgtcgatgttatgttcacttgttttttcgaggatctgtcgcagaacaaatatctggtctattgttgacttctgtctacagaagccactttggtatttgccaactattttttcagcgtgtggtctaagtctttcataaatgacgttggacattattttgtatgctgcattcagcagcgtaattccacggtagtttccacattccaaccgatctccttttttatgtaatggtacaataataccgctattccactccgctggtagctgtttatttgaccatatctttgttatcaattcatgtattgttttctgtagtgcgtctcctccttccttctagataattcgcatgtttggttgtgtctacctatctatttatacagatagatgtatttttcaacagttttcgatggttccatatgccagttttctagtttcaatggttcgcaaggtactcacacccttcgtattgtgcatataagacaaataaaagcaatagaaacaacttgtagcttgtaggcaaaagcatacaaaacgggccttctacagatcaatattgtttagatgtgacagctaaattagatgaataatgtcgcatggatagctcagtggactggtagattcacttcgatctgagtaattaagtgggttgactgttcgagccacacaagaaacagatattcagccctattctgtaacttttaacaaatcgaatagaaatgaccaagtcgaatcataattaccctaaattggaatgtttcgatatctatcgcgtcattttcgtgtttggattggcattctgtaactcacatcgtaagcaggttaaatcgaaatcgacaatttctatttcacgcggtcaggaggggtggcaaccccgcattgtcaagcgaaattagtgttctgtggcctgcttgttactggttctaaatttgaaatacgacaccgttgccatatcttcaatttttcatactatcacattacatacagttgatttaaaaaatagttttcaaataacaaaaaaggaaagttttgaaaagtaaacaacaaaatattag

SEQ ID NO: 1983 - DNA, 2456 bp, Diabrotica virgifera
  SmartBlast Evalue=1E-121; Info=Endonuclease-reverse transcriptase n=1 Tax=Bombyx mori RepID=D7F170_BOMMO
aggatgccatacttctcgccccgcatcacatgtccgagatactgtagctttttttctttaattgtaagttcaacttccttctctttacctattcttctcagcacttcattgttagtaactctatctacccaggaatccctcataattcttctataggtccacatttgaaatgtggacctatagaagaattagggaaaaaaggtccaccttaatttaataaacaagcctaaagtaggctaggagaaattaacaatttgataaatgtgaaattgttcacactcaaaaagtgtctagtttgttgtgaaaattagtagatttattatttaaagtttcaattaagtccgtaatttttgttgttcatcatcatcatcattggctcgacagccctttctgggtcttggcctgttccaggattcttctccattctgatctgtttcgtgctttttttctccagttttttatttttaaggttattatatcattttctatttgttctaaatatctcagcttcggtcttcctcttgttctttttcctactggcatctgtttgaatattttgtttggtatttcgccttcttccattctttctacatgtcccatccaacgcagccgtcctattttaatgaatgttatgatatccggatcctggtatatttcgtatagttcaaagttgtaccttcttcgccaaattctaggtgtccagtgtccaggtttctgagccgtatgtgagtaccggtcttattaaggttttgtatatttggcattttgtttttcttgcgacgttatctgatcttagttgccgaattaagccatggtaacttttattggcaataaatattcgccttttcacttcctccgcagcgttattatcagacgtgactagggatcccaagtatgtaaagttttttaccccctcaatgttgtattctcctattgttatattttgtggctgccttatttctgtgtttttacttacctgcatatattttgttttgttctggttgattttaaggccactattttgtgcagctcgttctatttgattgaatgcctctatcatttctcttcttgatcttgcgattatgtcaacatcatctgcaaatgctagtatttgcacgcttttattaattattgttcctcgagtattgactgttgtgtccctcattattttctcgagtacgatgttgaacaagatgcatgatagagcgtctccctggcgtagtccctttttcacatctttgtttccgttagttcgttttgtatccggattttactttctacttttagagattcttttatcagttctattagttgtgttggtatattaaattctttcattgcttttattaagaattctcggtttatattgtcatatgcgctttcgaagtctatgaagagatgatgtgtgtcgatgttatgttcacttgttttttcgaggatctgtcgcagaacaaatatctggtctattgttgacttctgtctacagaagccactttggtatttgccaactattttttcagcgtgtggtctaagtctttcataaatgacgttggacattattttgtatgctgcattcagcagcgtaattccacggtagtttccacattccaaccgatctccttttttatgtaatggtacaataataccgctattccactccgctggtagctgtttatttgaccatatctttgttatcaattcatgtattgttttctgtagtgcgtctcctccttccttctagataattcgcatgtttggttgtgtctacctatctatttatacagatagatgtatttttcaacagttttcgatggttccatatgccagttttctagtttcaatggttcgcaaggtactcacacccttcgtattgtgcatataagacaaataaaagcaatagaaacaacttgtagcttgtaggcaaaagcatacaaaacgggccttctacagatcaatattgtttagatgtgacagctaaattagatgaataatgtcgcatggatagctcagtggactggtagattcacttcgatctgagtaattaagtgggttgactgttcgagccacacaagaaacagatattcagccctattctgtaacttttaacaaatcgaatagaaatgaccaagtcgaatcataattaccctaaattggaatgtttcgatatctatcgcgtcattttcgtgtttggattggcattctgtaactcacatcgtaagcaggttaaatcgaaatcgacaatttctatttcacgcggtcaggaggggtggcaaccccgcattgtcaagcgaaattagtgttctgtggcctgcttgttactggttctaaatttgaaatacgacaccgttgccatatcttcaatttttcatactatcacattacatacagttgatttaaaaaatagttttcaaataacaaaaaaggaaagttttgaaaagtaaacaacaaaatattag

SEQ ID NO: 1984 - DNA, 2276 bp, Diabrotica virgifera
  SmartBlast Evalue=1E-131; Info=Endonuclease-reverse transcriptase n=1 Tax=Bombyx mori RepID=D7F170_BOMMO
ttcaaatttggcatctatacaattgcaataatataaaaatagtgcctactcaaatgacgggacctctagatagataatgttataactctctcatttgtacatacatcatcatcatcatcattggctcgacagccctttctgggtcttggcctgttccaggattcttctccattctgatctgtttcgtgctttttttctccagttttttatttttaaggttattatatcattttctatttgttctaaatatctcagcttcggtcttcctcttgttctttttcctactggcatctgtttgaatattttgtttggtatttcgccttcttccattctttctacatgtcccatccaacgcagccgtcctattttaatgaatgttatgatatccggatcctggtatatttcgtatagttcaaagttgtaccttcttcgccaaattccattttcttttgtgcccttatatatgtgtcgcaagatttttctttcaaaggtggctagcaatgtttcctctcttttagtgagtgtccaggtttctgagccgtatgtgagtaccggtcttattagggttttgtatatttggcattttgttttccttgcgacgttgtctgatcttagttgccgaattaagccatgataacttttattggcaataaatattcgcctcttcacttcctctgctacgttattatcagatgtgactagggatcccaagtatgtaaagttttttaccccctcaatgttgtattctcctattgttatattttgtggctgccttatttctgtcgtttttacttacctgcatatattttgttttgttctggttgattttaaggccactattttgtgcagctcgttctatttgattgaatgcctctatcatttctcttcttgatcttgcgattatgtcaacatcatctgcaaatgctagtatttgcacgcttttattaattattgttcctcgagtattgactgttgtgtccctcattattttctcgagtacgatgttgaacaagatgcatgatagagcgtctccctggcgtagtccctttttcacatctttgtttccgttagttcgttttgtatccggattttactttctacttttagagattcttttatcagttctattagttgtgttggtatattaaattctttcattgcttttattaagaattctcggtttatattgtcatatgcgctttcgaagtctatgaagagatgatgtgtgtcgatgttatgttcacttgttttttcgaggatctgtcgcagaacaaatatctggtctattgttgacttctgtctacagaagccactttggtatttgccaactattttttcagcgtgtggtctaagtctttcataaatgacgttggacattattttgtatgctgcattcagcagcgtaattccacggtagtttccacattccaaccgatctccttttttatgtaatggtacaataataccgctattccactccgctggtagctgtttatttgaccatatctttgttatcaattcatgtattgttttctgtagtgcgtctcctccttccttctagataattcgcatgtttggttgtgtctacctatctatttatacagatagatgtatttttcaacagttttcgatggttccatatgccagttttctagtttcaatggttcgcaaggtactcacacccttcgtattgtgcatataagacaaataaaagcaatagaaacaacttgtagcttgtaggcaaaagcatacaaaacgggccttctacagatcaatattgtttagatgtgacagctaaattagatgaataatgtcgcatggatagctcagtggactggtagattcacttcgatctgagtaattaagtgggttgactgttcgagccacacaagaaacagatattcagccctattctgtaacttttaacaaatcgaatagaaatgaccaagtcgaatcataattaccctaaattggaatgtttcgatatctatcgcgtcattttcgtgtttggattggcattctgtaactcacatcgtaagcaggttaaatcgaaatcgacaatttctatttcacgcggtcaggaggggtggcaaccccgcattgtcaagcgaaattagtgttctgtggcctgcttgttactggttctaaatttgaaatacgacaccgttgccatatcttcaatttttcatactatcacattacatacagttgatttaaaaaatagttttcaaataacaaaaaaggaaagttttgaaaagtaaacaacaaaatattag

SEQ ID NO: 1985 - DNA, 2204 bp, Diabrotica virgifera
  SmartBlast Evalue=1E-121; Info=Endonuclease-reverse transcriptase n=1 Tax=Bombyx mori RepID=D7F170_BOMMO
ttcaaatttggcatctatacaattgcaataatataaaaatagtgcctactcaaatgacgggacctctagatagataatgttataactctctcatttgtacatacatcatcatcatcatcattggctcgacagccctttctgggtcttggcctgttccaggattcttctccattctgatctgtttcgtgctttttttctccagttttttatttttaaggttattatatcattttctatttgttctaaatatctcagcttcggtcttcctcttgttctttttcctactggcatctgtttgaatattttgtttggtatttcgccttcttccattctttctacatgtcccatccaacgcagccgtcctattttaatgaatgttatgatatccggatcctggtatatttcgtatagttcaaagttgtaccttcttcgccaaattctaggtgtccagtgtccaggtttctgagccgtatgtgagtaccggtcttattaaggttttgtatatttggcattttgtttttcttgcgacgttatctgatcttagttgccgaattaagccatggtaacttttattggcaataaatattcgccttttcacttcctccgcagcgttattatcagacgtgactagggatcccaagtatgtaaagttttttaccccctcaatgttgtattctcctattgttatattttgtggctgccttatttctgtgtttttacttacctgcatatattttgttttgttctggttgattttaaggccactattttgtgcagctcgttctatttgattgaatgcctctatcatttctcttcttgatcttgcgattatgtcaacatcatctgcaaatgctagtatttgcacgcttttattaattattgttcctcgagtattgactgttgtgtccctcattattttctcgagtacgatgttgaacaagatgcatgatagagcgtctccctggcgtagtccctttttcacatctttgtttccgttagttcgttttgtatccggattttactttctacttttagagattcttttatcagttctattagttgtgttggtatattaaattctttcattgcttttattaagaattctcggtttatattgtcatatgcgctttcgaagtctatgaagagatgatgtgtgtcgatgttatgttcacttgttttttcgaggatctgtcgcagaacaaatatctggtctattgttgacttctgtctacagaagccactttggtatttgccaactattttttcagcgtgtggtctaagtctttcataaatgacgttggacattattttgtatgctgcattcagcagcgtaattccacggtagtttccacattccaaccgatctccttttttatgtaatggtacaataataccgctattccactccgctggtagctgtttatttgaccatatctttgttatcaattcatgtattgttttctgtagtgcgtctcctccttccttctagataattcgcatgtttggttgtgtctacctatctatttatacagatagatgtatttttcaacagttttcgatggttccatatgccagttttctagtttcaatggttcgcaaggtactcacacccttcgtattgtgcatataagacaaataaaagcaatagaaacaacttgtagcttgtaggcaaaagcatacaaaacgggccttctacagatcaatattgtttagatgtgacagctaaattagatgaataatgtcgcatggatagctcagtggactggtagattcacttcgatctgagtaattaagtgggttgactgttcgagccacacaagaaacagatattcagccctattctgtaacttttaacaaatcgaatagaaatgaccaagtcgaatcataattaccctaaattggaatgtttcgatatctatcgcgtcattttcgtgtttggattggcattctgtaactcacatcgtaagcaggttaaatcgaaatcgacaatttctatttcacgcggtcaggaggggtggcaaccccgcattgtcaagcgaaattagtgttctgtggcctgcttgttactggttctaaatttgaaatacgacaccgttgccatatcttcaatttttcatactatcacattacatacagttgatttaaaaaatagttttcaaataacaaaaaaggaaagttttgaaaagtaaacaacaaaatattag

SEQ ID NO: 1986 - DNA, 1960 bp, Diabrotica virgifera
  misc_feature (29)..(29): n is a, c, g, or t
  SmartBlast Evalue=2E-60; Info=Endonuclease-reverse transcriptase n=1 Tax=Bombyx mori RepID=D7F170_BOMMO
ttttgtgtcacattggaactactaaaaancgtatttttttgtaacaaagaaatcgaacgtcactgacttggcaacatttcgcaccgatgtgtaataaaaattattgtttttgatagtataaacgtcactgtcagtgtcgaattaccgacgaactgttgcctcatttttgaaagttcgcagaactttcgcaatcttggaccgcgtttgttgctacctgttgatcgctactgtttgctcttaacttgaatcgattcatttttttttggcgtagtttctctgtgtactaacagatgacacctaatattggtttacccttatacgtgcacaatctcagacagcagctatcaacgtttcaggacaacactttatccaaacactctttgaaataaccatatgacacagccaaatttgtccactgtcggacataggcctcgtcaagatgtcttcacccttctctgtccttcgcaactgcaatccagtttgtagctattcttttaatgtcgtccgtccatctgatcggtagtcttccacgatttctcttgtctgcccttgaccaccactctaaaatctttgtccatctgttctctctgtcttgcgacgtgtcctggccatttccacttcaacttcattatgcattttatgttttccactccagttcttgttctttgccatatctcgtcatttcttattctgtcactcaaatttaggccaagcatgtatctttccatttttcgttgtgctactttttttgtgaatttgatggccttggtcaagcaaattagccagacattaattctgctacttgtaataattttcttattcttattgatgctttagtcaatgtcagtgtttcagctccataagtgagcaccggaagtacgcactggttaaatgcttttctttttagctttactgggatgttttcgatgaatacgtctcttagtttgccatacgctgcccatcctaaagctatcatcatcatcactggctcgacaaccctttctgggtcttggcctgttccaggattcttctccattctgatctgtttcgtgctttttttctccagttttttatttttaaggttattatatcattttctatttgttctaaatatctcagcttcggtcttcctcttgttctttttcctactggcatctgtttgaatattttgtttggtatttcgccttcttccattctttctacatgtcccatccaacgcagccgtcctattttaatgaatgttatgatatccggatcctggtatatttcgtatagttcaaagttgtaccttcttcgccaaattccattttcttttgtgcccttatatatgtgtcgcaagatttttctttcaaaggtggctagcaatgtttcctctcttttagtgagtgtccaggtttctgagccgtatgtgagtaccggtcttattagggttttgtatatttggcattttgttttccttgcgacgttgtctgatcttagttgccgaattaagccatgataacttttattggcaataaatattcgcctcttcacttcctctgctacgttattatcagatgtgactagggatcccaagtatgtaaagttttttaccccctcaatgttgtattctcctattgttatattttgtggctgccttatttctgcgttttacttacctgcatatattttgttttgttctggttttattttctgtatacttttatataaaaacagttgttcagaactgttcagcgacgtattagtataatacaatatgaatggattagcgtagaaggccaatatgttcaaccaaaaaagatgtatttggtgacctttctagtgactttcttgggtgtgaatctgtctttccagtgtactcctcctcgttcaaaaacaaaccatagacgagcagggattgactatgtgcgttctttatcatattttcttctgttaattgtatccgccaatatcgtattaa

SEQ ID NO: 1987 - DNA, 1888 bp, Diabrotica virgifera
  misc_feature (29)..(29): n is a, c, g, or t
  SmartBlast Evalue=2E-47; Info=Endonuclease-reverse transcriptase n=1 Tax=Bombyx mori RepID=D7F170_BOMMO
ttttgtgtcacattggaactactaaaaancgtatttttttgtaacaaagaaatcgaacgtcactgacttggcaacatttcgcaccgatgtgtaataaaaattattgtttttgatagtataaacgtcactgtcagtgtcgaattaccgacgaactgttgcctcatttttgaaagttcgcagaactttcgcaatcttggaccgcgtttgttgctacctgttgatcgctactgtttgctcttaacttgaatcgattcatttttttttggcgtagtttctctgtgtactaacagatgacacctaatattggtttacccttatacgtgcacaatctcagacagcagctatcaacgtttcaggacaacactttatccaaacactctttgaaataaccatatgacacagccaaatttgtccactgtcggacataggcctcgtcaagatgtcttcacccttctctgtccttcgcaactgcaatccagtttgtagctattcttttaatgtcgtccgtccatctgatcggtagtcttccacgatttctcttgtctgcccttgaccaccactctaaaatctttgtccatctgttctctctgtcttgcgacgtgtcctggccatttccacttcaacttcattatgcattttatgttttccactccagttcttgttctttgccatatctcgtcatttcttattctgtcactcaaatttaggccaagcatgtatctttccatttttcgttgtgctactttttttgtgaatttgatggccttggtcaagcaaattagccagacattaattctgctacttgtaataattttcttattcttattgatgctttagtcaatgtcagtgtttcagctccataagtgagcaccggaagtacgcactggttaaatgcttttctttttagctttactgggatgttttcgatgaatacgtctcttagtttgccatacgctgcccatcctaaagctatcatcatcatcactggctcgacaaccctttctgggtcttggcctgttccaggattcttctccattctgatctgtttcgtgctttttttctccagttttttatttttaaggttattatatcattttctatttgttctaaatatctcagcttcggtcttcctcttgttctttttcctactggcatctgtttgaatattttgtttggtatttcgccttcttccattctttctacatgtcccatccaacgcagccgtcctattttaatgaatgttatgatatccggatcctggtatatttcgtatagttcaaagttgtaccttcttcgccaaattctaggtgtccagtgtccaggtttctgagccgtatgtgagtaccggtcttattaaggttttgtatatttggcattttgtttttcttgcgacgttatctgatcttagttgccgaattaagccatggtaacttttattggcaataaatattcgccttttcacttcctccgcagcgttattatcagacgtgactagggatcccaagtatgtaaagttttttaccccctcaatgttgtattctcctattgttatattttgtggctgccttatttctgcgttttacttacctgcatatattttgttttgttctggttttattttctgtatacttttatataaaaacagttgttcagaactgttcagcgacgtattagtataatacaatatgaatggattagcgtagaaggccaatatgttcaaccaaaaaagatgtatttggtgacctttcagtgactttcttgggtgtgaatctgtctttccagtgtactcctcctcgttcaaaaacaaaccatagacgagcagggattgactatgtgcgttctttatcatattttcttctgttaattgtatccgccaatatcgtattaa

SEQ ID NO: 1988 - DNA, 1348 bp, Diabrotica virgifera
  SmartBlast Evalue=1E-60; Info=Endonuclease-reverse transcriptase n=1 Tax=Bombyx mori RepID=D7F170_BOMMO
aggatgccatacttctcgccccgcatcacatgtccgagatactgtagctttttttctttaattgtaagttcaacttccttctctttacctattcttctcagcacttcattgttagtaactctatctacccaggaatccctcataattcttctataggtccacatttgaaatgtggacctatagaagaattagggaaaaaaggtccaccttaatttaataaacaagcctaaagtaggctaggagaaattaacaatttgataaatgtgaaattgttcacactcaaaaagtgtctagtttgttgtgaaaattagtagatttattatttaaagtttcaattaagtccgtaatttttgttgttcatcatcatcatcattggctcgacagccctttctgggtcttggcctgttccaggattcttctccattctgatctgtttcgtgctttttttctccagttttttatttttaaggttattatatcattttctatttgttctaaatatctcagcttcggtcttcctcttgttctttttcctactggcatctgtttgaatattttgtttggtatttcgccttcttccattctttctacatgtcccatccaacgcagccgtcctattttaatgaatgttatgatatccggatcctggtatatttcgtatagttcaaagttgtaccttcttcgccaaattccattttcttttgtgcccttatatatgtgtcgcaagatttttctttcaaaggtggctagcaatgtttcctctcttttagtgagtgtccaggtttctgagccgtatgtgagtaccggtcttattagggttttgtatatttggcattttgttttccttgcgacgttgtctgatcttagttgccgaattaagccatgataacttttattggcaataaatattcgcctcttcacttcctctgctacgttattatcagatgtgactagggatcccaagtatgtaaagttttttaccccctcaatgttgtattctcctattgttatattttgtggctgccttatttctgcgttttacttacctgcatatattttgttttgttctggttttattttctgtatacttttatataaaaacagttgttcagaactgttcagcgacgtattagtataatacaatatgaatggattagcgtagaaggccaatatgttcaaccaaaaaagatgtatttggtgacctttctagtgactttcttgggtgtgaatctgtctttccagtgtactcctcctcgttcaaaaacaaaccatagacgagcagggattgactatgtgcgttctttatcatattttcttctgttaattgtatccgccaatatcgtattaa

SEQ ID NO: 1989 - DNA, 425 bp, Diabrotica virgifera
agtcgcgtctgagttcagcgaacccgactataccatattatttttctaatggtgaatattggcggcatcaatattcacattttatataaagataataataataaaacagaaaaacgtcgtgtctttttaaagaaaatggctttatcgttgatgaaacctcatcttttttgtaaaattttgtaaagaaaggcaaaagttggatatgtgagagaaaatctcacgcgcgaccactcgcgtaacaacctacctagcgaccaatgccgggttaatgatggtcaattgttagtaataaaaataataccaatctaaaaactttatacctttataaccgatattttttttgtatttagatttagtgcaattcccttgtgatggcaacaacgaagtgattcacgaaccattattgtgtccagtctgaacacagg

SEQ ID NO: 1990 - DNA, 439 bp, Diabrotica virgifera
agtcgcgtctgagttcagcgaacccgactataccatattatttttctaatggtgaatattggcggcatcaatattcacattttatataaagataataataataaaacagaaaaacgtcgtgtctttttaaagaaaatggctttatcgttgatgaaacctcatcttttttgtaaaattttgtaaagaaaggcaaaagttggatacgtgagagaaaatctcacgcgcgaccacgcgcgtaacaacctacctagcgaccaatgccgggttaaacgtcttctataaatacattagttaatattgacaatttaattaaataaattaattactatttttatctatgaatataatgcaaacagaaaattgcaataaattaaaaatacaataagaataaggttattattctattttataattatatttgaagacacaagttcatgaa

SEQ ID NO: 1991 - DNA, 372 bp, Diabrotica virgifera
agtcgcgtctgagttcagcgaacccgactataccatattatttttctaatggtgaatattggcggcatcaatattcacattttatataaagataataataataaaacagaaaaacgtcgtgtctttttaaagaaaatggctttatcgttgatgaaacctcatcttttttgtaaaattttgtaaagaaaggcaaaagttggatatgtgagagaaaatctcacgcgcgaccactcgcgtaacaacctacctagcgaccaatgccgggttaagtttgccaaaggcagagaattttttgttatgcgaattcttcggtctatatccgcgtgttggtttttttcactaaacttcaacagaatacatctcacagtcact

SEQ ID NO: 1992 - DNA, 1425 bp, Diabrotica virgifera
aatctcttaattcaatcttattcttaatagtacttcatcaaaaatactatcagaatcaaaacattttcgtttattatttacataattcgaaaagtctttaaattattttccaaaggtccaaaagtttataatttatttagaaaaatttaggtgaatctgataataaggtttggaatattccttaaattcttaacgcaaattagaaaaattaccatcattcttctttttaacccgccagtggtcgctatatgagattttctctcacggtttcagaaaattgcgcacaacttttttttctggaaaattatacgcgtgtagttccttctagtctcctaactatcctccttgacaatctaatagactcgtccgctcagatagtgactcagtttacttagtatcaccatattgttgagtcagtgcgcttcatgtgagagattctctcatcaagcgaccaccggcgtcaccaactgtgtataaaaattaattttatttctccccttaaaacctgaaataatatcctttatgatgtaataaaaggcgccgtggatgtggtcgatgatatgaaaatcctatattctgtttcacgggttagttgtagatggtcacttaccatatatttttcaatgttaaatattggcggcatcaatagtcgtcacattttatataaagataataataataaaacagaaaaacgtcgtgtctttttaaagcaaatggctttatcgttgatgaaacctcatcttttttgtaaaattttgtaaagaaaggcaaaagttggatatgtgagagaaaatctcacgcgcgaccactcgcgtaacaacctacctagcgaccaatgccgggttaaacgaacaatctagcagaaagatagaagtacaaacagctgaaataaaagaccaatatcgcaccaggtagcgatggtatacccgcagagtgctaacagggaggagaagcgttatacagttctatattataagctaattcaatacatttggcgagaaaaaacaatgccaaatgaatggaaagacggggttattctaaggggctaaggggttcttctaaagaaccaaaacatacacagaagaaatcgttggggattatcaatgcggatttagaccgggccgctttactactgatcagatattcacaataaagcagataatggaaaaatgctgggagttacaaagggatagggtaacaatgtccgattattttagtaatcgtatgttgaccaataatcatctcgatcaacatacaatcactaaaacaatcggaaattgttagcctctgatcattttccttgattatgtaaagtgtaatgttcttatcggttaaagttaggccactctggttctcactaccatttgacgttcacaaactggaattataggttcctttagtattggctccacactgaattaactg

SEQ ID NO: 1993 - DNA, 1119 bp, Diabrotica virgifera
  SmartBlast Evalue=0.000000008; Info=Endonuclease-reverse transcriptase n=1 Tax=Bombyx mori RepID=D7F170_BOMMO
tacgcgctgtagttccttctagtctcctaactatcctccctcgacaatctaatagactcgtccgctcagatagtgactcagtttacttagtatcaccatattgttgagttagtggcttcatgtgagagattctctcatcaagcgaccaccggcgtcaccaactgtgtataaaaattaattttatttctccccttaaaacctgaaataatatcctttatgatgtaataaaaggcgccgtggatgtggttgatgatatgaaaatcctatattctgtttcacgggttagttgtagatggtcacttaccatatatttttcaatgttaaatattggcggcatcaatagtcgtcacattttatataaagataataataataaaacagaaaaacgtcgtgtctttttaaagcaaatggctttatcgttgatgaaacctcatcttttttgtaaaattttgtaaagaaaggcaaaagttggatatgtgagagaaaatctcacgcgcgaccactcgcgtaacaacctacctagcgaccaatgccgggttaaacgaacaatctagcagaaagatagaagtacaaacagctgaaataaaagaccaatatcgcaccaggtagcgatggtatacccgcagagtgctaacagggaggagaagcgttatacagttctatattataagctaattcaatacatttggcgagaaaaaacaatgccaaatgaatggaaagacggggttattctaaggggctaaggggttcttctaaagaaccaaaacatacacagaagaaatcgttggggattatcaatgcggatttagaccgggccgctttactactgatcagatattcacaataaagcagataatggaaaaatgctgggagttacaaagggatagggtaacaatgtccgattattttagtaatcgtatgttgaccaataatcatctcgatcaacatacaatcactaaaacaatcggaaattgttagcctctgatcattttccttgattatgtaaagtgtaatgttcttatcggttaaagttaggccactctggttctcactaccatttgacgttcacaaactggaattataggttcctttagtattggctccacactgaattaactg

SEQ ID NO: 1994 - DNA, 1003 bp, Diabrotica virgifera
aatctcttaattcaatcttattcttaatagtacttcatcaaaaatactatcagaatcaaaacattttcgtttattatttacataattcgaaaagtctttaaattattttccaaaggtccaaaagtttataatttatttagaaaaatttaggtgaatctgataataaggtttggaatattccttaaattcttaacgcaaattagaaaaattaccatcattcttctttttaacccgccagtggtcgctatatgagattttctctcacggtttcagaaaattgcgcacaacttttttttctggaaaattatacgcgtgtagttccttctagtctcctaactatcctccttgacaatctaatagactcgtccgctcagatagtgactcagtttacttagtatcaccatattgttgagtcagtgcgcttcatgtgagagattctctcatcaagcgaccaccggcgtcaccaactgtgtataaaaattaattttatttctccccttaaaacctgaaataatatcctttatgatgtaataaaaggcgccgtggatgtggtcgatgatatgaaaatcctatattctgtttcacgggttagttgtagatggtcacttaccatatatttttcaatgttaaatattggcggcatcaatagtcgtcacattttatataaagataataataataaaacagaaaaacgtcgtgtctttttaaagcaaatggctttatcgttgatgaaacctcatcttttttgtaaaattttgtaaagaaaggcaaaagttggatatgtgagagaaaatctcacgcgcgaccactcgcgtaacaacctacctagcgaccaatgccgggttaatgatggtcaattgttagtaataaaaataataccaatctaaaaactttatacctttataaccgatattttttttgtatttagatttagtgcaattcccttgtgatggcaacaacgaagtgattcacgaaccattattgtgtccagtctgaacacagg

SEQ ID NO: 1995 - DNA, 1017 bp, Diabrotica virgifera
aatctcttaattcaatcttattcttaatagtacttcatcaaaaatactatcagaatcaaaacattttcgtttattatttacataattcgaaaagtctttaaattattttccaaaggtccaaaagtttataatttatttagaaaaatttaggtgaatctgataataaggtttggaatattccttaaattcttaacgcaaattagaaaaattaccatcattcttctttttaacccgccagtggtcgctatatgagattttctctcacggtttcagaaaattgcgcacaacttttttttctggaaaattatacgcgtgtagttccttctagtctcctaactatcctccttgacaatctaatagactcgtccgctcagatagtgactcagtttacttagtatcaccatattgttgagtcagtgcgcttcatgtgagagattctctcatcaagcgaccaccggcgtcaccaactgtgtataaaaattaattttatttctccccttaaaacctgaaataatatcctttatgatgtaataaaaggcgccgtggatgtggtcgatgatatgaaaatcctatattctgtttcacgggttagttgtagatggtcacttaccatatatttttcaatgttaaatattggcggcatcaatagtcgtcacattttatataaagataataataataaaacagaaaaacgtcgtgtctttttaaagcaaatggctttatcgttgatgaaacctcatcttttttgtaaaattttgtaaagaaaggcaaaagttggatacgtgagagaaaatctcacgcgcgaccacgcgcgtaacaacctacctagcgaccaatgccgggttaaacgtcttctataaatacattagttaatattgacaatttaattaaataaattaattactatttttatctatgaatataatgcaaacagaaaattgcaataaattaaaaatacaataagaataaggttattattctattttataattatatttgaagacacaagttcatgaa

SEQ ID NO: 1996 - DNA, 950 bp, Diabrotica virgifera
aatctcttaattcaatcttattcttaatagtacttcatcaaaaatactatcagaatcaaaacattttcgtttattatttacataattcgaaaagtctttaaattattttccaaaggtccaaaagtttataatttatttagaaaaatttaggtgaatctgataataaggtttggaatattccttaaattcttaacgcaaattagaaaaattaccatcattcttctttttaacccgccagtggtcgctatatgagattttctctcacggtttcagaaaattgcgcacaacttttttttctggaaaattatacgcgtgtagttccttctagtctcctaactatcctccttgacaatctaatagactcgtccgctcagatagtgactcagtttacttagtatcaccatattgttgagtcagtgcgcttcatgtgagagattctctcatcaagcgaccaccggcgtcaccaactgtgtataaaaattaattttatttctccccttaaaacctgaaataatatcctttatgatgtaataaaaggcgccgtggatgtggtcgatgatatgaaaatcctatattctgtttcacgggttagttgtagatggtcacttaccatatatttttcaatgttaaatattggcggcatcaatagtcgtcacattttatataaagataataataataaaacagaaaaacgtcgtgtctttttaaagcaaatggctttatcgttgatgaaacctcatcttttttgtaaaattttgtaaagaaaggcaaaagttggatatgtgagagaaaatctcacgcgcgaccactcgcgtaacaacctacctagcgaccaatgccgggttaagtttgccaaaggcagagaattttttgttatgcgaattcttcggtctatatccgcgtgttggtttttttcactaaacttcaacagaatacatctcacagtcact

SEQ ID NO: 1997 - DNA, 847 bp, Diabrotica virgifera
  SmartBlast Evalue=0.000000005; Info=Endonuclease-reverse transcriptase n=1 Tax=Bombyx mori RepID=D7F170_BOMMO
agtcgcgtctgagttcagcgaacccgactataccatattatttttctaatggtgaatattggcggcatcaatattcacattttatataaagataataataataaaacagaaaaacgtcgtgtctttttaaagaaaatggctttatcgttgatgaaacctcatcttttttgtaaaattttgtaaagaaaggcaaaagttggatatgtgagagaaaatctcacgcgcgaccactcgcgtaacaacctacctagcgaccaatgccgggttaaacgaacaatctagcagaaagatagaagtacaaacagctgaaataaaagaccaatatcgcaccaggtagcgatggtatacccgcagagtgctaacagggaggagaagcgttatacagttctatattataagctaattcaatacatttggcgagaaaaaacaatgccaaatgaatggaaagacggggttattctaaggggctaaggggttcttctaaagaaccaaaacatacacagaagaaatcgttggggattatcaatgcggatttagaccgggccgctttactactgatcagatattcacaataaagcagataatggaaaaatgctgggagttacaaagggatagggtaacaatgtccgattattttagtaatcgtatgttgaccaataatcatctcgatcaacatacaatcactaaaacaatcggaaattgttagcctctgatcattttccttgattatgtaaagtgtaatgttcttatcggttaaagttaggccactctggttctcactaccatttgacgttcacaaactggaattataggttcctttagtattggctccacactgaattaactg

SEQ ID NO: 1998 - DNA, 697 bp, Diabrotica virgifera
tacgcgctgtagttccttctagtctcctaactatcctccctcgacaatctaatagactcgtccgctcagatagtgactcagtttacttagtatcaccatattgttgagttagtggcttcatgtgagagattctctcatcaagcgaccaccggcgtcaccaactgtgtataaaaattaattttatttctccccttaaaacctgaaataatatcctttatgatgtaataaaaggcgccgtggatgtggttgatgatatgaaaatcctatattctgtttcacgggttagttgtagatggtcacttaccatatatttttcaatgttaaatattggcggcatcaatagtcgtcacattttatataaagataataataataaaacagaaaaacgtcgtgtctttttaaagcaaatggctttatcgttgatgaaacctcatcttttttgtaaaattttgtaaagaaaggcaaaagttggatatgtgagagaaaatctcacgcgcgaccactcgcgtaacaacctacctagcgaccaatgccgggttaatgatggtcaattgttagtaataaaaataataccaatctaaaaactttatacctttataaccgatattttttttgtatttagatttagtgcaattcccttgtgatggcaacaacgaagtgattcacgaaccattattgtgtccagtctgaacacagg

SEQ ID NO: 1999 - DNA, 711 bp, Diabrotica virgifera
tacgcgctgtagttccttctagtctcctaactatcctccctcgacaatctaatagactcgtccgctcagatagtgactcagtttacttagtatcaccatattgttgagttagtggcttcatgtgagagattctctcatcaagcgaccaccggcgtcaccaactgtgtataaaaattaattttatttctccccttaaaacctgaaataatatcctttatgatgtaataaaaggcgccgtggatgtggttgatgatatgaaaatcctatattctgtttcacgggttagttgtagatggtcacttaccatatatttttcaatgttaaatattggcggcatcaatagtcgtcacattttatataaagataataataataaaacagaaaaacgtcgtgtctttttaaagcaaatggctttatcgttgatgaaacctcatcttttttgtaaaattttgtaaagaaaggcaaaagttggatacgtgagagaaaatctcacgcgcgaccacgcgcgtaacaacctacctagcgaccaatgccgggttaaacgtcttctataaatacattagttaatattgacaatttaattaaataaattaattactatttttatctatgaatataatgcaaacagaaaattgcaataaattaaaaatacaataagaataaggttattattctattttataattatatttgaagacacaagttcatgaa

SEQ ID NO: 2000 - DNA, 644 bp, Diabrotica virgifera
tacgcgctgtagttccttctagtctcctaactatcctccctcgacaatctaatagactcgtccgctcagatagtgactcagtttacttagtatcaccatattgttgagttagtggcttcatgtgagagattctctcatcaagcgaccaccggcgtcaccaactgtgtataaaaattaattttatttctccccttaaaacctgaaataatatcctttatgatgtaataaaaggcgccgtggatgtggttgatgatatgaaaatcctatattctgtttcacgggttagttgtagatggtcacttaccatatatttttcaatgttaaatattggcggcatcaatagtcgtcacattttatataaagataataataataaaacagaaaaacgtcgtgtctttttaaagcaaatggctttatcgttgatgaaacctcatcttttttgtaaaattttgtaaagaaaggcaaaagttggatatgtgagagaaaatctcacgcgcgaccactcgcgtaacaacctacctagcgaccaatgccgggttaagtttgccaaaggcagagaattttttgttatgcgaattcttcggtctatatccgcgtgttggtttttttcactaaacttcaacagaatacatctcacagtcact

SEQ ID NO: 2001 - DNA, 301 bp, Diabrotica virgifera
ttcacgtcgtcgatgttccccttgaattggaaagagactaccgaccaagtgggctcatttgtctctgtcgcaaccgtcacccattttgggatcgcggggcgcagtctggagtattatatatctatgataccaacacaaaagacccagaggcagacctcctatgagatggacagattgatctgaaacgaactgccgggaaaaattggctacaagtagcgtacaacaaaaaacaatggaaaggaagacttgaagaggcttatgttcagatgtggacgtgaatggctagacgaagaagaagaaa

SEQ ID NO: 2002 - DNA, 2861 bp, Diabrotica virgifera
gtcaacgtctctacctctgttctgataacttctaacatttgactttgacagtggcagtcgccgttggacgatttactttaaggttgtatgacactatgcaagttcttgtatcgaaaattgtatgtaattcggcacgtaattggtcgacattttgtttgctaccctgtgtcacgttacattggtatggttgtactgcgtctacagctgattttaaggattttataaaatttataaacttataaaagcttataaatttaacattttaatgttgaccagaattttcacgttgactgtttgaggttgattatttgtgtttttattttgttttgatatttctgctaaaatatttgcattagaattatcttcagtttgatccaaattaggaactattgtgttttcctctattaaaaaatgcaaaacaatgaaagcaacagttatagtttgagctttactaagagctaaatatatggtgttattagtagaacagtagtccatatattaagtatcaataaaagatttataaataatacctacaaaaacacaaataaattcatcaagacataaatcatatgatcccattttcagccgccattatgacatttagatgttttaccagcagcttttacgtttctgctctttgcgcagaaattggcgcagttcttgtacaagaatctgtgtctgacacaaattcttgtatcgtttctgatatcgtttcttctatctgtgtatgacactatgcatctttttgacatatcagaaacgatatcagaaataatacaagaaaatgcatagtgtcatacaaccttaaagtaaatcgtccaacggcgactgccactgtcaaagtcaactgtcaacgtctctacctctgttctgataacttctaacatttgataattctatccttcttaccacatagttttcttttctacgtctaacgtgaccattccattgcaatctttgttcttagaccatttttgagactgcagtcaccctgactctttccctaatccgttcctgattatagttaatagcttttgccttatatagacctatttgtacctaccaataaatttcctattggcaagtactaataacatcaagaagaactaaatcgggaacataattggacaataagaaattataatattaaaactaactgtaacaacaacgaagttttggtttattataataaacaagatcaagagaaactataacgagaatagattgtggaaaagtgaatgaatacgttaagaaatacggaataaagcagagaagagacaatagtaaaactgagaataaattctgaaattgaagattgttgcatgaaccactttcatttctgcataatgtaattttaaattttattctagaattgattactactgcagtataggctttcatcattatacatgttcgtattagtggctgcatattatttttcccattaaacaatttagcattatgtacatcttctcgtattagtgattaaccaatcttccaacatttctttcctctcttccactaatacgatatccgtaaatagcgctgaccaatgagctctctctctctctcccttaccttctctaacaacacatcaataacaagtcgattgagatctacttttaaaacaatattcagcagatgtcttaaccattgttgccaattataaaattctatcgccatcttatcatgattcacaagaagatggaatgggtagaactagaaatctagggaagttttgttttccgaaaaagatcatttatttatgaggcgacgccgaaccagttaagggttaaatgtatagagtatttacaatttgtctctctagtgtgtctatgccaatttttctaaaaattaacacaaaatacagcatgagaacacggtatatgtgataatttatatttttcaattatgttattgatagaatgccggttattggtgaaggaagatttgctctctacaattgaaggttttcaattcgaaacctcttcaaattattgaaacaaactaactcatttattcttaaaatttccaccatattatgatttaggacagatttttcaagaaattaaaaagtatgaattctaattaagtattaagtacgttcgcaactgtttcataactaaaacataactttgtaaacaacgttataatttaaatattggagggtcagagaagcaacaattttaaaaataattaacttcaccattagccaatcgccatctcctatgtactcctgtataataataaattttgagatttttaataaaaaccaaaaatttcaaattttagatgaattttatatttaaaataacttttgtttgtgcgttgttaccccgagtaaatttctttttgtaaacatataagaaaaagttagatttgatttcttacaattgtatggagcttaaaatacaaataacttgttgtatataagctggcaccactgtaaactaaagcataacttataaagggggtgctggcataatacatgtgaagatgttatttcctttaaagtttattacatgtcatcaaaggcgtttctacgtcatcacagtataacgaaacttggaaatgccctaacaataagtttagaattattttgacttatgtacatcatattttcaataaaataaaatttatagaaaaattttgtattgcagaaaccattgacatattaagcgtagactcggcatactcaccaaaaaagagtaacgcggaaaaaacatggaaatagtcgatcggtggtctatctatctcttttaaggtactagtacactttagaagaccaaaaataataatttttttactaagagttttttttactctagaagctttattaaaaatgaacacagaacttttta

SEQ ID NO: 2003 - DNA, 2803 bp, Diabrotica virgifera
cttgtatcatttctaatatcgttttttatattagaaagttatatacattttcttgtatcgtttcttgtacgcacatttgtgccctgtatgacactatgcaagttcttgtgtcacgttacattggtatggttgtactgcgtctacagctgattttaaggattttataaaatttataaacttataaaagcttataaatttaacattttaatgttgaccagaattttcacgttgactgtttgaggttgattatttgtgtttttattttgttttgatatttctgctaaaatatttgcattagaattatcttcagtttgatccaaattaggaactattgtgttttcctctattaaaaaatgcaaaacaatgaaagcaacagttatagtttgagctttactaagagctaaatatatggtgttattagtagaacagtagtccatatattaagtatcaataaaagatttataaataatacctacaaaaacacaaataaattcatcaagacataaatcatatgatcccattttcagccgccattatgacatttagatgttttaccagcagcttttacgtttctgctctttgcgcagaaattggcgcagttcttgtacaagaatctgtgtctgacacaaattcttgtatcgtttctgatatcgtttcttctatctgtgtatgacactatgcatctttttgacatatcagaaacgatatcagaaataatacaagaaaatgcatagtgtcatacaaccttaaagtaaatcgtccaacggcgactgccactgtcaaagtcaactgtcaacgtctctacctctgttctgataacttctaacatttgataattctatccttcttaccacatagttttcttttctacgtctaacgtgaccattccattgcaatctttgttcttagaccatttttgagactgcagtcaccctgactctttccctaatccgttcctgattatagttaatagcttttgccttatatagacctatttgtacctaccaataaatttcctattggcaagtactaataacatcaagaagaactaaatcgggaacataattggacaataagaaattataatattaaaactaactgtaacaacaacgaagttttggtttattataataaacaagatcaagagaaactataacgagaatagattgtggaaaagtgaatgaatacgttaagaaatacggaataaagcagagaagagacaatagtaaaactgagaataaattctgaaattgaagattgttgcatgaaccactttcatttctgcataatgtaattttaaattttattctagaattgattactactgcagtataggctttcatcattatacatgttcgtattagtggctgcatattatttttcccattaaacaatttagcattatgtacatcttctcgtattagtgattaaccaatcttccaacatttctttcctctcttccactaatacgatatccgtaaatagcgctgaccaatgagctctctctctctctcccttaccttctctaacaacacatcaataacaagtcgattgagatctacttttaaaacaatattcagcagatgtcttaaccattgttgccaattataaaattctatcgccatcttatcatgattcacaagaagatggaatgggtagaactagaaatctagggaagttttgttttccgaaaaagatcatttatttatgaggcgacgccgaaccagttaagggttaaatgtatagagtatttacaatttgtctctctagtgtgtctatgccaatttttctaaaaattaacacaaaatacagcatgagaacacggtatatgtgataatttatatttttcaattatgttattgatagaatgccggttattggtgaaggaagatttgctctctacaattgaaggttttcaattcgaaacctcttcaaattattgaaacaaactaactcatttattcttaaaatttccaccatattatgatttaggacagatttttcaagaaattaaaaagtatgaattctaattaagtattaagtacgttcgcaactgtttcataactaaaacataactttgtaaacaacgttataatttaaatattggagggtcagagaagcaacaattttaaaaataattaacttcaccattagccaatcgccatctcctatgtactcctgtataataataaattttgagatttttaataaaaaccaaaaatttcaaattttagatgaattttatatttaaaataacttttgtttgtgcgttgttaccccgagtaaatttctttttgtaaacatataagaaaaagttagatttgatttcttacaattgtatggagcttaaaatacaaataacttgttgtatataagctggcaccactgtaaactaaagcataacttataaagggggtgctggcataatacatgtgaagatgttatttcctttaaagtttattacatgtcatcaaaggcgtttctacgtcatcacagtataacgaaacttggaaatgccctaacaataagtttagaattattttgacttatgtacatcatattttcaataaaataaaatttatagaaaaattttgtattgcagaaaccattgacatattaagcgtagactcggcatactcaccaaaaaagagtaacgcggaaaaaacatggaaatagtcgatcggtggtctatctatctcttttaaggtactagtacactttagaagaccaaaaataataatttttttactaagagttttttttactctagaagctttattaaaaatgaacacagaacttttta

SEQ ID NO: 2004 - DNA, 2051 bp, Diabrotica virgifera
  misc_feature (821)..(823): n is a, c, g, or t
  SmartBlast Evalue=1E-112; Info=Endonuclease-reverse transcriptase n=1 Tax=Bombyx mori RepID=D7F165_BOMMO
acggtaaatttaataaagaatgttggatcggaaataatgccaaaagtaacaattttagaggtaactacagcattgggaaacatgaagagaaataaagctgcagaagaagataggattacacagatatgatattagaaggaggtaaggaactcattgcaattgtaactaagcttataggcagttgtttacaccagggcaaagtccctaagagctggaacaactctaaagtaatcttattacacaagaaaggtgataatcgaaagttgaaaaactacaggcccatcagtctactgtcacacctgtttaaaatactcaccaaagtcataactacccgactaacaaggaaattagatgaataccaaccatatgaacaggcaggttttagaaaaggctattcaacttccgatcacctgttaaccacaaaaatattaatagaaaaatgtaacgaatacaagtttccagttttatagcatttgtagactacgaaaaagctttcgacataatagaacacacagccgtaataaacgtaatgcaaaattgtagaatagactgcagatatattaacttaataaacgaaactatgaaccaagctacagctacatactacctaaatgaaaatgaatacacgaaccctgcaccattaaacaggggagtcaaacagggagacactctatcacccaaactgttcaccttagttttggaggacgtgtttaaaaatctaaattggaaatataagggaataaacatcaatggccgctacctcagtaatctacgatttgcggatgacataatcctgatagctactgacctacaagaactgnnnaaaccatgctttcagaactacacacagaatcttctaaaataggactgaaaatgaatttaaacaaaacaaaagtcatgcactccgaagaaaccgtgacaataataaacgacaaagttatagaaaaagttgaagaatatatatatacttaggacaaaaaataatactaaatagggaaattcaaacagaagaaataaaaagatgaagaaagttagcatgggcagcattcggcaacctgaactatatactcagaaatcagcaaattcaactacatcttagatctaaagtttttgatgcatacattattccgatattaacatatggagcacaaacatggacaatcacaaaaaagaatatgaacatactcagagtcactcaacacgcgaaggaaagagcaatgctaggcatatcacttaaggacaggaaaacaaacacatggataagacagaaaaccaaagtcaccgatgtggtacaaaaatcattaaaattgaaatgggaatacgctggacatgtagctaggagcgatcttaacaaatggcacagaacaattctaacctggagaccatacaacacaaaagacccagaggcagacctcctatgagatggacagatgatctgaaacgaactgccgggaaaaattggctacaagtagcatacaacaaaaaacaatggaaaggaagacttgaagaggcttatgttcagatgtggacgtgaatggctagacgaagaagaagagtgactgcatgtgcatccaacaaaatcgttacaatttgaccatagagaacctggcctggctgctgcattactgcagaattgatatcattgacgattttgtcgaacgacaccgcagtaccgtgagtggtcggctttaggtgaagcgttattgccaagaatggggagacatttagggtacctattgagaactaaatgtgtattatggatacgtctaccattgagtcatttgtacattgagttgcctgtcacctcttttaacataatgacctaattaattaacccactgaccacgtgtgggagtcatatgttgccctaaagccacatccataggaattttatccatgctttggattttacgatgtttacatttatataagacttttagtctatttttaaaaggttttaacctttgtatttttgggtggctttaccattttcttgtaacactgatgatgctcttgttacagagcgaaaacgttttgtttctatgtttgta

SEQ ID NO: 2005 - DNA, 1876 bp, Diabrotica virgifera
  SmartBlast Evalue=2E-39; Info=Endonuclease-reverse transcriptase n=1 Tax=Bombyx mori RepID=D7F157_BOMMO
gtcaacgtctctacctctgttctgataacttctaacatttgactttgacagtggcagtcgccgttggacgatttactttaaggttgtatgacactatgcaagttcttgtatcgaaaattgtatgtaattcggcacgtaattggtcgacattttgtttgctaccctgtgtcacgttacattggtatggttgtactgcgtctacagctgattttaaggattttataaaatttataaacttataaaagcttataaatttaacattttaatgttgaccagaattttcacgttgactgtttgaggttgattatttgtgtttttattttgttttgatatttctgctaaaatatttgcattagaattatcttcagtttgatccaaattaggaactattgtgttttcctctattaaaaaatgcaaaacaatgaaagcaacagttatagtttgagctttactaagagctaaatatatggtgttattagtagaacagtagtccatatattaagtatcaataaaagatttataaataatacctacaaaaacacaaataaattcatcaagacataaatcatatgatcccattttcagccgccattaagacatttagatgttttaccagcaggttttacgtttttgctatttgcgcagaaattgacgcagttcttgtacaagaatctgtgtctgacacaaattcttgtatcgtttcttgtatctgtgtatgacactatgcattttttgacatatcagaaacgatattagaaatgatacaaggggatgcatagtgtcatacggcctttaggacaaaaaactaatactaaatagggaaattcaaacagaagaaataaaaagatgaagaaagttagcatgggcagcattcggcaacctgaactatatactcagaaatcagcaaattcaactacatcttagatctaaagtttttgatgcatacattattccgatattaacatatggagcacaaacatggacaatcacaaaaaagaatatgaacatactcagagtcactcaacacgcgaaggaaagagcaatgctaggcatatcacttaaggacaggaaaacaaacacatggataagacagaaaaccaaagtcaccgatgtggtacaaaaatcattaaaattgaaatgggaatacgctggacatgtagctaggagcgatcttaacaaatggcacagaacaattctaacctggagaccatacaacacaaaagacccagaggcagacctcctatgagatggacagatgatctgaaacgaactgccgggaaaaattggctacaagtagcatacaacaaaaaacaatggaaaggaagacttgaagaggcttatgttcagatgtggacgtgaatggctagacgaagaagaagagtgactgcatgtgcatccaacaaaatcgttacaatttgaccatagagaacctggcctggctgctgcattactgcagaattgatatcattgacgattttgtcgaacgacaccgcagtaccgtgagtggtcggctttaggtgaagcgttattgccaagaatggggagacatttagggtacctattgagaactaaatgtgtattatggatacgtctaccattgagtcatttgtacattgagttgcctgtcacctcttttaacataatgacctaattaattaacccactgaccacgtgtgggagtcatatgttgccctaaagccacatccataggaattttatccatgctttggattttacgatgtttacatttatataagacttttagtctatttttaaaaggttttaacctttgtatttttgggtggctttaccattttcttgtaacactgatgatgctcttgttacagagcgaaaacgttttgtttctatgtttgta

SEQ ID NO: 2006 - DNA, 1818 bp, Diabrotica virgifera
  SmartBlast Evalue=2E-39; Info=Endonuclease-reverse transcriptase n=1 Tax=Bombyx mori RepID=D7F157_BOMMO
cttgtatcatttctaatatcgttttttatattagaaagttatatacattttcttgtatcgtttcttgtacgcacatttgtgccctgtatgacactatgcaagttcttgtgtcacgttacattggtatggttgtactgcgtctacagctgattttaaggattttataaaatttataaacttataaaagcttataaatttaacattttaatgttgaccagaattttcacgttgactgtttgaggttgattatttgtgtttttattttgttttgatatttctgctaaaatatttgcattagaattatcttcagtttgatccaaattaggaactattgtgttttcctctattaaaaaatgcaaaacaatgaaagcaacagttatagtttgagctttactaagagctaaatatatggtgttattagtagaacagtagtccatatattaagtatcaataaaagatttataaataatacctacaaaaacacaaataaattcatcaagacataaatcatatgatcccattttcagccgccattaagacatttagatgttttaccagcaggttttacgtttttgctatttgcgcagaaattgacgcagttcttgtacaagaatctgtgtctgacacaaattcttgtatcgtttcttgtatctgtgtatgacactatgcattttttgacatatcagaaacgatattagaaatgatacaaggggatgcatagtgtcatacggcctttaggacaaaaaactaatactaaatagggaaattcaaacagaagaaataaaaagatgaagaaagttagcatgggcagcattcggcaacctgaactatatactcagaaatcagcaaattcaactacatcttagatctaaagtttttgatgcatacattattccgatattaacatatggagcacaaacatggacaatcacaaaaaagaatatgaacatactcagagtcactcaacacgcgaaggaaagagcaatgctaggcatatcacttaaggacaggaaaacaaacacatggataagacagaaaaccaaagtcaccgatgtggtacaaaaatcattaaaattgaaatgggaatacgctggacatgtagctaggagcgatcttaacaaatggcacagaacaattctaacctggagaccatacaacacaaaagacccagaggcagacctcctatgagatggacagatgatctgaaacgaactgccgggaaaaattggctacaagtagcatacaacaaaaaacaatggaaaggaagacttgaagaggcttatgttcagatgtggacgtgaatggctagacgaagaagaagagtgactgcatgtgcatccaacaaaatcgttacaatttgaccatagagaacctggcctggctgctgcattactgcagaattgatatcattgacgattttgtcgaacgacaccgcagtaccgtgagtggtcggctttaggtgaagcgttattgccaagaatggggagacatttagggtacctattgagaactaaatgtgtattatggatacgtctaccattgagtcatttgtacattgagttgcctgtcacctcttttaacataatgacctaattaattaacccactgaccacgtgtgggagtcatatgttgccctaaagccacatccataggaattttatccatgctttggattttacgatgtttacatttatataagacttttagtctatttttaaaaggttttaacctttgtatttttgggtggctttaccattttcttgtaacactgatgatgctcttgttacagagcgaaaacgttttgtttctatgtttgta

SEQ ID NO: 2007 - DNA, 1557 bp, Diabrotica virgifera
  misc_feature (821)..(823): n is a, c, g, or t
  SmartBlast Evalue=1E-112; Info=Endonuclease-reverse transcriptase n=1 Tax=Bombyx mori RepID=D7F165_BOMMO
acggtaaatttaataaagaatgttggatcggaaataatgccaaaagtaacaattttagaggtaactacagcattgggaaacatgaagagaaataaagctgcagaagaagataggattacacagatatgatattagaaggaggtaaggaactcattgcaattgtaactaagcttataggcagttgtttacaccagggcaaagtccctaagagctggaacaactctaaagtaatcttattacacaagaaaggtgataatcgaaagttgaaaaactacaggcccatcagtctactgtcacacctgtttaaaatactcaccaaagtcataactacccgactaacaaggaaattagatgaataccaaccatatgaacaggcaggttttagaaaaggctattcaacttccgatcacctgttaaccacaaaaatattaatagaaaaatgtaacgaatacaagtttccagttttatagcatttgtagactacgaaaaagctttcgacataatagaacacacagccgtaataaacgtaatgcaaaattgtagaatagactgcagatatattaacttaataaacgaaactatgaaccaagctacagctacatactacctaaatgaaaatgaatacacgaaccctgcaccattaaacaggggagtcaaacagggagacactctatcacccaaactgttcaccttagttttggaggacgtgtttaaaaatctaaattggaaatataagggaataaacatcaatggccgctacctcagtaatctacgatttgcggatgacataatcctgatagctactgacctacaagaactgnnnaaaccatgctttcagaactacacacagaatcttctaaaataggactgaaaatgaatttaaacaaaacaaaagtcatgcactccgaagaaaccgtgacaataataaacgacaaagttatagaaaaagttgaagaatatatatatacttaggacaaaaaataatactaaatagggaaattcaaacagaagaaataaaaagatgaagaaagttagcatgggcagcattcggcaacctgaactatatactcagaaatcagcaaattcaactacatcttagatctaaagtttttgatgcatacattattccgatattaacatatggagcacaaacatggacaatcacaaaaaagaatatgaacatactcagagtcactcaacacgcgaaggaaagagcaatgctaggcatatcacttaaggacaggaaaacaaacacatggataagacagaaaaccaaagtcaccgatgtggtacaaaaatcattaaaattgaaatgggaatacgctggacatgtagctaggagcgatcttaacaaatggcacagaacaattctaacctggagaccatacaacacaaaagacccagaggcagacctcctatgagatggacagatgatctgaaacgaactgccgggaaaaattggctacaagtagcatacaacaaaaaacaatggaaaggaagacttgaagaggcttatgttcagatgtggacgtgaatggctagacgaagaagaagaaa

SEQ ID NO: 2008 - DNA, 1382 bp, Diabrotica virgifera
  SmartBlast Evalue=1E-39; Info=Endonuclease-reverse transcriptase n=1 Tax=Bombyx mori RepID=D7F157_BOMMO
gtcaacgtctctacctctgttctgataacttctaacatttgactttgacagtggcagtcgccgttggacgatttactttaaggttgtatgacactatgcaagttcttgtatcgaaaattgtatgtaattcggcacgtaattggtcgacattttgtttgctaccctgtgtcacgttacattggtatggttgtactgcgtctacagctgattttaaggattttataaaatttataaacttataaaagcttataaatttaacattttaatgttgaccagaattttcacgttgactgtttgaggttgattatttgtgtttttattttgttttgatatttctgctaaaatatttgcattagaattatcttcagtttgatccaaattaggaactattgtgttttcctctattaaaaaatgcaaaacaatgaaagcaacagttatagtttgagctttactaagagctaaatatatggtgttattagtagaacagtagtccatatattaagtatcaataaaagatttataaataatacctacaaaaacacaaataaattcatcaagacataaatcatatgatcccattttcagccgccattaagacatttagatgttttaccagcaggttttacgtttttgctatttgcgcagaaattgacgcagttcttgtacaagaatctgtgtctgacacaaattcttgtatcgtttcttgtatctgtgtatgacactatgcattttttgacatatcagaaacgatattagaaatgatacaaggggatgcatagtgtcatacggcctttaggacaaaaaactaatactaaatagggaaattcaaacagaagaaataaaaagatgaagaaagttagcatgggcagcattcggcaacctgaactatatactcagaaatcagcaaattcaactacatcttagatctaaagtttttgatgcatacattattccgatattaacatatggagcacaaacatggacaatcacaaaaaagaatatgaacatactcagagtcactcaacacgcgaaggaaagagcaatgctaggcatatcacttaaggacaggaaaacaaacacatggataagacagaaaaccaaagtcaccgatgtggtacaaaaatcattaaaattgaaatgggaatacgctggacatgtagctaggagcgatcttaacaaatggcacagaacaattctaacctggagaccatacaacacaaaagacccagaggcagacctcctatgagatggacagatgatctgaaacgaactgccgggaaaaattggctacaagtagcatacaacaaaaaacaatggaaaggaagacttgaagaggcttatgttcagatgtggacgtgaatggctagacgaagaagaagaaa

SEQ ID NO: 2009 - DNA, 1324 bp, Diabrotica virgifera
  SmartBlast Evalue=1E-39; Info=Endonuclease-reverse transcriptase n=1 Tax=Bombyx mori RepID=D7F157_BOMMO
cttgtatcatttctaatatcgttttttatattagaaagttatatacattttcttgtatcgtttcttgtacgcacatttgtgccctgtatgacactatgcaagttcttgtgtcacgttacattggtatggttgtactgcgtctacagctgattttaaggattttataaaatttataaacttataaaagcttataaatttaacattttaatgttgaccagaattttcacgttgactgtttgaggttgattatttgtgtttttattttgttttgatatttctgctaaaatatttgcattagaattatcttcagtttgatccaaattaggaactattgtgttttcctctattaaaaaatgcaaaacaatgaaagcaacagttatagtttgagctttactaagagctaaatatatggtgttattagtagaacagtagtccatatattaagtatcaataaaagatttataaataatacctacaaaaacacaaataaattcatcaagacataaatcatatgatcccattttcagccgccattaagacatttagatgttttaccagcaggttttacgtttttgctatttgcgcagaaattgacgcagttcttgtacaagaatctgtgtctgacacaaattcttgtatcgtttcttgtatctgtgtatgacactatgcattttttgacatatcagaaacgatattagaaatgatacaaggggatgcatagtgtcatacggcctttaggacaaaaaactaatactaaatagggaaattcaaacagaagaaataaaaagatgaagaaagttagcatgggcagcattcggcaacctgaactatatactcagaaatcagcaaattcaactacatcttagatctaaagtttttgatgcatacattattccgatattaacatatggagcacaaacatggacaatcacaaaaaagaatatgaacatactcagagtcactcaacacgcgaaggaaagagcaatgctaggcatatcacttaaggacaggaaaacaaacacatggataagacagaaaaccaaagtcaccgatgtggtacaaaaatcattaaaattgaaatgggaatacgctggacatgtagctaggagcgatcttaacaaatggcacagaacaattctaacctggagaccatacaacacaaaagacccagaggcagacctcctatgagatggacagatgatctgaaacgaactgccgggaaaaattggctacaagtagcatacaacaaaaaacaatggaaaggaagacttgaagaggcttatgttcagatgtggacgtgaatggctagacgaagaagaagaaa

SEQ ID NO: 2010 - DNA, 795 bp, Diabrotica virgifera
ttcacgtcgtcgatgttccccttgaattggaaagagactaccgaccaagtgggctcatttgtctctgtcgcaaccgtcacccattttgggatcgcggggcgcagtctggagtattatatatctatgataccaacacaaaagacccagaggcagacctcctatgagatggacagattgatctgaaacgaactgccgggaaaaattggctacaagtagcgtacaacaaaaaacaatggaaaggaagacttgaagaggcttatgttcagatgtggacgtgaatggctagacgaagaagaagagtgactgcatgtgcatccaacaaaatcgttacaatttgaccatagagaacctggcctggctgctgcattactgcagaattgatatcattgacgattttgtcgaacgacaccgcagtaccgtgagtggtcggctttaggtgaagcgttattgccaagaatggggagacatttagggtacctattgagaactaaatgtgtattatggatacgtctaccattgagtcatttgtacattgagttgcctgtcacctcttttaacataatgacctaattaattaacccactgaccacgtgtgggagtcatatgttgccctaaagccacatccataggaattttatccatgctttggattttacgatgtttacatttatataagacttttagtctatttttaaaaggttttaacctttgtatttttgggtggctttaccattttcttgtaacactgatgatgctcttgttacagagcgaaaacgttttgtttctatgtttgta

SEQ ID NO: 2011 - DNA, 4606 bp, Diabrotica virgifera
cgacatttgatgcgttttgagccccacacgttgggcgcaatttgatgcgtttaacatgactgctcatatgggaacaaggaaagactatctatagagatactggggggtaagaatggggctaaagaagaagaagcagacacataaagcctcgttgcgggacggcagctcatttgttgtgcgggagctaggtcgtagattcgttagggagggtgaaggggtgttaagatgactacactaccataactaaatacataagggtacttactctgactagaggatctttctactatttaacaaaaagggacgccgtttgaaataaatcctctatttcacctatgggtacttactggatactttcttattacgggtaccaatcggggggacaatcatcattgattcctctttggggttacattgggacaacatctttccttattattggcttctatgccatattctttcttttctcctgaactaaaactttcatacagttgcattagttttctgttaaaatttttccaaaggctacagaaatgagatgatagatacactttcacaaacatttatttaaaactttacggtggttttttttttaaacaaacaaaaaaacttttaacaggaaatgattttacaggacaaaatatctacaaatcttttacattacaaaaaaaatcttcaatttaacataacaaaagaatgacaaaagaacttgttggacagtgtatgtcaaaacaaaattttgacgcagctgtcaaaggtcaaagtcactgtcattttaatttacaagttgcatcatgaaagcacaaacaactattatttttcaaaactctttaccaacaaaaatatttatccatttgggatccttgcaaaatttaaaaaaatatatcataccatatttaaacaaaatcctttatcacacgtcacaaactacacggaaagggggttcatctacaaacaagcagggtcatcgacctgaggtgggcttcatggcttcctttttatttcggggcaatcaactggataaacatcacgggactggaactcaaaatgtctacatcaggacatcaatcgggactcggaagacttcatttaaacaggaacttggacaagatacagggacttcataccacgccggcgtatagtactgcgtcacaactcaaacacagtgtaagagcacccaacttcactacggggtaaaaaaaaacatcgtgccctcacactagatcttccagaacgacatactataccctttaccggcgggtaacaaaaggcaccacgcccttttggggtgagtcggcaagcgatcttcacgcttgaagaaatcaaaccggactgatctgcgcttcggtctgaagccacagatcggggaaaatacgacggaagtaccgagcgattttgatccttagggatgcttagttgacaagaactcaactttcagttcaagatttgttctagaaagttcatctacgcattagaactgtacttttgtcaacacttcttacaaattctgtttttgcgtctcaaataaacaggaatcttgtaacacattgaaatgttgctgcaatacttcatggctgtatacagggtcggcttgggatcttataatgatattgaacttcacaaaataaattaaaaaaatagacattctttttgggaattgggatattaaattaatgttggagttttttcaaacgttacaaagcctccgcgcaaaagagaaacctggataagattatccagttttcgataacaaacagaaaaaaatccaacatggacatcttaggtgtgacaggacaacaatatcaaaatatttagataatggctagtggggattaaacaaaacaaaaaagtcgttagggattgggctagcgtgccatcaatcgccagactctttaaagtcgagtagacttaaatgtttcttgactctacaaagaactgtaggtgacaagagtttctgtgccttgggaaagaaactaaacttgtgccctgtgtggacctcgctgacatccacagcagtaacacaagtgacataccagggcagacacagccttgtcacctcgttgcctaaccgcgagcggttcacaaaaactaaaaagttgatgtttgacagataaacatctgcccaaactctgctaacacctagcgagtttcacgggacatttcggcaacggttctgcaaaatgaggatttagacaatccagtctaaatacctcagtgagacaaaatctcaccaacaacttacttcaacaactcattcaaacaagacagggctagacaaaggggtatatgacaacaacaaggactaaaatcaaaacaatattaacaaggggggaggggggatacgtgtgacaacaacaaaagaccgaaaagactagtatactgggttcaaacaggatatcaaactttttaaacaagactaagggaaatgaacgcaacatatgatatagagaacactacatcattacgttttcaatcaacagtccaatccaggacataagaacctttcatgaacgttcactagacaactctctcattttcaaatcacaagctggggaaagacttcattttcaaaacagggctacacttcacttttcgaaacaggggatagacttcatttttcaagacaggggggttgggctttacttttcaaaactggggatagacttacttttcaaaactgggggcatttcatttctcaagactgggggtggactttatttttcaaaacggggggctactttttcaaaacaggggatgaaagcaacacgcaaggggaagaccaaagggacattggaaagtatgacagttctgacgaacaaccgcttccatttatcgaccgaaagcaagcttcacctgtactcaacgcggccagatcctaacctcaccagccttgtcacagcttctgctcttggcctactttcaatcaacaaagagaagagaggtcaactaactattcgccaaaaaaaatcaaactccagcacggacacgggctaacagacaacacgggctaatagacaacacgggctaatagacaacacgggctaatagacaacacgggctaatagacaacacgggctaatagacaacacgggacaacagacaatgggctctaaaacttccagacaaaacagggatagacaaacaaacagacaacaacatactttttgacttctagatatactcaggggcttacaaacacaaacaatattgaaatttggttcctatatgagctcacacgggataagacatttcttgctccgactactaatgaaagtgttcacagatagctgaacaacacttccttcatcacgagtattacacttgtgacatgtcagatacaaaaagacatacttcattcacggggggacttcaactacttcactgggggggagacttcaactactacttcacgggctctttttaactaacctctggcatccttttgacacctacaaagatagattagtcaaaaaaaaaaaacaaggggcaacacagacaaggggggggctttttcaggggctaacttctacacttcaagacagttattctcaaacagtgtcgacagagaacgctatcttcaaatctaaaagtgacagcttttctcctggctgcttgaaaaaaacacagaagtggggggcctctccacggtttccctcttcacttcttcacggggccacttctcaaggggatgacttctcaaggggatgacttctcaatgggatgacttctccaactaacctgtggcatgacatacaccaacagagataggcttcgctggaaaaacaagggactactctcacacagactatacggggctaagctcatacacggaccataccaacaacatcacacatctaatcaaatgaccaaatcaataatcacaaaaaacggttattctgtaaaaaactgttgatctataggaatacatgcaaaaaatacaacatactgttatacttcataattggattcaatattcaaaatatttaacgttacttttaatcaaaattttcaaaaaaattttacgttacttttttattcaactgtttgtctatatatttcatcaatatttcaaaaaaattcaaatcaatgctttcatcatgggtacaatatcaatacaatacagttagtacgctacaataacatacaattctgttctacgatacatacaatacaatacaataccagtatacatatggggttacaagttaaatacactatgatgtatgaaatggtacatgcctatacaatcaacagcacgaccaaatcaacatcacaacaaaatgtgtacatacttacacctctttggaaaaattattaacattctgcaacaaaaactacaaaaatgggctctttcatggggactaacagactgaaacagtttcgggggcactagaagacatgaaacagtttctgggggcaagacaagaggaatctgggctaaactacatgggaagactggggcgatatttactcaggtcaaacttcagggtgtacgttacaaatgtaacactaagtggggggctaaaaatggatcgagccccacgtacagggcgctatttgaagcgttcaactggacaagacaacaactggatactgaaggaggcag

SEQ ID NO: 2012 - DNA, 4588 bp, Diabrotica virgifera
tcgagccccacgttgggcgccatttgaagcgttttacatgtctgctcatatgggaacaaggaaagactatctatagagatactggggggtaagaatggggctaaagaagaagaagcagacacataaagcctcgttgcgggacggcagctcatttgttgtgcgggagctaggtcgtagattcgttagggagggtgaaggggtgttaagatgactacactaccataactaaatacataagggtacttactctgactagaggatctttctactatttaacaaaaagggacgccgtttgaaataaatcctctatttcacctatgggtacttactggatactttcttattacgggtaccaatcggggggacaatcatcattgattcctctttggggttacattgggacaacatctttccttattattggcttctatgccatattctttcttttctcctgaactaaaactttcatacagttgcattagttttctgttaaaatttttccaaaggctacagaaatgagatgatagatacactttcacaaacatttatttaaaactttacggtggttttttttttaaacaaacaaaaaaacttttaacaggaaatgattttacaggacaaaatatctacaaatcttttacattacaaaaaaaatcttcaatttaacataacaaaagaatgacaaaagaacttgttggacagtgtatgtcaaaacaaaattttgacgcagctgtcaaaggtcaaagtcactgtcattttaatttacaagttgcatcatgaaagcacaaacaactattatttttcaaaactctttaccaacaaaaatatttatccatttgggatccttgcaaaatttaaaaaaatatatcataccatatttaaacaaaatcctttatcacacgtcacaaactacacggaaagggggttcatctacaaacaagcagggtcatcgacctgaggtgggcttcatggcttcctttttatttcggggcaatcaactggataaacatcacgggactggaactcaaaatgtctacatcaggacatcaatcgggactcggaagacttcatttaaacaggaacttggacaagatacagggacttcataccacgccggcgtatagtactgcgtcacaactcaaacacagtgtaagagcacccaacttcactacggggtaaaaaaaaacatcgtgccctcacactagatcttccagaacgacatactataccctttaccggcgggtaacaaaaggcaccacgcccttttggggtgagtcggcaagcgatcttcacgcttgaagaaatcaaaccggactgatctgcgcttcggtctgaagccacagatcggggaaaatacgacggaagtaccgagcgattttgatccttagggatgcttagttgacaagaactcaactttcagttcaagatttgttctagaaagttcatctacgcattagaactgtacttttgtcaacacttcttacaaattctgtttttgcgtctcaaataaacaggaatcttgtaacacattgaaatgttgctgcaatacttcatggctgtatacagggtcggcttgggatcttataatgatattgaacttcacaaaataaattaaaaaaatagacattctttttgggaattgggatattaaattaatgttggagttttttcaaacgttacaaagcctccgcgcaaaagagaaacctggataagattatccagttttcgataacaaacagaaaaaaatccaacatggacatcttaggtgtgacaggacaacaatatcaaaatatttagataatggctagtggggattaaacaaaacaaaaaagtcgttagggattgggctagcgtgccatcaatcgccagactctttaaagtcgagtagacttaaatgtttcttgactctacaaagaactgtaggtgacaagagtttctgtgccttgggaaagaaactaaacttgtgccctgtgtggacctcgctgacatccacagcagtaacacaagtgacataccagggcagacacagccttgtcacctcgttgcctaaccgcgagcggttcacaaaaactaaaaagttgatgtttgacagataaacatctgcccaaactctgctaacacctagcgagtttcacgggacatttcggcaacggttctgcaaaatgaggatttagacaatccagtctaaatacctcagtgagacaaaatctcaccaacaacttacttcaacaactcattcaaacaagacagggctagacaaaggggtatatgacaacaacaaggactaaaatcaaaacaatattaacaaggggggaggggggatacgtgtgacaacaacaaaagaccgaaaagactagtatactgggttcaaacaggatatcaaactttttaaacaagactaagggaaatgaacgcaacatatgatatagagaacactacatcattacgttttcaatcaacagtccaatccaggacataagaacctttcatgaacgttcactagacaactctctcattttcaaatcacaagctggggaaagacttcattttcaaaacagggctacacttcacttttcgaaacaggggatagacttcatttttcaagacaggggggttgggctttacttttcaaaactggggatagacttacttttcaaaactgggggcatttcatttctcaagactgggggtggactttatttttcaaaacggggggctactttttcaaaacaggggatgaaagcaacacgcaaggggaagaccaaagggacattggaaagtatgacagttctgacgaacaaccgcttccatttatcgaccgaaagcaagcttcacctgtactcaacgcggccagatcctaacctcaccagccttgtcacagcttctgctcttggcctactttcaatcaacaaagagaagagaggtcaactaactattcgccaaaaaaaatcaaactccagcacggacacgggctaacagacaacacgggctaatagacaacacgggctaatagacaacacgggctaatagacaacacgggctaatagacaacacgggctaatagacaacacgggacaacagacaatgggctctaaaacttccagacaaaacagggatagacaaacaaacagacaacaacatactttttgacttctagatatactcaggggcttacaaacacaaacaatattgaaatttggttcctatatgagctcacacgggataagacatttcttgctccgactactaatgaaagtgttcacagatagctgaacaacacttccttcatcacgagtattacacttgtgacatgtcagatacaaaaagacatacttcattcacggggggacttcaactacttcactgggggggagacttcaactactacttcacgggctctttttaactaacctctggcatccttttgacacctacaaagatagattagtcaaaaaaaaaaaacaaggggcaacacagacaaggggggggctttttcaggggctaacttctacacttcaagacagttattctcaaacagtgtcgacagagaacgctatcttcaaatctaaaagtgacagcttttctcctggctgcttgaaaaaaacacagaagtggggggcctctccacggtttccctcttcacttcttcacggggccacttctcaaggggatgacttctcaaggggatgacttctcaatgggatgacttctccaactaacctgtggcatgacatacaccaacagagataggcttcgctggaaaaacaagggactactctcacacagactatacggggctaagctcatacacggaccataccaacaacatcacacatctaatcaaatgaccaaatcaataatcacaaaaaacggttattctgtaaaaaactgttgatctataggaatacatgcaaaaaatacaacatactgttatacttcataattggattcaatattcaaaatatttaacgttacttttaatcaaaattttcaaaaaaattttacgttacttttttattcaactgtttgtctatatatttcatcaatatttcaaaaaaattcaaatcaatgctttcatcatgggtacaatatcaatacaatacagttagtacgctacaataacatacaattctgttctacgatacatacaatacaatacaataccagtatacatatggggttacaagttaaatacactatgatgtatgaaatggtacatgcctatacaatcaacagcacgaccaaatcaacatcacaacaaaatgtgtacatacttacacctctttggaaaaattattaacattctgcaacaaaaactacaaaaatgggctctttcatggggactaacagactgaaacagtttcgggggcactagaagacatgaaacagtttctgggggcaagacaagaggaatctgggctaaactacatgggaagactggggcgatatttactcaggtcaaacttcagggtgtacgttacaaatgtaacactaagtggggggctaaaaatggatcgagccccacgtacagggcgctatttgaagcgttcaactggacaagacaacaactggatactgaaggaggcag

SEQ ID NO: 2013 - DNA, 4590 bp, Diabrotica virgifera
cgacatttgatgcgttttgagccccacacgttgggcgcaatttgatgcgtttaacatgactgctcatatgggaacaaggaaagactatctatagagatactggggggtaagaatggggctaaagaagaagaagcagacacataaagcctcgttgcgggacggcagctcatttgttgtgcgggagctaggtcgtagattcgttagggagggtgaaggggtgttaagatgactacactaccataactaaatacataagggtacttactctgactagaggatctttctactatttaacaaaaagggacgccgtttgaaataaatcctctatttcacctatgggtacttactggatactttcttattacgggtaccaatcggggggacaatcatcattgattcctctttggggttacattgggacaacatctttccttattattggcttctatgccatattctttcttttctcctgaactaaaactttcatacagttgcattagttttctgttaaaatttttccaaaggctacagaaatgagatgatagatacactttcacaaacatttatttaaaactttacggtggttttttttttaaacaaacaaaaaaacttttaacaggaaatgattttacaggacaaaatatctacaaatcttttacattacaaaaaaaatcttcaatttaacataacaaaagaatgacaaaagaacttgttggacagtgtatgtcaaaacaaaattttgacgcagctgtcaaaggtcaaagtcactgtcattttaatttacaagttgcatcatgaaagcacaaacaactattatttttcaaaactctttaccaacaaaaatatttatccatttgggatccttgcaaaatttaaaaaaatatatcataccatatttaaacaaaatcctttatcacacgtcacaaactacacggaaagggggttcatctacaaacaagcagggtcatcgacctgaggtgggcttcatggcttcctttttatttcggggcaatcaactggataaacatcacgggactggaactcaaaatgtctacatcaggacatcaatcgggactcggaagacttcatttaaacaggaacttggacaagatacagggacttcataccacgccggcgtatagtactgcgtcacaactcaaacacagtgtaagagcacccaacttcactacggggtaaaaaaaaacatcgtgccctcacactagatcttccagaacgacatactataccctttaccggcgggtaacaaaaggcaccacgcccttttggggtgagtcggcaagcgatcttcacgcttgaagaaatcaaaccggactgatctgcgcttcggtctgaagccacagatcggggaaaatacgacggaagtaccgagcgattttgatccttagggatgcttagttgacaagaactcaactttcagttcaagatttgttctagaaagttcatctacgcattagaactgtacttttgtcaacacttcttacaaattctgtttttgcgtctcaaataaacaggaatcttgtaacacattgaaatgttgctgcaatacttcatggctgtatacagggtcggcttgggatcttataatgatattgaacttcacaaaataaattaaaaaaatagacattctttttgggaattgggatattaaattaatgttggagttttttcaaacgttacaaagcctccgcgcaaaagagaaacctggataagattatccagttttcgataacaaacagaaaaaaatccaacatggacatcttaggtgtgacaggacaacaatatcaaaatatttagataatggctagtggggattaaacaaaacaaaaaagtcgttagggattgggctagcgtgccatcaatcgccagactctttaaagtcgagtagacttaaatgtttcttgactctacaaagaactgtaggtgacaagagtttctgtgccttgggaaagaaactaaacttgtgccctgtgtggacctcgctgacatccacagcagtaacacaagtgacataccagggcagacacagccttgtcacctcgttgcctaaccgcgagcggttcacaaaaactaaaaagttgatgtttgacagataaacatctgcccaaactctgctaacacctagcgagtttcacgggacatttcggcaacggttctgcaaaatgaggatttagacaatccagtctaaatacctcagtgagacaaaatctcaccaacaacttacttcaacaactcattcaaacaagacagggctagacaaaggggtatatgacaacaacaaggactaaaatcaaaacaatattaacaaggggggaggggggatacgtgtgacaacaacaaaagaccgaaaagactagtatactgggttcaaacaggatatcaaactttttaaacaagactaagggaaatgaacgcaacatatgatatagagaacactacatcattacgttttcaatcaacagtccaatccaggacataagaacctttcatgaacgttcactagacaactctctcattttcaaatcacaagctggggaaagacttcattttcaaaacagggctacacttcacttttcgaaacaggggatagacttcatttttcaagacaggggggttgggctttacttttcaaaactggggatagacttacttttcaaaactgggggcatttcatttctcaagactgggggtggactttatttttcaaaacggggggctactttttcaaaacaggggatgaaagcaacacgcaaggggaagaccaaagggacattggaaagtatgacagttctgacgaacaaccgcttccatttatcgaccgaaagcaagcttcacctgtactcaacgcggccagatcctaacctcaccagccttgtcacagcttctgctcttggcctactttcaatcaacaaagagaagagaggtcaactaactattcgccaaaaaaaatcaaactccagcacggacacgggctaacagacaacacgggctaatagacaacacgggctaatagacaacacgggctaatagacaacacgggctaatagacaacacgggctaatagacaacacgggacaacagacaatgggctctaaaacttccagacaaaacagggatagacaaacaaacagacaacaacatactttttgacttctagatatactcaggggcttacaaacacaaacaatattgaaatttggttcctatatgagctcacacgggataagacatttcttgctccgactactaatgaaagtgttcacagatagctgaacaacacttccttcatcacgagtattacacttgtgacatgtcagatacaaaaagacatacttcattcacggggggacttcaactacttcactgggggggagacttcaactactacttcacgggctctttttaactaacctctggcatccttttgacacctacaaagatagattagtcaaaaaaaaaaaacaaggggcaacacagacaaggggggggctttttcaggggctaacttctacacttcaagacagttattctcaaacagtgtcgacagagaacgctatcttcaaatctaaaagtgacagcttttctcctggctgcttgaaaaaaacacagaagtggggggcctctccacggtttccctcttcacttcttcacggggccacttctcaaggggatgacttctcaatgggatgacttctccaactaacctgtggcatgacatacaccaacagagataggcttcgctggaaaaacaagggactactctcacacagactatacggggctaagctcatacacggaccataccaacaacatcacacatctaatcaaatgaccaaatcaataatcacaaaaaacggttattctgtaaaaaactgttgatctataggaatacatgcaaaaaatacaacatactgttatacttcataattggattcaatattcaaaatatttaacgttacttttaatcaaaattttcaaaaaaattttacgttacttttttattcaactgtttgtctatatatttcatcaatatttcaaaaaaattcaaatcaatgctttcatcatgggtacaatatcaatacaatacagttagtacgctacaataacatacaattctgttctacgatacatacaatacaatacaataccagtatacatatggggttacaagttaaatacactatgatgtatgaaatggtacatgcctatacaatcaacagcacgaccaaatcaacatcacaacaaaatgtgtacatacttacacctctttggaaaaattattaacattctgcaacaaaaactacaaaaatgggctctttcatggggactaacagactgaaacagtttcgggggcactagaagacatgaaacagtttctgggggcaagacaagaggaatctgggctaaactacatgggaagactggggcgatatttactcaggtcaaacttcagggtgtacgttacaaatgtaacactaagtggggggctaaaaatggatcgagccccacgtacagggcgctatttgaagcgttcaactggacaagacaacaactggatactgaaggaggcag

SEQ ID NO: 2014 - DNA, 4572 bp, Diabrotica virgifera
tcgagccccacgttgggcgccatttgaagcgttttacatgtctgctcatatgggaacaaggaaagactatctatagagatactggggggtaagaatggggctaaagaagaagaagcagacacataaagcctcgttgcgggacggcagctcatttgttgtgcgggagctaggtcgtagattcgttagggagggtgaaggggtgttaagatgactacactaccataactaaatacataagggtacttactctgactagaggatctttctactatttaacaaaaagggacgccgtttgaaataaatcctctatttcacctatgggtacttactggatactttcttattacgggtaccaatcggggggacaatcatcattgattcctctttggggttacattgggacaacatctttccttattattggcttctatgccatattctttcttttctcctgaactaaaactttcatacagttgcattagttttctgttaaaatttttccaaaggctacagaaatgagatgatagatacactttcacaaacatttatttaaaactttacggtggttttttttttaaacaaacaaaaaaacttttaacaggaaatgattttacaggacaaaatatctacaaatcttttacattacaaaaaaaatcttcaatttaacataacaaaagaatgacaaaagaacttgttggacagtgtatgtcaaaacaaaattttgacgcagctgtcaaaggtcaaagtcactgtcattttaatttacaagttgcatcatgaaagcacaaacaactattatttttcaaaactctttaccaacaaaaatatttatccatttgggatccttgcaaaatttaaaaaaatatatcataccatatttaaacaaaatcctttatcacacgtcacaaactacacggaaagggggttcatctacaaacaagcagggtcatcgacctgaggtgggcttcatggcttcctttttatttcggggcaatcaactggataaacatcacgggactggaactcaaaatgtctacatcaggacatcaatcgggactcggaagacttcatttaaacaggaacttggacaagatacagggacttcataccacgccggcgtatagtactgcgtcacaactcaaacacagtgtaagagcacccaacttcactacggggtaaaaaaaaacatcgtgccctcacactagatcttccagaacgacatactataccctttaccggcgggtaacaaaaggcaccacgcccttttggggtgagtcggcaagcgatcttcacgcttgaagaaatcaaaccggactgatctgcgcttcggtctgaagccacagatcggggaaaatacgacggaagtaccgagcgattttgatccttagggatgcttagttgacaagaactcaactttcagttcaagatttgttctagaaagttcatctacgcattagaactgtacttttgtcaacacttcttacaaattctgtttttgcgtctcaaataaacaggaatcttgtaacacattgaaatgttgctgcaatacttcatggctgtatacagggtcggcttgggatcttataatgatattgaacttcacaaaataaattaaaaaaatagacattctttttgggaattgggatattaaattaatgttggagttttttcaaacgttacaaagcctccgcgcaaaagagaaacctggataagattatccagttttcgataacaaacagaaaaaaatccaacatggacatcttaggtgtgacaggacaacaatatcaaaatatttagataatggctagtggggattaaacaaaacaaaaaagtcgttagggattgggctagcgtgccatcaatcgccagactctttaaagtcgagtagacttaaatgtttcttgactctacaaagaactgtaggtgacaagagtttctgtgccttgggaaagaaactaaacttgtgccctgtgtggacctcgctgacatccacagcagtaacacaagtgacataccagggcagacacagccttgtcacctcgttgcctaaccgcgagcggttcacaaaaactaaaaagttgatgtttgacagataaacatctgcccaaactctgctaacacctagcgagtttcacgggacatttcggcaacggttctgcaaaatgaggatttagacaatccagtctaaatacctcagtgagacaaaatctcaccaacaacttacttcaacaactcattcaaacaagacagggctagacaaaggggtatatgacaacaacaaggactaaaatcaaaacaatattaacaaggggggaggggggatacgtgtgacaacaacaaaagaccgaaaagactagtatactgggttcaaacaggatatcaaactttttaaacaagactaagggaaatgaacgcaacatatgatatagagaacactacatcattacgttttcaatcaacagtccaatccaggacataagaacctttcatgaacgttcactagacaactctctcattttcaaatcacaagctggggaaagacttcattttcaaaacagggctacacttcacttttcgaaacaggggatagacttcatttttcaagacaggggggttgggctttacttttcaaaactggggatagacttacttttcaaaactgggggcatttcatttctcaagactgggggtggactttatttttcaaaacggggggctactttttcaaaacaggggatgaaagcaacacgcaaggggaagaccaaagggacattggaaagtatgacagttctgacgaacaaccgcttccatttatcgaccgaaagcaagcttcacctgtactcaacgcggccagatcctaacctcaccagccttgtcacagcttctgctcttggcctactttcaatcaacaaagagaagagaggtcaactaactattcgccaaaaaaaatcaaactccagcacggacacgggctaacagacaacacgggctaatagacaacacgggctaatagacaacacgggctaatagacaacacgggctaatagacaacacgggctaatagacaacacgggacaacagacaatgggctctaaaacttccagacaaaacagggatagacaaacaaacagacaacaacatactttttgacttctagatatactcaggggcttacaaacacaaacaatattgaaatttggttcctatatgagctcacacgggataagacatttcttgctccgactactaatgaaagtgttcacagatagctgaacaacacttccttcatcacgagtattacacttgtgacatgtcagatacaaaaagacatacttcattcacggggggacttcaactacttcactgggggggagacttcaactactacttcacgggctctttttaactaacctctggcatccttttgacacctacaaagatagattagtcaaaaaaaaaaaacaaggggcaacacagacaaggggggggctttttcaggggctaacttctacacttcaagacagttattctcaaacagtgtcgacagagaacgctatcttcaaatctaaaagtgacagcttttctcctggctgcttgaaaaaaacacagaagtggggggcctctccacggtttccctcttcacttcttcacggggccacttctcaaggggatgacttctcaatgggatgacttctccaactaacctgtggcatgacatacaccaacagagataggcttcgctggaaaaacaagggactactctcacacagactatacggggctaagctcatacacggaccataccaacaacatcacacatctaatcaaatgaccaaatcaataatcacaaaaaacggttattctgtaaaaaactgttgatctataggaatacatgcaaaaaatacaacatactgttatacttcataattggattcaatattcaaaatatttaacgttacttttaatcaaaattttcaaaaaaattttacgttacttttttattcaactgtttgtctatatatttcatcaatatttcaaaaaaattcaaatcaatgctttcatcatgggtacaatatcaatacaatacagttagtacgctacaataacatacaattctgttctacgatacatacaatacaatacaataccagtatacatatggggttacaagttaaatacactatgatgtatgaaatggtacatgcctatacaatcaacagcacgaccaaatcaacatcacaacaaaatgtgtacatacttacacctctttggaaaaattattaacattctgcaacaaaaactacaaaaatgggctctttcatggggactaacagactgaaacagtttcgggggcactagaagacatgaaacagtttctgggggcaagacaagaggaatctgggctaaactacatgggaagactggggcgatatttactcaggtcaaacttcagggtgtacgttacaaatgtaacactaagtggggggctaaaaatggatcgagccccacgtacagggcgctatttgaagcgttcaactggacaagacaacaactggatactgaaggaggcag

SEQ ID NO: 2015 - DNA, 4508 bp, Diabrotica virgifera
cgacatttgatgcgttttgagccccacacgttgggcgcaatttgatgcgtttaacatgactgctcatatgggaacaaggaaagactatctatagagatactggggggtaagaatggggctaaagaagaagaagcagacacataaagcctcgttgcgggacggcagctcatttgttgtgcgggagctaggtcgtagattcgttagggagggtgaaggggtgttaagatgactacactaccataactaaatacataagggtacttactctgactagaggatctttctactatttaacaaaaagggacgccgtttgaaataaatcctctatttcacctatgggtacttactggatactttcttattacgggtaccaatcggggggacaatcatcattgattcctctttggggttacattgggacaacatctttccttattattggcttctatgccatattctttcttttctcctgaactaaaactttcatacagttgcattagttttctgttaaaatttttccaaaggctacagaaatgagatgatagatacactttcacaaacatttatttaaaactttacggtggttttttttttaaacaaacaaaaaaacttttaacaggaaatgattttacaggacaaaatatctacaaatcttttacattacaaaaaaaatcttcaatttaacataacaaaagaatgacaaaagaacttgttggacagtgtatgtcaaaacaaaattttgacgcagctgtcaaaggtcaaagtcactgtcattttaatttacaagttgcatcatgaaagcacaaacaactattatttttcaaaactctttaccaacaaaaatatttatccatttgggatccttgcaaaatttaaaaaaatatatcataccatatttaaacaaaatcctttatcacacgtcacaaactacacggaaagggggttcatctacaaacaagcagggtcatcgacctgaggtgggcttcatggcttcctttttatttcggggcaatcaactggataaacatcacgggactggaactcaaaatgtctacatcaggacatcaatcgggactcggaagacttcatttaaacaggaacttggacaagatacagggacttcataccacgccggcgtatagtactgcgtcacaactcaaacacagtgtaagagcacccaacttcactacggggtaaaaaaaaacatcgtgccctcacactagatcttccagaacgacatactataccctttaccggcgggtaacaaaaggcaccacgcccttttggggtgagtcggcaagcgatcttcacgcttgaagaaatcaaaccggactgatctgcgcttcggtctgaagccacagatcggggaaaatacgacggaagtaccgagcgattttgatccttagggatgcttagttgacaagaactcaactttcagttcaagatttgttctagaaagttcatctacgcattagaactgtacttttgtcaacacttcttacaaattctgtttttgcgtctcaaataaacaggaatcttgtaacacattgaaatgttgctgcaatacttcatggctgtatacagggtcggcttgggatcttataatgatattgaacttcacaaaataaattaaaaaaatagacattctttttgggaattgggatattaaattaatgttggagttttttcaaacgttacaaagcctccgcgcaaaagagaaacctggataagattatccagttttcgataacaaacagaaaaaaatccaacatggacatcttaggtgtgacaggacaacaatatcaaaatatttagataatggctagtggggattaaacaaaacaaaaaagtcgttagggattgggctagcgtgccatcaatcgccagactctttaaagtcgagtagacttaaatgtttcttgactctacaaagaactgtaggtgacaagagtttctgtgccttgggaaagaaactaaacttgtgccctgtgtggacctcgctgacatccacagcagtaacacaagtgacataccagggcagacacagccttgtcacctcgttgcctaaccgcgagcggttcacaaaaactaaaaagttgatgtttgacagataaacatctgcccaaactctgctaacacctagcgagtttcacgggacatttcggcaacggttctgcaaaatgaggatttagacaatccagtctaaatacctcagtgagacaaaatctcaccaacaacttacttcaacaactcattcaaacaagacagggctagacaaaggggtatatgacaacaacaaggactaaaatcaaaacaatattaacaaggggggaggggggatacgtgtgacaacaacaaaagaccgaaaagactagtatactgggttcaaacaggatatcaaactttttaaacaagactaagggaaatgaacgcaacatatgatatagagaacactacatcattacgttttcaatcaacagtccaatccaggacataagaacctttcatgaacgttcactagacaactctctcattttcaaatcacaagctggggaaagacttcattttcaaaacagggctacacttcacttttcgaaacaggggatagacttcatttttcaagacaggggggttgggctttacttttcaaaactggggatagacttacttttcaaaactgggggcatttcatttctcaagactgggggtggactttatttttcaaaacggggggctactttttcaaaacaggggatgaaagcaacacgcaaggggaagaccaaagggacattggaaagtatgacagttctgacgaacaaccgcttccatttatcgaccgaaagcaagcttcacctgtactcaacgcggccagatcctaacctcaccagccttgtcacagcttctgctcttggcctactttcaatcaacaaagagaagagaggtcaactaactattcgccaaaaaaaatcaaactccagcacggacacgggctaacagacaacacgggctaatagacaacacgggctaatagacaacacgggctaatagacaacacgggctaatagacaacacgggctaatagacaacacgggacaacagacaatgggctctaaaacttccagacaaaacagggatagacaaacaaacagacaacaacatactttttgacttctagatatactcaggggcttacaaacacaaacaatattgaaatttggttcctatatgagctcacacgggataagacatttcttgctccgactactaatgaaagtgttcacagatagctgaacaacacttccttcatcacgagtattacacttgtgacatgtcagatacaaaaagacatacttcattcacggggggacttcaactacttcactgggggggagacttcaactactacttcacgggctctttttaactaacctctggcatccttttgacacctacaaagatagattagtcaaaaaaaaaaaacaaggggcaacacagacaaggggggggctttttcaggggctaacttctacacttcaagacagttattctcaaacagtgtcgacagagaacgctatcttcaaatctaaaagtgacagcttttctcctggctgcttgaaaaaaacacagaagtggggggcctctccacggtttccctcttcacttcttcatggggtgacttctacaaggggtaacttctctcacacagactatacgggactaaactcatacacggaccataccaacaacattacacatctaatcaaatgaccaaatcaataatcacaaaaaacggttattctgtaaaaaactgttgatctataggaatacatgcaaaaaatacaacatactgttatacttcataattggattcaatattcaaaatatttaacgttacttttaatcaaaattttcaaaaaaattttacgttacttttttattcaactgtttgtctatatatttcatcaatatttcaaaaaaattcaaatcaatgctttcatcatgggtacaatatcaatacaatacagttagtacgctacaataacatacaattctgttctacgatacatacaatacaatacaataccagtatacatatggggttacaagttaaatacactatgatgtatgaaatggtacatgcctatacaatcaacagcacgaccaaatcaacatcacaacaaaatgtgtacatacttacacctctttggaaaaattattaacattctgcaacaaaaactacaaaaatgggctctttcatggggactaacagactgaaacagtttcgggggcactagaagacatgaaacagtttctgggggcaagacaagaggaatctgggctaaactacatgggaagactggggcgatatttactcaggtcaaacttcagggtgtacgttacaaatgtaacactaagtggggggctaaaaatggatcgagccccacgtacagggcgctatttgaagcgttcaactggacaagacaacaactggatactgaaggaggcag

SEQ ID NO: 2016 - DNA, 4490 bp, Diabrotica virgifera
tcgagccccacgttgggcgccatttgaagcgttttacatgtctgctcatatgggaacaaggaaagactatctatagagatactggggggtaagaatggggctaaagaagaagaagcagacacataaagcctcgttgcgggacggcagctcatttgttgtgcgggagctaggtcgtagattcgttagggagggtgaaggggtgttaagatgactacactaccataactaaatacataagggtacttactctgactagaggatctttctactatttaacaaaaagggacgccgtttgaaataaatcctctatttcacctatgggtacttactggatactttcttattacgggtaccaatcggggggacaatcatcattgattcctctttggggttacattgggacaacatctttccttattattggcttctatgccatattctttcttttctcctgaactaaaactttcatacagttgcattagttttctgttaaaatttttccaaaggctacagaaatgagatgatagatacactttcacaaacatttatttaaaactttacggtggttttttttttaaacaaacaaaaaaacttttaacaggaaatgattttacaggacaaaatatctacaaatcttttacattacaaaaaaaatcttcaatttaacataacaaaagaatgacaaaagaacttgttggacagtgtatgtcaaaacaaaattttgacgcagctgtcaaaggtcaaagtcactgtcattttaatttacaagttgcatcatgaaagcacaaacaactattatttttcaaaactctttaccaacaaaaatatttatccatttgggatccttgcaaaatttaaaaaaatatatcataccatatttaaacaaaatcctttatcacacgtcacaaactacacggaaagggggttcatctacaaacaagcagggtcatcgacctgaggtgggcttcatggcttcctttttatttcggggcaatcaactggataaacatcacgggactggaactcaaaatgtctacatcaggacatcaatcgggactcggaagacttcatttaaacaggaacttggacaagatacagggacttcataccacgccggcgtatagtactgcgtcacaactcaaacacagtgtaagagcacccaacttcactacggggtaaaaaaaaacatcgtgccctcacactagatcttccagaacgacatactataccctttaccggcgggtaacaaaaggcaccacgcccttttggggtgagtcggcaagcgatcttcacgcttgaagaaatcaaaccggactgatctgcgcttcggtctgaagccacagatcggggaaaatacgacggaagtaccgagcgattttgatccttagggatgcttagttgacaagaactcaactttcagttcaagatttgttctagaaagttcatctacgcattagaactgtacttttgtcaacacttcttacaaattctgtttttgcgtctcaaataaacaggaatcttgtaacacattgaaatgttgctgcaatacttcatggctgtatacagggtcggcttgggatcttataatgatattgaacttcacaaaataaattaaaaaaatagacattctttttgggaattgggatattaaattaatgttggagttttttcaaacgttacaaagcctccgcgcaaaagagaaacctggataagattatccagttttcgataacaaacagaaaaaaatccaacatggacatcttaggtgtgacaggacaacaatatcaaaatatttagataatggctagtggggattaaacaaaacaaaaaagtcgttagggattgggctagcgtgccatcaatcgccagactctttaaagtcgagtagacttaaatgtttcttgactctacaaagaactgtaggtgacaagagtttctgtgccttgggaaagaaactaaacttgtgccctgtgtggacctcgctgacatccacagcagtaacacaagtgacataccagggcagacacagccttgtcacctcgttgcctaaccgcgagcggttcacaaaaactaaaaagttgatgtttgacagataaacatctgcccaaactctgctaacacctagcgagtttcacgggacatttcggcaacggttctgcaaaatgaggatttagacaatccagtctaaatacctcagtgagacaaaatctcaccaacaacttacttcaacaactcattcaaacaagacagggctagacaaaggggtatatgacaacaacaaggactaaaatcaaaacaatattaacaaggggggaggggggatacgtgtgacaacaacaaaagaccgaaaagactagtatactgggttcaaacaggatatcaaactttttaaacaagactaagggaaatgaacgcaacatatgatatagagaacactacatcattacgttttcaatcaacagtccaatccaggacataagaacctttcatgaacgttcactagacaactctctcattttcaaatcacaagctggggaaagacttcattttcaaaacagggctacacttcacttttcgaaacaggggatagacttcatttttcaagacaggggggttgggctttacttttcaaaactggggatagacttacttttcaaaactgggggcatttcatttctcaagactgggggtggactttatttttcaaaacggggggctactttttcaaaacaggggatgaaagcaacacgcaaggggaagaccaaagggacattggaaagtatgacagttctgacgaacaaccgcttccatttatcgaccgaaagcaagcttcacctgtactcaacgcggccagatcctaacctcaccagccttgtcacagcttctgctcttggcctactttcaatcaacaaagagaagagaggtcaactaactattcgccaaaaaaaatcaaactccagcacggacacgggctaacagacaacacgggctaatagacaacacgggctaatagacaacacgggctaatagacaacacgggctaatagacaacacgggctaatagacaacacgggacaacagacaatgggctctaaaacttccagacaaaacagggatagacaaacaaacagacaacaacatactttttgacttctagatatactcaggggcttacaaacacaaacaatattgaaatttggttcctatatgagctcacacgggataagacatttcttgctccgactactaatgaaagtgttcacagatagctgaacaacacttccttcatcacgagtattacacttgtgacatgtcagatacaaaaagacatacttcattcacggggggacttcaactacttcactgggggggagacttcaactactacttcacgggctctttttaactaacctctggcatccttttgacacctacaaagatagattagtcaaaaaaaaaaaacaaggggcaacacagacaaggggggggctttttcaggggctaacttctacacttcaagacagttattctcaaacagtgtcgacagagaacgctatcttcaaatctaaaagtgacagcttttctcctggctgcttgaaaaaaacacagaagtggggggcctctccacggtttccctcttcacttcttcatggggtgacttctacaaggggtaacttctctcacacagactatacgggactaaactcatacacggaccataccaacaacattacacatctaatcaaatgaccaaatcaataatcacaaaaaacggttattctgtaaaaaactgttgatctataggaatacatgcaaaaaatacaacatactgttatacttcataattggattcaatattcaaaatatttaacgttacttttaatcaaaattttcaaaaaaattttacgttacttttttattcaactgtttgtctatatatttcatcaatatttcaaaaaaattcaaatcaatgctttcatcatgggtacaatatcaatacaatacagttagtacgctacaataacatacaattctgttctacgatacatacaatacaatacaataccagtatacatatggggttacaagttaaatacactatgatgtatgaaatggtacatgcctatacaatcaacagcacgaccaaatcaacatcacaacaaaatgtgtacatacttacacctctttggaaaaattattaacattctgcaacaaaaactacaaaaatgggctctttcatggggactaacagactgaaacagtttcgggggcactagaagacatgaaacagtttctgggggcaagacaagaggaatctgggctaaactacatgggaagactggggcgatatttactcaggtcaaacttcagggtgtacgttacaaatgtaacactaagtggggggctaaaaatggatcgagccccacgtacagggcgctatttgaagcgttcaactggacaagacaacaactggatactgaaggaggcag

SEQ ID NO: 2017 - DNA, 4068 bp, Diabrotica virgifera
acttacaaaacgtttattcaaaactttaaactcttaccaggtttattcaaaattttactacaaaaacaatgattacaaacaaaacaattaaaattaaatttgttgggcagtatatgtcaaataaaatttgacctatttatttcaacacaagatttgacgtagctgtcaaatgtcataagtcactgcctttttttaccattatgaaagcaaatttctttatacaattatttaccagaaatttatccacttgaaatttagtaaaattaaaaaaacgtatcataccttaaaaacaaaaaaactcttcgtcacagtcacaaactacagggtgggagttcatcaacaaacaggggggcagggggaagacatggcttctttcttcaatttcagggcaatcattggagggtggggtgtggggtagacattccatacacaaatcacaaagggggctcttctgggaaattggaacttttcagggcaatcaactggaacttgcatagggacaggaacaaacaaagacttctacacaatgcatagggacaggaacaaacaaagacttctacacaatgggcaacaatgccgggttgtagaactgcgtgtttgactcttcaagaggcttcgattttccataacaaatccaacactatgtggaaaaaatcctctcagagcactcaccacacattcagatcttcacagcgaccattctacattttaccggcggggaacaaagggactacgccctaattcgagcgagtaccagccgaggagatgctatcacctttggacgtaaagctggactaatttgcgcttcgctctgaagctactacctgggaaaaatacgacggaagtaccgagcgattttgatccttagggatgcttagttgacaagaactcaactttcagttcaagatttgttctagaaagttcatctacgcattagaactgtacttttgtcaacacttcttacaaattctgtttttgcgtctcaaataaacaggaatcttgtaacacattgaaatgttgctgcaatacttcatggctgtatacagggtcggcttgggatcttataatgatattgaacttcacaaaataaattaaaaaaatagacattctttttgggaattgggatattaaattaatgttggagttttttcaaacgttacaaagcctccgcgcaaaagagaaacctggataagattatccagttttcgataacaaacagaaaaaaatccaacatggacatcttaggtgtgacaggacaacaatatcaaaatatttagataatggctagtggggattaaacaaaacaaaaaagtcgttagggattgggctagcgtgccatcaatcgccagactctttaaagtcgagtagacttaaatgtttcttgactctacaaagaactgtaggtgacaagagtttctgtgccttgggaaagaaactaaacttgtgccctgtgtggacctcgctgacatccacagcagtaacacaagtgacataccagggcagacacagccttgtcacctcgttgcctaaccgcgagcggttcacaaaaactaaaaagttgatgtttgacagataaacatctgcccaaactctgctaacacctagcgagtttcacgggacatttcggcaacggttctgcaaaatgaggatttagacaatccagtctaaatacctcagtgagacaaaatctcaccaacaacttacttcaacaactcattcaaacaagacagggctagacaaaggggtatatgacaacaacaaggactaaaatcaaaacaatattaacaaggggggaggggggatacgtgtgacaacaacaaaagaccgaaaagactagtatactgggttcaaacaggatatcaaactttttaaacaagactaagggaaatgaacgcaacatatgatatagagaacactacatcattacgttttcaatcaacagtccaatccaggacataagaacctttcatgaacgttcactagacaactctctcattttcaaatcacaagctggggaaagacttcattttcaaaacagggctacacttcacttttcgaaacaggggatagacttcatttttcaagacaggggggttgggctttacttttcaaaactggggatagacttacttttcaaaactgggggcatttcatttctcaagactgggggtggactttatttttcaaaacggggggctactttttcaaaacaggggatgaaagcaacacgcaaggggaagaccaaagggacattggaaagtatgacagttctgacgaacaaccgcttccatttatcgaccgaaagcaagcttcacctgtactcaacgcggccagatcctaacctcaccagccttgtcacagcttctgctcttggcctactttcaatcaacaaagagaagagaggtcaactaactattcgccaaaaaaaatcaaactccagcacggacacgggctaacagacaacacgggctaatagacaacacgggctaatagacaacacgggctaatagacaacacgggctaatagacaacacgggctaatagacaacacgggacaacagacaatgggctctaaaacttccagacaaaacagggatagacaaacaaacagacaacaacatactttttgacttctagatatactcaggggcttacaaacacaaacaatattgaaatttggttcctatatgagctcacacgggataagacatttcttgctccgactactaatgaaagtgttcacagatagctgaacaacacttccttcatcacgagtattacacttgtgacatgtcagatacaaaaagacatacttcattcacggggggacttcaactacttcactgggggggagacttcaactactacttcacgggctctttttaactaacctctggcatccttttgacacctacaaagatagattagtcaaaaaaaaaaaacaaggggcaacacagacaaggggggggctttttcaggggctaacttctacacttcaagacagttattctcaaacagtgtcgacagagaacgctatcttcaaatctaaaagtgacagcttttctcctggctgcttgaaaaaaacacagaagtggggggcctctccacggtttccctcttcacttcttcacggggccacttctcaaggggatgacttctcaaggggatgacttctcaatgggatgacttctccaactaacctgtggcatgacatacaccaacagagataggcttcgctggaaaaacaagggactactctcacacagactatacggggctaagctcatacacggaccataccaacaacatcacacatctaatcaaatgaccaaatcaataatcacaaaaaacggttattctgtaaaaaactgttgatctataggaatacatgcaaaaaatacaacatactgttatacttcataattggattcaatattcaaaatatttaacgttacttttaatcaaaattttcaaaaaaattttacgttacttttttattcaactgtttgtctatatatttcatcaatatttcaaaaaaattcaaatcaatgctttcatcatgggtacaatatcaatacaatacagttagtacgctacaataacatacaattctgttctacgatacatacaatacaatacaataccagtatacatatggggttacaagttaaatacactatgatgtatgaaatggtacatgcctatacaatcaacagcacgaccaaatcaacatcacaacaaaatgtgtacatacttacacctctttggaaaaattattaacattctgcaacaaaaactacaaaaatgggctctttcatggggactaacagactgaaacagtttcgggggcactagaagacatgaaacagtttctgggggcaagacaagaggaatctgggctaaactacatgggaagactggggcgatatttactcaggtcaaacttcagggtgtacgttacaaatgtaacactaagtggggggctaaaaatggatcgagccccacgtacagggcgctatttgaagcgttcaactggacaagacaacaactggatactgaaggaggcag

SEQ ID NO: 2018 - DNA, 4052 bp, Diabrotica virgifera
acttacaaaacgtttattcaaaactttaaactcttaccaggtttattcaaaattttactacaaaaacaatgattacaaacaaaacaattaaaattaaatttgttgggcagtatatgtcaaataaaatttgacctatttatttcaacacaagatttgacgtagctgtcaaatgtcataagtcactgcctttttttaccattatgaaagcaaatttctttatacaattatttaccagaaatttatccacttgaaatttagtaaaattaaaaaaacgtatcataccttaaaaacaaaaaaactcttcgtcacagtcacaaactacagggtgggagttcatcaacaaacaggggggcagggggaagacatggcttctttcttcaatttcagggcaatcattggagggtggggtgtggggtagacattccatacacaaatcacaaagggggctcttctgggaaattggaacttttcagggcaatcaactggaacttgcatagggacaggaacaaacaaagacttctacacaatgcatagggacaggaacaaacaaagacttctacacaatgggcaacaatgccgggttgtagaactgcgtgtttgactcttcaagaggcttcgattttccataacaaatccaacactatgtggaaaaaatcctctcagagcactcaccacacattcagatcttcacagcgaccattctacattttaccggcggggaacaaagggactacgccctaattcgagcgagtaccagccgaggagatgctatcacctttggacgtaaagctggactaatttgcgcttcgctctgaagctactacctgggaaaaatacgacggaagtaccgagcgattttgatccttagggatgcttagttgacaagaactcaactttcagttcaagatttgttctagaaagttcatctacgcattagaactgtacttttgtcaacacttcttacaaattctgtttttgcgtctcaaataaacaggaatcttgtaacacattgaaatgttgctgcaatacttcatggctgtatacagggtcggcttgggatcttataatgatattgaacttcacaaaataaattaaaaaaatagacattctttttgggaattgggatattaaattaatgttggagttttttcaaacgttacaaagcctccgcgcaaaagagaaacctggataagattatccagttttcgataacaaacagaaaaaaatccaacatggacatcttaggtgtgacaggacaacaatatcaaaatatttagataatggctagtggggattaaacaaaacaaaaaagtcgttagggattgggctagcgtgccatcaatcgccagactctttaaagtcgagtagacttaaatgtttcttgactctacaaagaactgtaggtgacaagagtttctgtgccttgggaaagaaactaaacttgtgccctgtgtggacctcgctgacatccacagcagtaacacaagtgacataccagggcagacacagccttgtcacctcgttgcctaaccgcgagcggttcacaaaaactaaaaagttgatgtttgacagataaacatctgcccaaactctgctaacacctagcgagtttcacgggacatttcggcaacggttctgcaaaatgaggatttagacaatccagtctaaatacctcagtgagacaaaatctcaccaacaacttacttcaacaactcattcaaacaagacagggctagacaaaggggtatatgacaacaacaaggactaaaatcaaaacaatattaacaaggggggaggggggatacgtgtgacaacaacaaaagaccgaaaagactagtatactgggttcaaacaggatatcaaactttttaaacaagactaagggaaatgaacgcaacatatgatatagagaacactacatcattacgttttcaatcaacagtccaatccaggacataagaacctttcatgaacgttcactagacaactctctcattttcaaatcacaagctggggaaagacttcattttcaaaacagggctacacttcacttttcgaaacaggggatagacttcatttttcaagacaggggggttgggctttacttttcaaaactggggatagacttacttttcaaaactgggggcatttcatttctcaagactgggggtggactttatttttcaaaacggggggctactttttcaaaacaggggatgaaagcaacacgcaaggggaagaccaaagggacattggaaagtatgacagttctgacgaacaaccgcttccatttatcgaccgaaagcaagcttcacctgtactcaacgcggccagatcctaacctcaccagccttgtcacagcttctgctcttggcctactttcaatcaacaaagagaagagaggtcaactaactattcgccaaaaaaaatcaaactccagcacggacacgggctaacagacaacacgggctaatagacaacacgggctaatagacaacacgggctaatagacaacacgggctaatagacaacacgggctaatagacaacacgggacaacagacaatgggctctaaaacttccagacaaaacagggatagacaaacaaacagacaacaacatactttttgacttctagatatactcaggggcttacaaacacaaacaatattgaaatttggttcctatatgagctcacacgggataagacatttcttgctccgactactaatgaaagtgttcacagatagctgaacaacacttccttcatcacgagtattacacttgtgacatgtcagatacaaaaagacatacttcattcacggggggacttcaactacttcactgggggggagacttcaactactacttcacgggctctttttaactaacctctggcatccttttgacacctacaaagatagattagtcaaaaaaaaaaaacaaggggcaacacagacaaggggggggctttttcaggggctaacttctacacttcaagacagttattctcaaacagtgtcgacagagaacgctatcttcaaatctaaaagtgacagcttttctcctggctgcttgaaaaaaacacagaagtggggggcctctccacggtttccctcttcacttcttcacggggccacttctcaaggggatgacttctcaatgggatgacttctccaactaacctgtggcatgacatacaccaacagagataggcttcgctggaaaaacaagggactactctcacacagactatacggggctaagctcatacacggaccataccaacaacatcacacatctaatcaaatgaccaaatcaataatcacaaaaaacggttattctgtaaaaaactgttgatctataggaatacatgcaaaaaatacaacatactgttatacttcataattggattcaatattcaaaatatttaacgttacttttaatcaaaattttcaaaaaaattttacgttacttttttattcaactgtttgtctatatatttcatcaatatttcaaaaaaattcaaatcaatgctttcatcatgggtacaatatcaatacaatacagttagtacgctacaataacatacaattctgttctacgatacatacaatacaatacaataccagtatacatatggggttacaagttaaatacactatgatgtatgaaatggtacatgcctatacaatcaacagcacgaccaaatcaacatcacaacaaaatgtgtacatacttacacctctttggaaaaattattaacattctgcaacaaaaactacaaaaatgggctctttcatggggactaacagactgaaacagtttcgggggcactagaagacatgaaacagtttctgggggcaagacaagaggaatctgggctaaactacatgggaagactggggcgatatttactcaggtcaaacttcagggtgtacgttacaaatgtaacactaagtggggggctaaaaatggatcgagccccacgtacagggcgctatttgaagcgttcaactggacaagacaacaactggatactgaaggaggcag

SEQ ID NO: 2019 - DNA, 3970 bp, Diabrotica virgifera
acttacaaaacgtttattcaaaactttaaactcttaccaggtttattcaaaattttactacaaaaacaatgattacaaacaaaacaattaaaattaaatttgttgggcagtatatgtcaaataaaatttgacctatttatttcaacacaagatttgacgtagctgtcaaatgtcataagtcactgcctttttttaccattatgaaagcaaatttctttatacaattatttaccagaaatttatccacttgaaatttagtaaaattaaaaaaacgtatcataccttaaaaacaaaaaaactcttcgtcacagtcacaaactacagggtgggagttcatcaacaaacaggggggcagggggaagacatggcttctttcttcaatttcagggcaatcattggagggtggggtgtggggtagacattccatacacaaatcacaaagggggctcttctgggaaattggaacttttcagggcaatcaactggaacttgcatagggacaggaacaaacaaagacttctacacaatgcatagggacaggaacaaacaaagacttctacacaatgggcaacaatgccgggttgtagaactgcgtgtttgactcttcaagaggcttcgattttccataacaaatccaacactatgtggaaaaaatcctctcagagcactcaccacacattcagatcttcacagcgaccattctacattttaccggcggggaacaaagggactacgccctaattcgagcgagtaccagccgaggagatgctatcacctttggacgtaaagctggactaatttgcgcttcgctctgaagctactacctgggaaaaatacgacggaagtaccgagcgattttgatccttagggatgcttagttgacaagaactcaactttcagttcaagatttgttctagaaagttcatctacgcattagaactgtacttttgtcaacacttcttacaaattctgtttttgcgtctcaaataaacaggaatcttgtaacacattgaaatgttgctgcaatacttcatggctgtatacagggtcggcttgggatcttataatgatattgaacttcacaaaataaattaaaaaaatagacattctttttgggaattgggatattaaattaatgttggagttttttcaaacgttacaaagcctccgcgcaaaagagaaacctggataagattatccagttttcgataacaaacagaaaaaaatccaacatggacatcttaggtgtgacaggacaacaatatcaaaatatttagataatggctagtggggattaaacaaaacaaaaaagtcgttagggattgggctagcgtgccatcaatcgccagactctttaaagtcgagtagacttaaatgtttcttgactctacaaagaactgtaggtgacaagagtttctgtgccttgggaaagaaactaaacttgtgccctgtgtggacctcgctgacatccacagcagtaacacaagtgacataccagggcagacacagccttgtcacctcgttgcctaaccgcgagcggttcacaaaaactaaaaagttgatgtttgacagataaacatctgcccaaactctgctaacacctagcgagtttcacgggacatttcggcaacggttctgcaaaatgaggatttagacaatccagtctaaatacctcagtgagacaaaatctcaccaacaacttacttcaacaactcattcaaacaagacagggctagacaaaggggtatatgacaacaacaaggactaaaatcaaaacaatattaacaaggggggaggggggatacgtgtgacaacaacaaaagaccgaaaagactagtatactgggttcaaacaggatatcaaactttttaaacaagactaagggaaatgaacgcaacatatgatatagagaacactacatcattacgttttcaatcaacagtccaatccaggacataagaacctttcatgaacgttcactagacaactctctcattttcaaatcacaagctggggaaagacttcattttcaaaacagggctacacttcacttttcgaaacaggggatagacttcatttttcaagacaggggggttgggctttacttttcaaaactggggatagacttacttttcaaaactgggggcatttcatttctcaagactgggggtggactttatttttcaaaacggggggctactttttcaaaacaggggatgaaagcaacacgcaaggggaagaccaaagggacattggaaagtatgacagttctgacgaacaaccgcttccatttatcgaccgaaagcaagcttcacctgtactcaacgcggccagatcctaacctcaccagccttgtcacagcttctgctcttggcctactttcaatcaacaaagagaagagaggtcaactaactattcgccaaaaaaaatcaaactccagcacggacacgggctaacagacaacacgggctaatagacaacacgggctaatagacaacacgggctaatagacaacacgggctaatagacaacacgggctaatagacaacacgggacaacagacaatgggctctaaaacttccagacaaaacagggatagacaaacaaacagacaacaacatactttttgacttctagatatactcaggggcttacaaacacaaacaatattgaaatttggttcctatatgagctcacacgggataagacatttcttgctccgactactaatgaaagtgttcacagatagctgaacaacacttccttcatcacgagtattacacttgtgacatgtcagatacaaaaagacatacttcattcacggggggacttcaactacttcactgggggggagacttcaactactacttcacgggctctttttaactaacctctggcatccttttgacacctacaaagatagattagtcaaaaaaaaaaaacaaggggcaacacagacaaggggggggctttttcaggggctaacttctacacttcaagacagttattctcaaacagtgtcgacagagaacgctatcttcaaatctaaaagtgacagcttttctcctggctgcttgaaaaaaacacagaagtggggggcctctccacggtttccctcttcacttcttcatggggtgacttctacaaggggtaacttctctcacacagactatacgggactaaactcatacacggaccataccaacaacattacacatctaatcaaatgaccaaatcaataatcacaaaaaacggttattctgtaaaaaactgttgatctataggaatacatgcaaaaaatacaacatactgttatacttcataattggattcaatattcaaaatatttaacgttacttttaatcaaaattttcaaaaaaattttacgttacttttttattcaactgtttgtctatatatttcatcaatatttcaaaaaaattcaaatcaatgctttcatcatgggtacaatatcaatacaatacagttagtacgctacaataacatacaattctgttctacgatacatacaatacaatacaataccagtatacatatggggttacaagttaaatacactatgatgtatgaaatggtacatgcctatacaatcaacagcacgaccaaatcaacatcacaacaaaatgtgtacatacttacacctctttggaaaaattattaacattctgcaacaaaaactacaaaaatgggctctttcatggggactaacagactgaaacagtttcgggggcactagaagacatgaaacagtttctgggggcaagacaagaggaatctgggctaaactacatgggaagactggggcgatatttactcaggtcaaacttcagggtgtacgttacaaatgtaacactaagtggggggctaaaaatggatcgagccccacgtacagggcgctatttgaagcgttcaactggacaagacaacaactggatactgaaggaggcag

SEQ ID NO: 2020 - DNA, 2122 bp, Diabrotica virgifera
  SmartBlast Evalue=1E-162; Info=Trehalase n=1 Tax=Tenebrio molitor RepID=TREA_TENMO
acgttgtgtatcatttatcgttacaaaaatactattttttataaaaggtatcaataagtgaaagcgctactccattggtccatccgaatccagtttgcggattatattccccgccgccgccgcttgcccccggtgtagtggagtcatatttctcgtacatcgattgagttttatcatatcccagtatacacgattctacataattcttcgccaactgctctgccatatctaaagctatggaattgttagtgttcttaagccctaagatgacgatctcttgtaaaggaggccaagcattcggcaagtcccattgctcaccgctgtcaagcagtgatgacggaataccacctttgaaatcgtcaatgttattattctttaagtactgtacgaccttttctccagttttaggatttttatcgaagactcctgtccataaaggagttaagttactaggataaaagcttttcctagattgtccagattttatatcgaaatcataccaaacaccgtcttcctcggaataaagaaatttttgtatagccctctctagcttgtcagctctgccgttccattcttgagttttgtcaacattgcctagtattgaataaaatctagatagttctttaaaggctttacatagaaaggcgttcaaatcaacaggtattactctgaaagtgtcaatatctggcaagtccgatccggaagttccgtcttcttttaagatccaacgtgaggaaaagtcccaaccactttcggctccaccttttaggttcttataacactgttccttatctttgtctttaaaggactggcaagtgatagtatcttcatagtaagattcaggtctcggtgtgccgctaggacccgcatacctcgccatcttgtgcccatgaacagataccatacgatttgttaaaaaccacgtcaattccttttcgagaatattcacatttgttgctaaccattctttgttgttagtagcatctatgtaaagacccaccatcagagacaataagggtggttgagatcggtttaagtaatatacccggctgccattcggtataaacccatatctgtcaactagggagagaaagttttccaagatacctttaacagtttctgtcatttcactaagcaataaacctttaataatccagtacgtgtcccaataataaatttctttaaaccttcctccaggaataataaatccgtgtggaagataaattaaggaatgctgatcttggtgtttgctcacggactcatctacttttctagctagatttggccatatgtttacaagtatttttgcaaattctaaaactatgggatcttttattccatcgaggaaactggggttatcgttaaaatctggaggtgtccattctactaattctttgttatccttaaaattatcttccacaaacttaataacttcatctttagtcggattatcgttatattttgccataaactttttgaaatttcctaaagtttcatccggggattgtcgttggctcaaatccacgaacgtctttgagtcactgaagatccttgcggattgcactgtgtccaacagctccccttgacaataaattaaactatcacatgattgtacggtctcagcgctgatatagctgaataatactgccgaagcgtacacaatgtagcacttcatatcgactagaaattgtcaaaagacgtatatgaactataggtaagtatacataagcccatattactttaaaaatctcattttgttttcacccaattttgaaaaaatgtgaaaactttgaattatccacgtccgtctgtccgtctgtctgtctgtcggtctgtctgtctgtgatcacaactcctccgtcaacagctaggctgtgtgtccgtcggtctgtcctaccgcgaatataattcctccgtccttataccagctagaattacaattgaggtgtcaaatgaaagcttataatccaaggatggtactaaaggtgagaaattttacctaggctgtctgtccgtcggtctgtccgaccgcaaatataactccttcgtctttatcccagataatttcataaatgttttcacagaagttgttaattttactatgacttgttcacaacattac

SEQ ID NO: 2021 - DNA, 2122 bp, Diabrotica virgifera
  SmartBlast Evalue=1E-162; Info=Trehalase n=1 Tax=Tenebrio molitor RepID=TREA_TENMO
acgttgtgtatcatttatcgttacaaaaatactattttttataaaaggtatcaataagtgaaagcgctactccattggtccatccgaatccagtttgcggattatattccccgccgccgccgcttgcccccggtgtagtggagtcatatttctcgtacatcgattgagttttatcatatcccagcatacacgattctacataattcttcgccaactgctctgccatatctaaagctatggaattgttagtgttcttaagccctaagatgacgatctcttgtaaaggaggccaagcattcggcaagtcccattgctcaccgctgtcaagcagtgatgacggaataccacctttgaaatcgtcaatgttattattctttaagtactgtacgaccttttttccagtttcaggatttttatcgaagactcctgtccataaaggagttaagttactaggataaaagcttttcctagattgtccagattttatatcgaaatcataccaaacaccgtcttcctcggaataaagaaatttctgtatagccttctctagcttgtcagctctgccgctccattcttgagttttgtcaacattgcctagtattgaataaaatctagatagttctttaaaggctttacatagaaaggcgttcaaatcaacaggtattactctgaaagtgtcaatatctggcaagtccgatccggaagttccgtcttcttttaagatccaacgtgaggaaaagtcccaaccactttcggctccaccttttaggttcttataacactgttccttatctttgtctttaaaggactggcaagtgatagtatcttcatagtaagattcaggtctcggtgtgccgctaggacccgcatacctcgccatcttgtgcccatgaacagataccatacgatttgttaaaaaccacgtcaattccttttcgagaatattcacatttgttgctaaccattctttgttgttagtagcatctatgtaaagacccaccatcagagacaataagggtggttgagatcggtttaagtaatatacccggctgccattcggtataaacccatatctgtcaactagggagagaaagttttccaagatacctttaacagtttctgtcatttcactaagcaataaacctttaataatccagtacgtgtcccaataataaatttctttaaaccttcctccaggaataataaatccgtgtggaagataaattaaggaatgctgatcttggtgtttgctcacggactcatctacttttctagctagatttggccatatgtttacaagtatttttgcaaattctaaaactatgggatcttttattccatcgaggaaactggggttatcgttaaaatctggaggtgtccattctactaattctttgttatccttaaaattatcttccacaaacttaataacttcatctttagtcggattatcgttatattttgccataaactttttgaaatttcctaaagtttcatccggggattgtcgttggctcaaatccacgaacgtctttgagtcactgaagatccttgcggattgcactgtgtccaacagctccccttgacaataaattaaactatcacatgattgtacggtctcagcgctgatatagctgaataatactgccgaagcgtacacaatgtagcacttcatatcgactagaaattgtcaaaagacgtatatgaactataggtaagtatacataagcccatattactttaaaaatctcattttgttttcacccaattttgaaaaaatgtgaaaactttgaattatccacgtccgtctgtccgtctgtctgtctgtcggtctgtctgtctgtgatcacaactcctccgtcaacagctaggctgtgtgtccgtcggtctgtcctaccgcgaatataattcctccgtccttataccagctagaattacaattgaggtgtcaaatgaaagcttataatccaaggatggtactaaaggtgagaaattttacctaggctgtctgtccgtcggtctgtccgaccgcaaatataactccttcgtctttatcccagataatttcataaatgttttcacagaagttgttaattttactatgacttgttcacaacattac

SEQ ID NO: 2022 - DNA, 1955 bp, Diabrotica virgifera
  SmartBlast Evalue=1E-162; Info=Trehalase n=1 Tax=Tenebrio molitor RepID=TREA_TENMO
acgttgtgtatcatttatcgttacaaaaatactattttttataaaaggtatcaataagtgaaagcgctactccattggtccatccgaatccagtttgcggattatattccccgccgccgccgcttgcccccggtgtagtggagtcatatttctcgtacatcgattgagttttatcatatcccagtatacacgattctacataattcttcgccaactgctctgccatatctaaagctatggaattgttagtgttcttaagccctaagatgacgatctcttgtaaaggaggccaagcattcggcaagtcccattgctcaccgctgtcaagcagtgatgacggaataccacctttgaaatcgtcaatgttattattctttaagtactgtacgaccttttctccagttttaggatttttatcgaagactcctgtccataaaggagttaagttactaggataaaagcttttcctagattgtccagattttatatcgaaatcataccaaacaccgtcttcctcggaataaagaaatttttgtatagccctctctagcttgtcagctctgccgttccattcttgagttttgtcaacattgcctagtattgaataaaatctagatagttctttaaaggctttacatagaaaggcgttcaaatcaacaggtattactctgaaagtgtcaatatctggcaagtccgatccggaagttccgtcttcttttaagatccaacgtgaggaaaagtcccaaccactttcggctccaccttttaggttcttataacactgttccttatctttgtctttaaaggactggcaagtgatagtatcttcatagtaagattcaggtctcggtgtgccgctaggacccgcatacctcgccatcttgtgcccatgaacagataccatacgatttgttaaaaaccacgtcaattccttttcgagaatattcacatttgttgctaaccattctttgttgttagtagcatctatgtaaagacccaccatcagagacaataagggtggttgagatcggtttaagtaatatacccggctgccattcggtataaacccatatctgtcaactagggagagaaagttttccaagatacctttaacagtttctgtcatttcactaagcaataaacctttaataatccagtacgtgtcccaataataaatttctttaaaccttcctccaggaataataaatccgtgtggaagataaattaaggaatgctgatcttggtgtttgctcacggactcatctacttttctagctagatttggccatatgtttacaagtatttttgcaaattctaaaactatgggatcttttattccatcgaggaaactggggttatcgttaaaatctggaggtgtccattctactaattctttgttatccttaaaattatcttccacaaacttaataacttcatctttagtcggattatcgttatattttgccataaactttttgaaatttcctaaagtttcatccggggattgtcgttggctcaaatccacgaacgtctttgagtcactgaagatccttgcggattgcactgtgtccaacagctccccttgacaataaattaaactatcacatgattgtacggtctcagcgctgatatagctgaataatactgccgaagcgtacacaatgtagcacttcatatcgactagaaattgtcaaaagacgtatatgaaaacagatataacgatattccagctactaatgtctctggactcgggactacgtaactaaattttcaggtattactttcatgatctgatgttatttatggtagagtagtagccactgatactccactgcagtttgtttattaatttactctcgatacgttttcgcgaatgcgaatacgttcgattatgttttttcgcgacgatttataacatggtcaacagaccacgtggagtcttggaggccggcggc

SEQ ID NO: 2023 - DNA, 1955 bp, Diabrotica virgifera
  SmartBlast Evalue=1E-162; Info=Trehalase n=1 Tax=Tenebrio molitor RepID=TREA_TENMO
acgttgtgtatcatttatcgttacaaaaatactattttttataaaaggtatcaataagtgaaagcgctactccattggtccatccgaatccagtttgcggattatattccccgccgccgccgcttgcccccggtgtagtggagtcatatttctcgtacatcgattgagttttatcatatcccagcatacacgattctacataattcttcgccaactgctctgccatatctaaagctatggaattgttagtgttcttaagccctaagatgacgatctcttgtaaaggaggccaagcattcggcaagtcccattgctcaccgctgtcaagcagtgatgacggaataccacctttgaaatcgtcaatgttattattctttaagtactgtacgaccttttttccagtttcaggatttttatcgaagactcctgtccataaaggagttaagttactaggataaaagcttttcctagattgtccagattttatatcgaaatcataccaaacaccgtcttcctcggaataaagaaatttctgtatagccttctctagcttgtcagctctgccgctccattcttgagttttgtcaacattgcctagtattgaataaaatctagatagttctttaaaggctttacatagaaaggcgttcaaatcaacaggtattactctgaaagtgtcaatatctggcaagtccgatccggaagttccgtcttcttttaagatccaacgtgaggaaaagtcccaaccactttcggctccaccttttaggttcttataacactgttccttatctttgtctttaaaggactggcaagtgatagtatcttcatagtaagattcaggtctcggtgtgccgctaggacccgcatacctcgccatcttgtgcccatgaacagataccatacgatttgttaaaaaccacgtcaattccttttcgagaatattcacatttgttgctaaccattctttgttgttagtagcatctatgtaaagacccaccatcagagacaataagggtggttgagatcggtttaagtaatatacccggctgccattcggtataaacccatatctgtcaactagggagagaaagttttccaagatacctttaacagtttctgtcatttcactaagcaataaacctttaataatccagtacgtgtcccaataataaatttctttaaaccttcctccaggaataataaatccgtgtggaagataaattaaggaatgctgatcttggtgtttgctcacggactcatctacttttctagctagatttggccatatgtttacaagtatttttgcaaattctaaaactatgggatcttttattccatcgaggaaactggggttatcgttaaaatctggaggtgtccattctactaattctttgttatccttaaaattatcttccacaaacttaataacttcatctttagtcggattatcgttatattttgccataaactttttgaaatttcctaaagtttcatccggggattgtcgttggctcaaatccacgaacgtctttgagtcactgaagatccttgcggattgcactgtgtccaacagctccccttgacaataaattaaactatcacatgattgtacggtctcagcgctgatatagctgaataatactgccgaagcgtacacaatgtagcacttcatatcgactagaaattgtcaaaagacgtatatgaaaacagatataacgatattccagctactaatgtctctggactcgggactacgtaactaaattttcaggtattactttcatgatctgatgttatttatggtagagtagtagccactgatactccactgcagtttgtttattaatttactctcgatacgttttcgcgaatgcgaatacgttcgattatgttttttcgcgacgatttataacatggtcaacagaccacgtggagtcttggaggccggcggc

SEQ ID NO: 2024 - DNA, 1930 bp, Diabrotica virgifera
  SmartBlast Evalue=1E-162; Info=Trehalase n=1 Tax=Tenebrio molitor RepID=TREA_TENMO
acgttgtgtatcatttatcgttacaaaaatactattttttataaaaggtatcaataagtgaaagcgctactccattggtccatccgaatccagtttgcggattatattccccgccgccgccgcttgcccccggtgtagtggagtcatatttctcgtacatcgattgagttttatcatatcccagtatacacgattctacataattcttcgccaactgctctgccatatctaaagctatggaattgttagtgttcttaagccctaagatgacgatctcttgtaaaggaggccaagcattcggcaagtcccattgctcaccgctgtcaagcagtgatgacggaataccacctttgaaatcgtcaatgttattattctttaagtactgtacgaccttttctccagttttaggatttttatcgaagactcctgtccataaaggagttaagttactaggataaaagcttttcctagattgtccagattttatatcgaaatcataccaaacaccgtcttcctcggaataaagaaatttttgtatagccctctctagcttgtcagctctgccgttccattcttgagttttgtcaacattgcctagtattgaataaaatctagatagttctttaaaggctttacatagaaaggcgttcaaatcaacaggtattactctgaaagtgtcaatatctggcaagtccgatccggaagttccgtcttcttttaagatccaacgtgaggaaaagtcccaaccactttcggctccaccttttaggttcttataacactgttccttatctttgtctttaaaggactggcaagtgatagtatcttcatagtaagattcaggtctcggtgtgccgctaggacccgcatacctcgccatcttgtgcccatgaacagataccatacgatttgttaaaaaccacgtcaattccttttcgagaatattcacatttgttgctaaccattctttgttgttagtagcatctatgtaaagacccaccatcagagacaataagggtggttgagatcggtttaagtaatatacccggctgccattcggtataaacccatatctgtcaactagggagagaaagttttccaagatacctttaacagtttctgtcatttcactaagcaataaacctttaataatccagtacgtgtcccaataataaatttctttaaaccttcctccaggaataataaatccgtgtggaagataaattaaggaatgctgatcttggtgtttgctcacggactcatctacttttctagctagatttggccatatgtttacaagtatttttgcaaattctaaaactatgggatcttttattccatcgaggaaactggggttatcgttaaaatctggaggtgtccattctactaattctttgttatccttaaaattatcttccacaaacttaataacttcatctttagtcggattatcgttatattttgccataaactttttgaaatttcctaaagtttcatccggggattgtcgttggctcaaatccacgaacgtctttgagtcactgaagatccttgcggattgcactgtgtccaacagctccccttgacaataaattaaactatcacatgattgtacggtctcagcgctgatatagctgaataatactgccgaagcgtacacaatgtagcacttcatatcgactagaaattgtcaaaagacgtatatgaactctattcacagaaaatttcatttattttgacgtacctataggtaagtatacataagcccatattactttaaaaatctcattttgttttcacccaattttgaaaaaatgtgaaaactttgaattatccacgtccgtctgtccgtctgtctgtctgtcggtctgtctgtctgtgatcacaactcctccgtcaacagataatttcataaatgttttcacagaag

SEQ ID NO: 2025 - DNA, 1930 bp, Diabrotica virgifera
  SmartBlast Evalue=1E-162; Info=Trehalase n=1 Tax=Tenebrio molitor RepID=TREA_TENMO
acgttgtgtatcatttatcgttacaaaaatactattttttataaaaggtatcaataagtgaaagcgctactccattggtccatccgaatccagtttgcggattatattccccgccgccgccgcttgcccccggtgtagtggagtcatatttctcgtacatcgattgagttttatcatatcccagcatacacgattctacataattcttcgccaactgctctgccatatctaaagctatggaattgttagtgttcttaagccctaagatgacgatctcttgtaaaggaggccaagcattcggcaagtcccattgctcaccgctgtcaagcagtgatgacggaataccacctttgaaatcgtcaatgttattattctttaagtactgtacgaccttttttccagtttcaggatttttatcgaagactcctgtccataaaggagttaagttactaggataaaagcttttcctagattgtccagattttatatcgaaatcataccaaacaccgtcttcctcggaataaagaaatttctgtatagccttctctagcttgtcagctctgccgctccattcttgagttttgtcaacattgcctagtattgaataaaatctagatagttctttaaaggctttacatagaaaggcgttcaaatcaacaggtattactctgaaagtgtcaatatctggcaagtccgatccggaagttccgtcttcttttaagatccaacgtgaggaaaagtcccaaccactttcggctccaccttttaggttcttataacactgttccttatctttgtctttaaaggactggcaagtgatagtatcttcatagtaagattcaggtctcggtgtgccgctaggacccgcatacctcgccatcttgtgcccatgaacagataccatacgatttgttaaaaaccacgtcaattccttttcgagaatattcacatttgttgctaaccattctttgttgttagtagcatctatgtaaagacccaccatcagagacaataagggtggttgagatcggtttaagtaatatacccggctgccattcggtataaacccatatctgtcaactagggagagaaagttttccaagatacctttaacagtttctgtcatttcactaagcaataaacctttaataatccagtacgtgtcccaataataaatttctttaaaccttcctccaggaataataaatccgtgtggaagataaattaaggaatgctgatcttggtgtttgctcacggactcatctacttttctagctagatttggccatatgtttacaagtatttttgcaaattctaaaactatgggatcttttattccatcgaggaaactggggttatcgttaaaatctggaggtgtccattctactaattctttgttatccttaaaattatcttccacaaacttaataacttcatctttagtcggattatcgttatattttgccataaactttttgaaatttcctaaagtttcatccggggattgtcgttggctcaaatccacgaacgtctttgagtcactgaagatccttgcggattgcactgtgtccaacagctccccttgacaataaattaaactatcacatgattgtacggtctcagcgctgatatagctgaataatactgccgaagcgtacacaatgtagcacttcatatcgactagaaattgtcaaaagacgtatatgaactctattcacagaaaatttcatttattttgacgtacctataggtaagtatacataagcccatattactttaaaaatctcattttgttttcacccaattttgaaaaaatgtgaaaactttgaattatccacgtccgtctgtccgtctgtctgtctgtcggtctgtctgtctgtgatcacaactcctccgtcaacagataatttcataaatgttttcacagaag

SEQ ID NO: 2026 - DNA, 1884 bp, Diabrotica virgifera
  SmartBlast Evalue=1E-162; Info=Trehalase n=1 Tax=Tenebrio molitor RepID=TREA_TENMO
acgttgtgtatcatttatcgttacaaaaatactattttttataaaaggtatcaataagtgaaagcgctactccattggtccatccgaatccagtttgcggattatattccccgccgccgccgcttgcccccggtgtagtggagtcatatttctcgtacatcgattgagttttatcatatcccagtatacacgattctacataattcttcgccaactgctctgccatatctaaagctatggaattgttagtgttcttaagccctaagatgacgatctcttgtaaaggaggccaagcattcggcaagtcccattgctcaccgctgtcaagcagtgatgacggaataccacctttgaaatcgtcaatgttattattctttaagtactgtacgaccttttctccagttttaggatttttatcgaagactcctgtccataaaggagttaagttactaggataaaagcttttcctagattgtccagattttatatcgaaatcataccaaacaccgtcttcctcggaataaagaaatttttgtatagccctctctagcttgtcagctctgccgttccattcttgagttttgtcaacattgcctagtattgaataaaatctagatagttctttaaaggctttacatagaaaggcgttcaaatcaacaggtattactctgaaagtgtcaatatctggcaagtccgatccggaagttccgtcttcttttaagatccaacgtgaggaaaagtcccaaccactttcggctccaccttttaggttcttataacactgttccttatctttgtctttaaaggactggcaagtgatagtatcttcatagtaagattcaggtctcggtgtgccgctaggacccgcatacctcgccatcttgtgcccatgaacagataccatacgatttgttaaaaaccacgtcaattccttttcgagaatattcacatttgttgctaaccattctttgttgttagtagcatctatgtaaagacccaccatcagagacaataagggtggttgagatcggtttaagtaatatacccggctgccattcggtataaacccatatctgtcaactagggagagaaagttttccaagatacctttaacagtttctgtcatttcactaagcaataaacctttaataatccagtacgtgtcccaataataaatttctttaaaccttcctccaggaataataaatccgtgtggaagataaattaaggaatgctgatcttggtgtttgctcacggactcatctacttttctagctagatttggccatatgtttacaagtatttttgcaaattctaaaactatgggatcttttattccatcgaggaaactggggttatcgttaaaatctggaggtgtccattctactaattctttgttatccttaaaattatcttccacaaacttaataacttcatctttagtcggattatcgttatattttgccataaactttttgaaatttcctaaagtttcatccggggattgtcgttggctcaaatccacgaacgtctttgagtcactgaagatccttgcggattgcactgtgtccaacagctccccttgacaataaattaaactatcacatgattgtacggtctcagcgctgatatagctgaataatactgccgaagcgtacacaatgtagcacttcatatcgactagaaattgtcaaaagacgtatatgaaataatttcataaatgttttcacagaagttgttaattttactatgacttgttcacaacattacgacgccaggtattgtttaggtactttgtttatctatatcaacactttacatgagtagttaattgtttattccacaatccgtttaatgaagccgtgattgataagtatcgtgaat

SEQ ID NO: 2027 - DNA, 1884 bp, Diabrotica virgifera
  SmartBlast Evalue=1E-162; Info=Trehalase n=1 Tax=Tenebrio molitor RepID=TREA_TENMO
acgttgtgtatcatttatcgttacaaaaatactattttttataaaaggtatcaataagtgaaagcgctactccattggtccatccgaatccagtttgcggattatattccccgccgccgccgcttgcccccggtgtagtggagtcatatttctcgtacatcgattgagttttatcatatcccagcatacacgattctacataattcttcgccaactgctctgccatatctaaagctatggaattgttagtgttcttaagccctaagatgacgatctcttgtaaaggaggccaagcattcggcaagtcccattgctcaccgctgtcaagcagtgatgacggaataccacctttgaaatcgtcaatgttattattctttaagtactgtacgaccttttttccagtttcaggatttttatcgaagactcctgtccataaaggagttaagttactaggataaaagcttttcctagattgtccagattttatatcgaaatcataccaaacaccgtcttcctcggaataaagaaatttctgtatagccttctctagcttgtcagctctgccgctccattcttgagttttgtcaacattgcctagtattgaataaaatctagatagttctttaaaggctttacatagaaaggcgttcaaatcaacaggtattactctgaaagtgtcaatatctggcaagtccgatccggaagttccgtcttcttttaagatccaacgtgaggaaaagtcccaaccactttcggctccaccttttaggttcttataacactgttccttatctttgtctttaaaggactggcaagtgatagtatcttcatagtaagattcaggtctcggtgtgccgctaggacccgcatacctcgccatcttgtgcccatgaacagataccatacgatttgttaaaaaccacgtcaattccttttcgagaatattcacatttgttgctaaccattctttgttgttagtagcatctatgtaaagacccaccatcagagacaataagggtggttgagatcggtttaagtaatatacccggctgccattcggtataaacccatatctgtcaactagggagagaaagttttccaagatacctttaacagtttctgtcatttcactaagcaataaacctttaataatccagtacgtgtcccaataataaatttctttaaaccttcctccaggaataataaatccgtgtggaagataaattaaggaatgctgatcttggtgtttgctcacggactcatctacttttctagctagatttggccatatgtttacaagtatttttgcaaattctaaaactatgggatcttttattccatcgaggaaactggggttatcgttaaaatctggaggtgtccattctactaattctttgttatccttaaaattatcttccacaaacttaataacttcatctttagtcggattatcgttatattttgccataaactttttgaaatttcctaaagtttcatccggggattgtcgttggctcaaatccacgaacgtctttgagtcactgaagatccttgcggattgcactgtgtccaacagctccccttgacaataaattaaactatcacatgattgtacggtctcagcgctgatatagctgaataatactgccgaagcgtacacaatgtagcacttcatatcgactagaaattgtcaaaagacgtatatgaaataatttcataaatgttttcacagaagttgttaattttactatgacttgttcacaacattacgacgccaggtattgtttaggtactttgtttatctatatcaacactttacatgagtagttaattgtttattccacaatccgtttaatgaagccgtgattgataagtatcgtgaat

SEQ ID NO: 2028 - DNA, 2326 bp, Diabrotica virgifera
  SmartBlast Evalue=7E-71; Info=Uncharacterized FAM18-like protein CG5021 n=2 Tax=Formicidae RepID=E2BS17_9HYME
acaagaagtatgatgtgtgtgtaaataaatttaaatatttttaagtaaaactaatttttaacgtgttatgatcattggttatctattcacgatatcaaataatctctactttagtgatgtcgtcagcttcaatgcctctcttagaggatactacagcctttggcgaagatgagggagaatttggcgttaaaaaggatgctttagcgcatccatacattacattttttcacctagctttccgaggagctgccatagtagcatacttattatgtgaacagtttaccgcaagttttataacaagttttgtaagtgtaattttattattatcaatggacttctggactgtaaaaaatataacaggaaggctaatggttggattgaggtggtggaattatgtggatgaggatggaaaatctcattgggtatttgaatctaggcagaacaaagtaaatgaacgagaggctcgcatcttctgggttgctttggttctaaccccattattgtggtcctttctatttattgtaggattatttggattcgagttcaggtggttgttgctagtaacgattgcattgattttaactggatccaatctctatggatacgtgagatgcaaggttggaaataaagaaagtgtcagcagtttgacctcggactttcttcgaagacaagttctacaaaacgcggtctctctaatgacgcgtcaacctcccgctcaaccagcacccagccagtcaaacttgccaacaaatgtagtctaaggatagatataaaaatagtttgagagtggacaaataaactaaatcgagtaaatttaatgaaaaaatttctcttagtaaaaggtatatttatttagaaacctttaaaaggaccacaaatatcacagaacacgtttcactctctaaaaagcgcatcatcagtgttacaagcttaacatgctgagccacccaaaaatacaggttaaaaccctttaaatgccgactaaatgtcttacatagttaaataaacatattttgttggttgattgtaagttgagcgtttagtattggctttttactaattgtcataaatttggccttctttatgttaagagctagtccgtatctgttgctgacttctgttatacgatttgttaatatctgtaaatcattcagattatcggcaaaaactatggtgtcatctgcatatctaatgttattcaaccattcaccatttattaatacttctttcaggcaaccgtctagcgtcacgcgaatcaaagcttccttaaacacccattcagagtaaatattgaatagtagtggagataaaatacagccctgtcgtactctggattaattacatctactaaatctcttatattgtaaattgttgatcagattgttcttataattattgctcttttacataaacttctggtcttgatggcaagaccagaaacgagatagactacataatcagtgacaaaaaaaatatattcaacgatgtcacagtccttaatagctttaccacaggcagcgatcatagaatggtaagagccacagtaaaattagacttaataacagaaagatccaaaatgattaggaagaaaccaacccagtatggaggacccaacaaatttaaatgaataccaaggaatgtcaataaaatcctacaacaaattgaatgcatgaataatgtaaatgtcctaaacgaaaatatcgtagaagctattcgagaggctcaagtaaaatgctaccctaaaagacgccaagacgaaaaaataaccattgaaacaaagcaactaatggagactagaagaaaaatcaaagcaaacaaaagcattgattaagaaaaactgcgaaaataaataaagaagtatcaaaagctataaggaaagatttaaggaaatttaagaatgaaaaagtccaccgaactatagaagagaataaaagtttgaaagtcctgagaagacggctaaacaatggaaaatgcgagataaacaaactaaagaacaaaggaggagtccccacatcaaatagagaagaactactacacatagttgaagacttctatcaagaactatacacaagtcaaagagaagaccaaacgaacttaggaagccgccgcatcacgcaaaattatcaaccagggttcagaactcatgccagagattacactaagcgaattccaggacgcaatgaaaaatatgaaaaacaacaaagcgccaggagaagatgaagtcgtaatagaagctataaagatgggcggacgtgtccttctcaaccaaataaaaattttgtttaacctttgtctaacagattgttgcataccggaaacatggaac

SEQ ID NO: 2029 - DNA, 2297 bp, Diabrotica virgifera
  SmartBlast Evalue=7E-71; Info=Uncharacterized FAM18-like protein CG5021 n=2 Tax=Formicidae RepID=E2BS17_9HYME
acaagaagtatgatgtgtgtgtaaataaatttaaatatttttaagtaaaactaatttttaacgtgttatgatcattggttatctattcacgatatcaaataatctctactttagtgatgtcgtcagcttcaatgcctctcttagaggatactacagcctttggcgaagatgagggagaatttggcgttaaaaaggatgctttagcgcatccatacattacattttttcacctagctttccgaggagctgccatagtagcatacttattatgtgaacagtttaccgcaagttttataacaagttttgtaagtgtaattttattattatcaatggacttctggactgtaaaaaatataacaggaaggctaatggttggattgaggtggtggaattatgtggatgaggatggaaaatctcattgggtatttgaatctaggcagaacaaagtaaatgaacgagaggctcgcatcttctgggttgctttggttctaaccccattattgtggtcctttctatttattgtaggattatttggattcgagttcaggtggttgttgctagtaacgattgcattgattttaactggatccaatctctatggatacgtgagatgcaaggttggaaataaagaaagtgtcagcagtttgacctcggactttcttcgaagacaagttctacaaaacgcggtctctctaatgacgcgtcaacctcccgctcaaccagcacccagccagtcaaacttgccaacaaatgtagtctaaggatagatataaaaatagtttgagagtggacaaataaactaaatcgagtaaatttaatgaaaaaatttctcttagtaaaaggtatatttatttagaaacctttaaaaggaccacaaatatcacagaacacgtttcactctctaaaaagcgcatcatcagtgttacaagcttaacatgctgagccacccaaaaatacaggttaaaaccctttaaatgccgactaaatgtcttacatagttaaataaacatattttgttggttgattgtaagttgagcgtttagtattggctttttactaattgtcataaatttggccttctttatgttaagagctagtccgtatctgttgctgacttctgttatacgatttgttaatatctgtaaatcattcagattatcggcaaaaactatggtgtcatctgcatatctaatgttattcaaccattcaccatttattaatacttctttcaggcaaccgtctagcgtcacgcgaatcaaagcttccttaaacacccattcagagtaaatattgaatagtagtggagataaaatacagccctgtcgtactctggattaattacatctactaaatctcttatattgtaaattgttgatcagattgttcttataattattgctcttttacataaacttctggtcttgatggcaagaccagaaacgagatagactacataatcagtgacaaaaaaaatatattcaacgatgtcacagtccttaatagctttaccacaggcagcgatcatagaatggtaagagccacagtaaaattagacttaataacagaaagatccaaaatgattaggaagaaaccaacccagtatggaggacccaacaaatttaaatgaataccaaggaatgtcaataaaatcctacaacaaattgaatgcatgaataatgtaaatgtcctaaacgaaaatatcgtagaagctattcgagaggctcaagtaaaatgctaccctaaaagacgccaagacgaaaaaataaccattgaaacaaagcaactaatggagactagaagaaaaatcaaagcaaacaaaagcattgattaagaaaaactgcgaaaataaataaaaaataaatttaagaatgaaaaagtccaccgaactatagaagagaataaaagtttgaaagtcctgagaagacggctaaacaatggaaaatgcgagataaacaaactaaagaacaaaggaggagtccccacatcaaatagagaagaactactacacatagttgaagacttctatcaagaactatacacaagtcaaagagaagaccaaacgaacttaggaagccgccgcatcacgcaaaattatcaaccagggttcagaactcatgccagagattacactaagcgaattccaggacgcaatgaaaaatatgaaaaacaacaaagcgccaggagaagatgaagtcgtaatagaagctataaagatgggcggacgtgtccttctcaaccaaataaaaattttgtttaacctttgtctaacagattgttgcataccggaaacatggaac

SEQ ID NO: 2030 - DNA, 2257 bp, Diabrotica virgifera
  SmartBlast Evalue=7E-71; Info=Uncharacterized FAM18-like protein CG5021 n=2 Tax=Formicidae RepID=E2BS17_9HYME
acaagaagtatgatgtgtgtgtaaataaatttaaatatttttaagtaaaactaatttttaacgtgttatgatcattggttatctattcacgatatcaaataatctctactttagtgatgtcgtcagcttcaatgcctctcttagaggatactacagcctttggcgaagatgagggagaatttggcgttaaaaaggatgctttagcgcatccatacattacattttttcacctagctttccgaggagctgccatagtagcatacttattatgtgaacagtttaccgcaagttttataacaagttttgtaagtgtaattttattattatcaatggacttctggactgtaaaaaatataacaggaaggctaatggttggattgaggtggtggaattatgtggatgaggatggaaaatctcattgggtatttgaatctaggcagaacaaagtaaatgaacgagaggctcgcatcttctgggttgctttggttctaaccccattattgtggtcctttctatttattgtaggattatttggattcgagttcaggtggttgttgctagtaacgattgcattgattttaactggatccaatctctatggatacgtgagatgcaaggttggaaataaagaaagtgtcagcagtttgacctcggactttcttcgaagacaagttctacaaaacgcggtctctctaatgacgcgtcaacctcccgctcaaccagcacccagccagtcaaacttgccaacaaatgtagtctaaggatagatataaaaatagtttgagagtggacaaataaactaaatcgagtaaatttaatgaaaaaatttctcttagtaaaaggtatatttatttagaaacctttaaaaggaccacaaatatcacagaacacgtttcactctctaaaaagcgcatcatcagtgttacaagcttaacatgctgagccacccaaaaatacaggttaaaaccctttaaatgccgactaaatgtcttacatagttaaataaacatattttgttggttgattgtaagttgagcgtttagtattggctttttactaattgtcataaatttggccttctttatgttaagagctagtccgtatctgttgctgacttctgttatacgatttgttaatatctgtaaatcattcagattatcggcaaaaactatggtgtcatctgcatatctaatgttattcaaccattcaccatttattaatacttctttcaggcaaccgtctagcgtcacgcgaatcaaagcttccttaaacacccattcagagtaaatattgaatagtagtggagataaaatacagccctgtcgtactctggattaattacatctactaaatctcttatattgtaaattgttgatcagattgttcttataattattgctcttttacataaacttctggtcttgatggcaagaccagaaacgagatagactacataatcagtgacaaaaaaaatatattcaacgatgtcacagtccttaatagctttaccacaggcagcgatcatagaatggtaagagccacagtaaaattagacttaataacagaaagatccaaaatgattaggaagaaaccaacccagtatggaggacccaacaaatttaaatgaataccaaggaatgtcaataaaatcctacaacaaattgaatgcatgaataatgtaaatgtcctaaacgaaaatatcgtagaagctattcgagaggctcaagtaaaatgctaccctaaaagacgccaagacgaaaaaataaccattgaaacaaagcaactaatggagactagaagaaaaatcaaagcaaacaaaagcattgattaagaaaaactgcgaaaataaataaagaagtatcaaaagctataaggaaagatttaaggaaatttaagaatgaaaaagtccaccgaactatagaagagaataaaagtttgaaagtcctgagaagacggctaaacaatggaaaatgcgagataaacaaactaaagaacaaaggaggagtccccacatcaaatagagaagaactactacacatagttgaagacttctatcaagaactatacacaagtcaaagagaagaccaaacgaacttaggaagccgccgcatcacgcaaagttatcaaccagggttcagagctcatgccagagatcacactaagcgaaatccaggacgcaatgaaaaggatgaaaaacacaaagcgccaggagaagatggagtcgtaatagaagctataaagatgggtggacgtgtcc

SEQ ID NO: 2031 - DNA, 2228 bp, Diabrotica virgifera
  SmartBlast Evalue=6E-71; Info=Uncharacterized FAM18-like protein CG5021 n=2 Tax=Formicidae RepID=E2BS17_9HYME
acaagaagtatgatgtgtgtgtaaataaatttaaatatttttaagtaaaactaatttttaacgtgttatgatcattggttatctattcacgatatcaaataatctctactttagtgatgtcgtcagcttcaatgcctctcttagaggatactacagcctttggcgaagatgagggagaatttggcgttaaaaaggatgctttagcgcatccatacattacattttttcacctagctttccgaggagctgccatagtagcatacttattatgtgaacagtttaccgcaagttttataacaagttttgtaagtgtaattttattattatcaatggacttctggactgtaaaaaatataacaggaaggctaatggttggattgaggtggtggaattatgtggatgaggatggaaaatctcattgggtatttgaatctaggcagaacaaagtaaatgaacgagaggctcgcatcttctgggttgctttggttctaaccccattattgtggtcctttctatttattgtaggattatttggattcgagttcaggtggttgttgctagtaacgattgcattgattttaactggatccaatctctatggatacgtgagatgcaaggttggaaataaagaaagtgtcagcagtttgacctcggactttcttcgaagacaagttctacaaaacgcggtctctctaatgacgcgtcaacctcccgctcaaccagcacccagccagtcaaacttgccaacaaatgtagtctaaggatagatataaaaatagtttgagagtggacaaataaactaaatcgagtaaatttaatgaaaaaatttctcttagtaaaaggtatatttatttagaaacctttaaaaggaccacaaatatcacagaacacgtttcactctctaaaaagcgcatcatcagtgttacaagcttaacatgctgagccacccaaaaatacaggttaaaaccctttaaatgccgactaaatgtcttacatagttaaataaacatattttgttggttgattgtaagttgagcgtttagtattggctttttactaattgtcataaatttggccttctttatgttaagagctagtccgtatctgttgctgacttctgttatacgatttgttaatatctgtaaatcattcagattatcggcaaaaactatggtgtcatctgcatatctaatgttattcaaccattcaccatttattaatacttctttcaggcaaccgtctagcgtcacgcgaatcaaagcttccttaaacacccattcagagtaaatattgaatagtagtggagataaaatacagccctgtcgtactctggattaattacatctactaaatctcttatattgtaaattgttgatcagattgttcttataattattgctcttttacataaacttctggtcttgatggcaagaccagaaacgagatagactacataatcagtgacaaaaaaaatatattcaacgatgtcacagtccttaatagctttaccacaggcagcgatcatagaatggtaagagccacagtaaaattagacttaataacagaaagatccaaaatgattaggaagaaaccaacccagtatggaggacccaacaaatttaaatgaataccaaggaatgtcaataaaatcctacaacaaattgaatgcatgaataatgtaaatgtcctaaacgaaaatatcgtagaagctattcgagaggctcaagtaaaatgctaccctaaaagacgccaagacgaaaaaataaccattgaaacaaagcaactaatggagactagaagaaaaatcaaagcaaacaaaagcattgattaagaaaaactgcgaaaataaataaaaaataaatttaagaatgaaaaagtccaccgaactatagaagagaataaaagtttgaaagtcctgagaagacggctaaacaatggaaaatgcgagataaacaaactaaagaacaaaggaggagtccccacatcaaatagagaagaactactacacatagttgaagacttctatcaagaactatacacaagtcaaagagaagaccaaacgaacttaggaagccgccgcatcacgcaaagttatcaaccagggttcagagctcatgccagagatcacactaagcgaaatccaggacgcaatgaaaaggatgaaaaacacaaagcgccaggagaagatggagtcgtaatagaagctataaagatgggtggacgtgtcc

SEQ ID NO: 2032 - DNA, 1749 bp, Diabrotica virgifera
  SmartBlast Evalue=5E-71; Info=Uncharacterized FAM18-like protein CG5021 n=2 Tax=Formicidae RepID=E2BS17_9HYME
acaagaagtatgatgtgtgtgtaaataaatttaaatatttttaagtaaaactaatttttaacgtgttatgatcattggttatctattcacgatatcaaataatctctactttagtgatgtcgtcagcttcaatgcctctcttagaggatactacagcctttggcgaagatgagggagaatttggcgttaaaaaggatgctttagcgcatccatacattacattttttcacctagctttccgaggagctgccatagtagcatacttattatgtgaacagtttaccgcaagttttataacaagttttgtaagtgtaattttattattatcaatggacttctggactgtaaaaaatataacaggaaggctaatggttggattgaggtggtggaattatgtggatgaggatggaaaatctcattgggtatttgaatctaggcagaacaaagtaaatgaacgagaggctcgcatcttctgggttgctttggttctaaccccattattgtggtcctttctatttattgtaggattatttggattcgagttcaggtggttgttgctagtaacgattgcattgattttaactggatccaatctctatggatacgtgagatgcaaggttggaaataaagaaagtgtcagcagtttgacctcggactttcttcgaagacaagttctacaaaacgcggtctctctaatgacgcgtcaacctcccgctcaaccagcacccagccagtcaaacttgccaacaaatgtagtctaaggatagatataaaaatagtttgagagtggacaaataaactaaatcgagtaaatttaatgaaaaaatttctcttagtaaaaggtatatttatttagaaacctttaaaaggaccacaaatatcacagaacacgtttcactctctaaaaagcgcatcatcagtgttacaagcttaacatgctgagccacccaaaaatacaggttaaaaccctttaaatgccgactaaatgtcttacatagttaaataaacatattttgttggttgattgtaagttgagcgtttagtattggctttttactaattgtcataaatttggccttctttatgttaagagctagtccgtatctgttgctgacttctgttatacgatttgttaatatctgtaaatcattcagattatcggcaaaaactatggtgtcatctgcatatctaatgttattcaaccattcaccatttattaatacttctttcaggcaaccgtctaaagcttccttaaatacccattcagagtaaatattgaatagtagtggagataaaatacagccctgtcgtactcctcgttctattgcaattttatcagttaactggtcttctattttgattttggccgtgtgattgtaataaatgtttctgataatggttgagtataaaatgtgataaaattggatctccatctcgctgaacactcactatttgatccttactcaaatgcgtaagacgctagaaaaccaaaaaattacatagaattcgtatgtagctactttgtatttgatgaatgcaattaaaagtttattgtcaagtctcaaactaatctagattttaagtaatctatacatacttatctggtcttaaaaataaatgtgattgtaagttaatttttgccaatgtttttttaatataatgtattatattgttcatttttgttaaaattaagacaggaaattcactattcctattttagtttaaacagcttcttttataacttattac

SEQ ID NO: 2033 - DNA, 891 bp, Diabrotica virgifera
  SmartBlast Evalue=6E-17; Info=Endonuclease-reverse transcriptase n=1 Tax=Bombyx mori RepID=D7F157_BOMMO
ctggtcttaccatctgggcttttccacgtccatcttctgtgatcttttttagagaagaaactattcatctggtaaagattttgttgtaatagaaattctagtagtgtttggccacgctcgtttctgcctttagatccaaaatgattaggaagaaaccaacccagtatggattgacccaacaaatttaaatgaataccaaggaatgtcaataaaatcctacaacaaattgaatgcatgaataatgtaaatgtcctaaacgaaaatatcgtagaagctattcgagaggctcaagtaaaatgctaccctaaaagacgccaagacgaaaaaataaccattgaaacaaagcaactaatggagactagaagaaaaatcaaagcaaacaaaagcattgattaagaaaaactgcgaaaataaataaagaagtatcaaaagctataaggaaagatttaaggaaatttaagaatgaaaaagtccaccgaactatagaagagaataaaagtttgaaagtcctgagaagacggctaaacaatggaaaatgcgagataaacaaactaaagaacaaaggaggagtccccacatcaaatagagaagaactactacacatagttgaagacttctatcaagaactatacacaagtcaaagagaagaccaaacgaacttaggaagccgccgcatcacgcaaaattatcaaccagggttcagaactcatgccagagattacactaagcgaattccaggacgcaatgaaaaatatgaaaaacaacaaagcgccaggagaagatgaagtcgtaatagaagctataaagatgggcggacgtgtccttctcaaccaaataaaaattttgtttaacctttgtctaacagattgttgcataccggaaacatggaac

SEQ ID NO: 2034 - DNA, 862 bp, Diabrotica virgifera
  SmartBlast Evalue=3E-15; Info=Endonuclease-reverse transcriptase n=1 Tax=Bombyx mori RepID=D7F157_BOMMO
ctggtcttaccatctgggcttttccacgtccatcttctgtgatcttttttagagaagaaactattcatctggtaaagattttgttgtaatagaaattctagtagtgtttggccacgctcgtttctgcctttagatccaaaatgattaggaagaaaccaacccagtatggattgacccaacaaatttaaatgaataccaaggaatgtcaataaaatcctacaacaaattgaatgcatgaataatgtaaatgtcctaaacgaaaatatcgtagaagctattcgagaggctcaagtaaaatgctaccctaaaagacgccaagacgaaaaaataaccattgaaacaaagcaactaatggagactagaagaaaaatcaaagcaaacaaaagcattgattaagaaaaactgcgaaaataaataaaaaataaatttaagaatgaaaaagtccaccgaactatagaagagaataaaagtttgaaagtcctgagaagacggctaaacaatggaaaatgcgagataaacaaactaaagaacaaaggaggagtccccacatcaaatagagaagaactactacacatagttgaagacttctatcaagaactatacacaagtcaaagagaagaccaaacgaacttaggaagccgccgcatcacgcaaaattatcaaccagggttcagaactcatgccagagattacactaagcgaattccaggacgcaatgaaaaatatgaaaaacaacaaagcgccaggagaagatgaagtcgtaatagaagctataaagatgggcggacgtgtccttctcaaccaaataaaaattttgtttaacctttgtctaacagattgttgcataccggaaacatggaac

SEQ ID NO: 2035 - DNA, 822 bp, Diabrotica virgifera
  SmartBlast Evalue=8E-15; Info=Endonuclease-reverse transcriptase n=1 Tax=Bombyx mori RepID=D7F164_BOMMO
ctggtcttaccatctgggcttttccacgtccatcttctgtgatcttttttagagaagaaactattcatctggtaaagattttgttgtaatagaaattctagtagtgtttggccacgctcgtttctgcctttagatccaaaatgattaggaagaaaccaacccagtatggattgacccaacaaatttaaatgaataccaaggaatgtcaataaaatcctacaacaaattgaatgcatgaataatgtaaatgtcctaaacgaaaatatcgtagaagctattcgagaggctcaagtaaaatgctaccctaaaagacgccaagacgaaaaaataaccattgaaacaaagcaactaatggagactagaagaaaaatcaaagcaaacaaaagcattgattaagaaaaactgcgaaaataaataaagaagtatcaaaagctataaggaaagatttaaggaaatttaagaatgaaaaagtccaccgaactatagaagagaataaaagtttgaaagtcctgagaagacggctaaacaatggaaaatgcgagataaacaaactaaagaacaaaggaggagtccccacatcaaatagagaagaactactacacatagttgaagacttctatcaagaactatacacaagtcaaagagaagaccaaacgaacttaggaagccgccgcatcacgcaaagttatcaaccagggttcagagctcatgccagagatcacactaagcgaaatccaggacgcaatgaaaaggatgaaaaacacaaagcgccaggagaagatggagtcgtaatagaagctataaagatgggtggacgtgtcc

SEQ ID NO: 2036 - DNA, 793 bp, Diabrotica virgifera
  SmartBlast Evalue=2E-11; Info=Endonuclease-reverse transcriptase n=1 Tax=Bombyx mori RepID=D7F164_BOMMO
ctggtcttaccatctgggcttttccacgtccatcttctgtgatcttttttagagaagaaactattcatctggtaaagattttgttgtaatagaaattctagtagtgtttggccacgctcgtttctgcctttagatccaaaatgattaggaagaaaccaacccagtatggattgacccaacaaatttaaatgaataccaaggaatgtcaataaaatcctacaacaaattgaatgcatgaataatgtaaatgtcctaaacgaaaatatcgtagaagctattcgagaggctcaagtaaaatgctaccctaaaagacgccaagacgaaaaaataaccattgaaacaaagcaactaatggagactagaagaaaaatcaaagcaaacaaaagcattgattaagaaaaactgcgaaaataaataaaaaataaatttaagaatgaaaaagtccaccgaactatagaagagaataaaagtttgaaagtcctgagaagacggctaaacaatggaaaatgcgagataaacaaactaaagaacaaaggaggagtccccacatcaaatagagaagaactactacacatagttgaagacttctatcaagaactatacacaagtcaaagagaagaccaaacgaacttaggaagccgccgcatcacgcaaagttatcaaccagggttcagagctcatgccagagatcacactaagcgaaatccaggacgcaatgaaaaggatgaaaaacacaaagcgccaggagaagatggagtcgtaatagaagctataaagatgggtggacgtgtcc

SEQ ID NO: 2037 - DNA, 1999 bp, Diabrotica virgifera
gaaattatatacattttattactaatttttatcattttttatacacaatttggcctaaattaagaaacttaacctatattaggtacaacaaaaatgaactaaacgttacagtggcaaattattttttaacccaacaaaagatgtccacaaaaaacatttaccgctcgtttgacgtaaacatgaattaatattttaattttatgtacatgtttatctttggaggagagttaaaaaagcaaaaaatgttaaatatattcaacaattgataaaatattacgtttgtatacgttaattgtctaagatcagtgtccaagatagtgtagtttatgtaggaaaaatattgataaacgtattaaaataagtataagatttcggtagagacctcagcctaaatattagaaaacgagtacagtggaacctcgataactcggattaatcgggaccgcggccgatccgggttatcgaaaatccgggttagccggagaatatggtaaaaattaataaaatatggtatacttacagataaactccggtataattgaaataacatgaaatatatacagggtgagtttttggtgcgggatcggtcgataattccattacggtatagaatatcgaaggaagttatttagaaaaagtgtaggcaatgatattctccacgcttggagaatgtgtccatttctacagggtgatcagtgacagcgtggtgtatcaaacatgtattttttttaaatgggacgccctatatattttttcatatttgtattcccctcataattcttgttcatgtatgtagggttttgcattgctatacagagtatttaacaagtcgacgctgtcaagccaaaacggcataaacgacattaacttgatttttcaggaaacacaaaaactgattatttttatttttaccaattctgcttatctgcacagtgattcaaaaaaattggtgattttttttcaaattttaatatattgtgaacattaatgtggctgaaaatactgtctgaaataaattaaaaactataaaatggcgcttatgtccaatcaagatataacattggtgaatatgccaaacttacttctggcgtttgtgtcgatcgcatcgttgtaaggttagtcaatatggcgcttaaaagggatatatgccattaatgaaaaaagaaacgaaaatcaaaaattgtcgtttatgccaacaagaaaaattatgaaattacgaagatttttgatatgctttattttttattaatcaaaaatacattctaagttaaaaacaaaaccctaaattctttaaacatgttttggtgctaggatgaaatacttaaaagtaaatatgaaatacttaaaagtggatatctaataataagtagtggattctaattcataatcactgtcaatatttggttcaacatccgtattgatttgattgcttatattttccttattttgatcactacttataccggcatccaaaccattatctgctgctaagttgaaacatgatgtgagatcgtgactaaatatttcttcttctactgcaacgtctggtgtttcctcaaagatgataatgtcattgctaaaagcttctgcaatgttggcattataaatgtcataaacctctaagggaaatatagggggattattgtcagtcagtatatcattttgtactgattcggtatatgttttattttcatttagtaaggccattatttttttacttctgctattcatcacattgactctggttttcttcaattacatcttcctcttccttaatcttcggctcagacttcaaatttttacagttgatcaaatcactatcatcttcaatttgttcatgttttacattttcaatggatactgccgtattcatttggatgaaccaattcttggaatcttcattagttgtatcatcatcagatagaagcatttcttgttttaattcattttttatggtaactggaaattcggtattgttcacaccattgttctctaattc

SEQ ID NO: 2038 - DNA, 1991 bp, Diabrotica virgifera
gaaattatatacattttattactaatttttatcattttttatacacaatttggcctaaattaagaaacttaacctatattaggtacaacaaaaatgaactaaacgttacagtggcaaattattttttaacccaacaaaagatgtccacaaaaaacatttaccgctcgtttgacgtaaacatgaattaatattttaattttatgtacatgtttatctttggaggagagttaaaaaagcaaaaaatgttaaatatattcaacaattgataaaatattacgtttgtatacgttaattgtctaagatcagtgtccaagatagtgtagtttatgtaggaaaaatattgataaacgtattaaaataagtataagatttcggtagagacctcagcctaaatattagaaaacgagtacagtggaacctcgataactcggattaatcgggaccgcggccgatccgggttatcgaaaatccgggttagccggagaatatggtaaaaattaataaaatatggtatacttacagataaactccggtataattgaaataacatgaaatatatacagggtgagtttttggtgcgggatcggtcgataattccattacggtatagaatatcgaaggaagttatttagaaaaagtgtaggcaatgatattctccacgcttggagaatgtgtccatttctacagggtgatcagtgacagcgtggtgtatcaaacatgtattttttttaaatgggacgccctatatattttttcatatttgtattcccctcataattcttgttcatgtatgtagggttttgcattgctatacagagtatttaacaagtcgacgctgtcaagccaaaacggcataaacgacattaacttgatttttcaggaaacacaaaaactgattatttttatttttaccaattctgcttatctgcacagtgattcaaaaaaattggtgattttttttcaaattttaatatattgtgaacattaatgtggctgaaaatactgtctgaaataaattaaaaactataaaatggcgcttatgtccaatcaagatataacattggtgaatatgccaaacttacttctggcgtttgtgtcgatcgcatcgttgtaaggttagtcaatatggcgcttaaaagggatatatgccattaatgaaaaaagaaacgaaaatcaaaaattgtcgtttatgccaacaagaaaaattatgaaattacgaagatttttgatatgctttattttttattaatcaaaaatacattctaagttaaaaacaaaaccctaaattcttggtgtttttggtgctaggatgaaatccttaaattaaataattcgcaaatagaagcggatatctaataatagcggattctaattcataatcactgtcaatatttggttcaacatccgtattgatttgattgcttatattttccttattttgatcactacttataccggcatccaaaccattatctgctgctaagttgaaacatgatgtgagatcgtgactaaatatttcttcttctactgcaacgtctggtgtttcctcaaagatgataatgtcattgctaaaagcttctgcaatgttggcattataaatgtcataaacctctaagggaaatatagggggattattgtcagtcagtatatcattttgtactgattcggtatatgttttattttcatttagtaaggccattatttttttacttctgctattcatcacattgactctggttttcttcaattacatcttcctcttccttaatcttcggctcagacttcaaatttttacagttgatcaaatcactatcatcttcaatttgttcatgttttacattttcaatggatactgccgtattcatttggatgaaccaattcttggaatcttcattagttgtatcatcatcagatagaagcatttcttgttttaattcattttttatggtaactggaaattcggtattgttcacaccattgttctctaattc

SEQ ID NO: 2039 - DNA, 1916 bp, Diabrotica virgifera
tccaaatgaatccaaaatagacaaaatagatttctgttaaaaaaacaagttttgtacaaactgttgcttggaaccctatggttctcagccctcgatatggtagatgtacatctacagggtaccaggtttcccccatatgataatctgatgcgctcgagttactgcaaaaatccccgcttgggctcccctaccattagaataaaattatttatttttgtcggacaaaaaagagagcgcgatcgttgagtccgacacccgcaagatgtcactatagcgcggtacagttttgttattagaaaactcttaattattttcaattgaaagtacagtggaacctcgataactcggattaatcgggaccgcggccgatccgggttatcgaaaatccgggttagccggagaatatggtaaaaattaataaaatatggtatacttacagataaactccggtataattgaaataacatgaaatatatacagggtgagtttttggtgcgggatcggtcgataattccattacggtatagaatatcgaaggaagttatttagaaaaagtgtaggcaatgatattctccacgcttggagaatgtgtccatttctacagggtgatcagtgacagcgtggtgtatcaaacatgtattttttttaaatgggacgccctatatattttttcatatttgtattcccctcataattcttgttcatgtatgtagggttttgcattgctatacagagtatttaacaagtcgacgctgtcaagccaaaacggcataaacgacattaacttgatttttcaggaaacacaaaaactgattatttttatttttaccaattctgcttatctgcacagtgattcaaaaaaattggtgattttttttcaaattttaatatattgtgaacattaatgtggctgaaaatactgtctgaaataaattaaaaactataaaatggcgcttatgtccaatcaagatataacattggtgaatatgccaaacttacttctggcgtttgtgtcgatcgcatcgttgtaaggttagtcaatatggcgcttaaaagggatatatgccattaatgaaaaaagaaacgaaaatcaaaaattgtcgtttatgccaacaagaaaaattatgaaattacgaagatttttgatatgctttattttttattaatcaaaaatacattctaagttaaaaacaaaaccctaaattctttaaacatgttttggtgctaggatgaaatacttaaaagtaaatatgaaatacttaaaagtggatatctaataataagtagtggattctaattcataatcactgtcaatatttggttcaacatccgtattgatttgattgcttatattttccttattttgatcactacttataccggcatccaaaccattatctgctgctaagttgaaacatgatgtgagatcgtgactaaatatttcttcttctactgcaacgtctggtgtttcctcaaagatgataatgtcattgctaaaagcttctgcaatgttggcattataaatgtcataaacctctaagggaaatatagggggattattgtcagtcagtatatcattttgtactgattcggtatatgttttattttcatttagtaaggccattatttttttacttctgctattcatcacattgactctggttttcttcaattacatcttcctcttccttaatcttcggctcagacttcaaatttttacagttgatcaaatcactatcatcttcaatttgttcatgttttacattttcaatggatactgccgtattcatttggatgaaccaattcttggaatcttcattagttgtatcatcatcagatagaagcatttcttgttttaattcattttttatggtaactggaaattcggtattgttcacaccattgttctctaattc

SEQ ID NO: 2040 - DNA, 1908 bp, Diabrotica virgifera
tccaaatgaatccaaaatagacaaaatagatttctgttaaaaaaacaagttttgtacaaactgttgcttggaaccctatggttctcagccctcgatatggtagatgtacatctacagggtaccaggtttcccccatatgataatctgatgcgctcgagttactgcaaaaatccccgcttgggctcccctaccattagaataaaattatttatttttgtcggacaaaaaagagagcgcgatcgttgagtccgacacccgcaagatgtcactatagcgcggtacagttttgttattagaaaactcttaattattttcaattgaaagtacagtggaacctcgataactcggattaatcgggaccgcggccgatccgggttatcgaaaatccgggttagccggagaatatggtaaaaattaataaaatatggtatacttacagataaactccggtataattgaaataacatgaaatatatacagggtgagtttttggtgcgggatcggtcgataattccattacggtatagaatatcgaaggaagttatttagaaaaagtgtaggcaatgatattctccacgcttggagaatgtgtccatttctacagggtgatcagtgacagcgtggtgtatcaaacatgtattttttttaaatgggacgccctatatattttttcatatttgtattcccctcataattcttgttcatgtatgtagggttttgcattgctatacagagtatttaacaagtcgacgctgtcaagccaaaacggcataaacgacattaacttgatttttcaggaaacacaaaaactgattatttttatttttaccaattctgcttatctgcacagtgattcaaaaaaattggtgattttttttcaaattttaatatattgtgaacattaatgtggctgaaaatactgtctgaaataaattaaaaactataaaatggcgcttatgtccaatcaagatataacattggtgaatatgccaaacttacttctggcgtttgtgtcgatcgcatcgttgtaaggttagtcaatatggcgcttaaaagggatatatgccattaatgaaaaaagaaacgaaaatcaaaaattgtcgtttatgccaacaagaaaaattatgaaattacgaagatttttgatatgctttattttttattaatcaaaaatacattctaagttaaaaacaaaaccctaaattcttggtgtttttggtgctaggatgaaatccttaaattaaataattcgcaaatagaagcggatatctaataatagcggattctaattcataatcactgtcaatatttggttcaacatccgtattgatttgattgcttatattttccttattttgatcactacttataccggcatccaaaccattatctgctgctaagttgaaacatgatgtgagatcgtgactaaatatttcttcttctactgcaacgtctggtgtttcctcaaagatgataatgtcattgctaaaagcttctgcaatgttggcattataaatgtcataaacctctaagggaaatatagggggattattgtcagtcagtatatcattttgtactgattcggtatatgttttattttcatttagtaaggccattatttttttacttctgctattcatcacattgactctggttttcttcaattacatcttcctcttccttaatcttcggctcagacttcaaatttttacagttgatcaaatcactatcatcttcaatttgttcatgttttacattttcaatggatactgccgtattcatttggatgaaccaattcttggaatcttcattagttgtatcatcatcagatagaagcatttcttgttttaattcattttttatggtaactggaaattcggtattgttcacaccattgttctctaattc

SEQ ID NO: 2041 - DNA, 1506 bp, Diabrotica virgifera
atcgggaaggaaggtgttgagagggcctaaggttatagttgagttttagttccaatattttctgtatgctagaatattccacagggtggaataaaatatcgagaatttatggtgtaaaatgtcgagaaaagttgtttaaagggaatgtaggcaatgatattctccgcgcttgcaaggtgtgtccatttctacagggtgatcagtgacagcgtggtgtatcaaacatgtattttttttaaatgggacgccctatatattttttcatatttgtattcccctcataattcttgttcatgtatgtagggttttgcattgctatacagagtatttaacaagtcgacgctgtcaagccaaaacggcataaacgacattaacttgatttttcaggaaacacaaaaactgattatttttatttttaccaattctgcttatctgcacagtgattcaaaaaaattggtgattttttttcaaattttaatatattgtgaacattaatgtggctgaaaatactgtctgaaataaattaaaaactataaaatggcgcttatgtccaatcaagatataacattggtgaatatgccaaacttacttctggcgtttgtgtcgatcgcatcgttgtaaggttagtcaatatggcgcttaaaagggatatatgccattaatgaaaaaagaaacgaaaatcaaaaattgtcgtttatgccaacaagaaaaattatgaaattacgaagatttttgatatgctttattttttattaatcaaaaatacattctaagttaaaaacaaaaccctaaattctttaaacatgttttggtgctaggatgaaatacttaaaagtaaatatgaaatacttaaaagtggatatctaataataagtagtggattctaattcataatcactgtcaatatttggttcaacatccgtattgatttgattgcttatattttccttattttgatcactacttataccggcatccaaaccattatctgctgctaagttgaaacatgatgtgagatcgtgactaaatatttcttcttctactgcaacgtctggtgtttcctcaaagatgataatgtcattgctaaaagcttctgcaatgttggcattataaatgtcataaacctctaagggaaatatagggggattattgtcagtcagtatatcattttgtactgattcggtatatgttttattttcatttagtaaggccattatttttttacttctgctattcatcacattgactctggttttcttcaattacatcttcctcttccttaatcttcggctcagacttcaaatttttacagttgatcaaatcactatcatcttcaatttgttcatgttttacattttcaatggatactgccgtattcatttggatgaaccaattcttggaatcttcattagttgtatcatcatcagatagaagcatttcttgttttaattcattttttatggtaactggaaattcggtattgttcacaccattgttctctaattc

SEQ ID NO: 2042 - DNA, 1498 bp, Diabrotica virgifera
atcgggaaggaaggtgttgagagggcctaaggttatagttgagttttagttccaatattttctgtatgctagaatattccacagggtggaataaaatatcgagaatttatggtgtaaaatgtcgagaaaagttgtttaaagggaatgtaggcaatgatattctccgcgcttgcaaggtgtgtccatttctacagggtgatcagtgacagcgtggtgtatcaaacatgtattttttttaaatgggacgccctatatattttttcatatttgtattcccctcataattcttgttcatgtatgtagggttttgcattgctatacagagtatttaacaagtcgacgctgtcaagccaaaacggcataaacgacattaacttgatttttcaggaaacacaaaaactgattatttttatttttaccaattctgcttatctgcacagtgattcaaaaaaattggtgattttttttcaaattttaatatattgtgaacattaatgtggctgaaaatactgtctgaaataaattaaaaactataaaatggcgcttatgtccaatcaagatataacattggtgaatatgccaaacttacttctggcgtttgtgtcgatcgcatcgttgtaaggttagtcaatatggcgcttaaaagggatatatgccattaatgaaaaaagaaacgaaaatcaaaaattgtcgtttatgccaacaagaaaaattatgaaattacgaagatttttgatatgctttattttttattaatcaaaaatacattctaagttaaaaacaaaaccctaaattcttggtgtttttggtgctaggatgaaatccttaaattaaataattcgcaaatagaagcggatatctaataatagcggattctaattcataatcactgtcaatatttggttcaacatccgtattgatttgattgcttatattttccttattttgatcactacttataccggcatccaaaccattatctgctgctaagttgaaacatgatgtgagatcgtgactaaatatttcttcttctactgcaacgtctggtgtttcctcaaagatgataatgtcattgctaaaagcttctgcaatgttggcattataaatgtcataaacctctaagggaaatatagggggattattgtcagtcagtatatcattttgtactgattcggtatatgttttattttcatttagtaaggccattatttttttacttctgctattcatcacattgactctggttttcttcaattacatcttcctcttccttaatcttcggctcagacttcaaatttttacagttgatcaaatcactatcatcttcaatttgttcatgttttacattttcaatggatactgccgtattcatttggatgaaccaattcttggaatcttcattagttgtatcatcatcagatagaagcatttcttgttttaattcattttttatggtaactggaaattcggtattgttcacaccattgttctctaattc

SEQ ID NO: 2043 - DNA, 933 bp, Diabrotica virgifera
gaaattatatacattttattactaatttttatcattttttatacacaatttggcctaaattaagaaacttaacctatattaggtacaacaaaaatgaactaaacgttacagtggcaaattattttttaacccaacaaaagatgtccacaaaaaacatttaccgctcgtttgacgtaaacatgaattaatattttaattttatgtacatgtttatctttggaggagagttaaaaaagcaaaaaatgttaaatatattcaacaattgataaaatattacgtttgtatacgttaattgtctaagatcagtgtccaagatagtgtagtttatgtaggaaaaatattgataaacgtattaaaataagtataagatttcggtagagacctcagcctaaatattagaaaacgagtacagtggaacctcgataactcggattaatcgggaccgcggccgatccgggttatcgaaaatccgggttagccggagaatatggtaaaaattaataaaatatggtatacttacagataaactccggtataattgaaataacatgaaatatatacagggtgagtttttggtgcgggatcggtcgataattccattacggtatagaatatcgaaggaagttatttagaaaaagtgtaggcaatgatattctccacgcttggagaatgtgtccatttctacagggtgatcagtgacagcgtggtgtatcaaacatgtaattttttaaatgggacgccctatatattttttcatatttgtattcccctcataattcttgttcatgtatgtagggttttgcattgctatacagagtgtttggcaagttatgaccatttttatttcgaaatcactatgggattagcaccctgtatgtgggaagtaatttgtagacagtagtttgttttatgtggtaggatggacaatgtact

SEQ ID NO: 2044 - DNA, 850 bp, Diabrotica virgifera
tccaaatgaatccaaaatagacaaaatagatttctgttaaaaaaacaagttttgtacaaactgttgcttggaaccctatggttctcagccctcgatatggtagatgtacatctacagggtaccaggtttcccccatatgataatctgatgcgctcgagttactgcaaaaatccccgcttgggctcccctaccattagaataaaattatttatttttgtcggacaaaaaagagagcgcgatcgttgagtccgacacccgcaagatgtcactatagcgcggtacagttttgttattagaaaactcttaattattttcaattgaaagtacagtggaacctcgataactcggattaatcgggaccgcggccgatccgggttatcgaaaatccgggttagccggagaatatggtaaaaattaataaaatatggtatacttacagataaactccggtataattgaaataacatgaaatatatacagggtgagtttttggtgcgggatcggtcgataattccattacggtatagaatatcgaaggaagttatttagaaaaagtgtaggcaatgatattctccacgcttggagaatgtgtccatttctacagggtgatcagtgacagcgtggtgtatcaaacatgtaattttttaaatgggacgccctatatattttttcatatttgtattcccctcataattcttgttcatgtatgtagggttttgcattgctatacagagtgtttggcaagttatgaccatttttatttcgaaatcactatgggattagcaccctgtatgtgggaagtaatttgtagacagtagtttgttttatgtggtaggatggacaatgtact

SEQ ID NO: 2045 - DNA, 440 bp, Diabrotica virgifera
atcgggaaggaaggtgttgagagggcctaaggttatagttgagttttagttccaatattttctgtatgctagaatattccacagggtggaataaaatatcgagaatttatggtgtaaaatgtcgagaaaagttgtttaaagggaatgtaggcaatgatattctccgcgcttgcaaggtgtgtccatttctacagggtgatcagtgacagcgtggtgtatcaaacatgtaattttttaaatgggacgccctatatattttttcatatttgtattcccctcataattcttgttcatgtatgtagggttttgcattgctatacagagtgtttggcaagttatgaccatttttatttcgaaatcactatgggattagcaccctgtatgtgggaagtaatttgtagacagtagtttgttttatgtggtaggatggacaatgtact

SEQ ID NO: 2046 - DNA, 506 bp, Diabrotica virgifera
tattaaataattttctaattattagaatatttttgttattttacatatttaacgacccgtattattaatccagttgcctgagttttgggtgatatttccaggagaaagtgtagttacatcccaatctggttgggttgtgttgtttccagatgcgggtgtggtcaaattccaaatagaaccggtactagtggtccagttgcttgggttctgggtgttatttttaggagagagggtagatacattcgaatctggttggtttgtgttgtttccaggtgcgggtgtggtcagattccaattagaaccgctactagtggtccagttgcttgggttctgggtgttatttccaggagagagtgtagttacattcgaatctggttggtttgtgttgttcccaggtacgggtgtggtcagattccaattagaaccgctactagttgtccagttgttgggttctgggtgttatttccaggagagagtgtagttacattcgaatctggttggtttgt

SEQ ID NO: 2047 - DNA, 505 bp, Diabrotica virgifera
tattaaataattttctaattattagaatatttttgttattttacatatttaacgacccgtattattaatccagttgcctgagttttgggtgatatttccaggagaaagtgtagttacatcccaatctggttgggttgtgttgtttccagatgcgggtgtggtcaaattccaaatagaaccggtactagtggtccagttgcttgggttctgggtgttatttttaggagagagggtagatacattcgaatctggttggtttgtgttgtttccaggtaggaatgtggtcagatcccaattagaaccgttattagtggtccagttgcttgggttctgggtgttctttccaggaaagaaggttgtctcattccatcttggtgactttgtgaagtgtttgttaatcgtactagaatatcttgattcaatgcaggtaaatgcaagaatagtaatcgctactttaaggtgtactgcagccatcattctgaactcttattcaagactacgagct

SEQ ID NO: 2048 - DNA, 433 bp, Diabrotica virgifera
tattaaataattttctaattattagaatatttttgttattttacatatttaacgacccgtattattaatccagttgcctgagttttgggtgatatttccaggagaaagtgtagttacatcccaatctggttgggttgtgttgtttccagatgcgggtgtggtcaaattccaaatagaaccggtactagtggtccagttgcttgggttctgggtgttatttttaggagagagggtagatacattcgaatctggttggtttgtgttgtttccaggtgcgggtgtggtcagattccaattagaaccgctactagtggtccagttgcttgggttcggtgtgttatttccaggggagagtgtagttatattccaatctggttggtttgtgttgtttccaggtacgggtgtggtcagattccaattagaaccgctacta

SEQ ID NO: 2049 - DNA, 382 bp, Diabrotica virgifera
tctggttggtttgtgttgttcccaggtacgggtgtggtcagattccaattagaaccgctactagtggtccagttgcttgggttctgagtgttatttcctggagagagtgtagttacattccaatctggttggtttgtgttgtttccaggtgcgggtgtggtcagattccaattagaaccgctactagtggtccagttgcttgggttctgggtgttatttccaggagagagtgtagttacattcgaatctggttggtttgtgttgttcccaggtacgggtgtggtcagattccaattagaaccgctactagttgtccagttgttgggttctgggtgttatttccaggagagagtgtagttacattcgaatctggttggtttgt

SEQ ID NO: 2050 - DNA, 362 bp, Diabrotica virgifera
gccgggtgcgggtgtggtcacattccaattaggaccgctactagtggtccagttgcttgggttatgggtgttatttccaggggagagtgtagttatattccaatctggttggtttgtgttgtttccaggtacgggtgtggtcagattccaattagaaccgctactagtggtccagttgcttgggttctgggtgttatttccaggagagagtgtagttacattcgaatctggttggtttgtgttgttcccaggtacgggtgtggtcagattccaattagaaccgctactagttgtccagttgttgggttctgggtgttatttccaggagagagtgtagttacattcgaatctggttggtttgt

SEQ ID NO: 2051 - DNA, 381 bp, Diabrotica virgifera
tctggttggtttgtgttgttcccaggtacgggtgtggtcagattccaattagaaccgctactagtggtccagttgcttgggttctgagtgttatttcctggagagagtgtagttacattccaatctggttggtttgtgttgtttccaggtaggaatgtggtcagatcccaattagaaccgttattagtggtccagttgcttgggttctgggtgttctttccaggaaagaaggttgtctcattccatcttggtgactttgtgaagtgtttgttaatcgtactagaatatcttgattcaatgcaggtaaatgcaagaatagtaatcgctactttaaggtgtactgcagccatcattctgaactcttattcaagactacgagct

SEQ ID NO: 2052 - DNA, 309 bp, Diabrotica virgifera
tctggttggtttgtgttgttcccaggtacgggtgtggtcagattccaattagaaccgctactagtggtccagttgcttgggttctgagtgttatttcctggagagagtgtagttacattccaatctggttggtttgtgttgtttccaggtgcgggtgtggtcagattccaattagaaccgctactagtggtccagttgcttgggttcggtgtgttatttccaggggagagtgtagttatattccaatctggttggtttgtgttgtttccaggtacgggtgtggtcagattccaattagaaccgctacta

SEQ ID NO: 2053 - DNA, 289 bp, Diabrotica virgifera
gccgggtgcgggtgtggtcacattccaattaggaccgctactagtggtccagttgcttgggttatgggtgttatttccaggggagagtgtagttatattccaatctggttggtttgtgttgtttccaggtacgggtgtggtcagattccaattagaaccgctactagtggtccagttgcttgggttcggtgtgttatttccaggggagagtgtagttatattccaatctggttggtttgtgttgtttccaggtacgggtgtggtcagattccaattagaaccgctacta

SEQ ID NO: 2054 - DNA, 3255 bp, Diabrotica virgifera
ttattacagcgatggtggtgaagaataaggctgtaacacattaaaaaattacttaaatcggacaacaggtttaggagattcgagacaccggaaaattacccattttttggggtgctgcgttggtttcttggagaagtgtaatgtagtggtggtaatatattttttttcaaccactccgttcacctttactttttcccaaatctagtaaaatttgacaaaaatcattaagcttggcttgcagcttatgtgtttggacgacggtttagatctttggaacgtttttgatttgatatttataggaaaatttattgttggctagatacttgcattttgaatatctcaggttttaaaattaatacttagacttaagtaaagcatatgaaccacaactttgggaacttcaacgtgtaaatgatacgaatttaatggatgtagaagataaaataaactgaattatatcaaatatttttaaatgattcttcaactagaaagaagtttaaacttggcaagaacgtagagtataatttacgagttttcctagtttttagaagttttctgtacatattaggtttgttcgtagtacgatcagcaccgttgtcaaccatcagacgcatgcgccgttaacagctagcgatgcgcagttaacagctagcgtttgtagactacgaacgcgcatgcatctgatgtttggcaagggttactgatcgtaactacgaacaaaccttataatcttttctcttacgttctgtcttttcgttttttacttttattttgtgaatatatatttcagttgttttaaaatctatgagaactgtaaaatgcaagagactaagacaagaattaaaaatatgttgaatgctgcgatataatagtgttcatgtattataaatgttatttttgtggatctgtcatcaatgaaaagtaactggtggtaacatatataaaaaaattgacacttaatttttactgctattaacacagtcattacacgccctgcggcaatttgcttctttatacttaagaggcttaaaattagccaaatattattaaaatgtgcaaattttatttaaaaattcaattggtattccaaattagaattggtaatgtttttctctcgttttccttttatgtgacgagaaaacacgccccttagcaatttgccgcatcggacttatcgagacgacacgctctgttagcaaaacgccgctaacattttatcattggatattttcagatttttataataatttatttgtgtgtgatatacatatacatgtttttaaactaaactaaatattaagcatgcatacctagatattataaagttagaacacaatgctaacttacagtattaaggatataaatgtaaatataatcgaaacagagagataatgaaaagtagtgactccataagaaaagttctcatgggatgtaaaaaccgggaactaaaagtaaagcagtttggttaaaccatcaaaatataaaataacacgttgtaatgaaagatcaaaagaaggttcagttggaggctgcaaatgttgattgacattctcatttttgatattcctgcgaaatatcttctgcaatacatactctcatctgtcgagtcagtatcgagttctgcatgatctattatttctgcttcgtcagaattagatgaattatataactagtaaacataatttttttaatacttgcatcagaacacgcctgttagcaaattgttcacttaactcactacgctataaaacgcctgttagaaaactgctcaaacaacacgatttattttgacaagggataatggcagactagtttgaccttcgaacatactgtgtaggattggtggagggaggaatactcggcaccgtcgactcttttacaggaacaatagaattattttaagaatttatggaattacgaaaagttgccgcgggtgcgtgtaatgacgtgttaaatctaatgtcgcacatactttttttttaatacatactttcctatctatattcattcatattcaatagctttggcgtttcagcagcgccattcaacttcccggaactcatattaacatttccagttggttgttgttggtggcacattccatttttgaaagaaatttaacgcattaattgtagaaaaatatttgaagacatgtagaaaatgtttagaactagacctacaaaattgatgtatttttctactcccaaaaaatgcccttttttacaaaaaaatttggttcgacttccacgacaaaagtaatacacacctgaagccttgtagtaaaacgtttacccttataaacgacagtaatgttagagaagagtgttaagtgtcttttttgaaacactaaatggtataaattttggctttttcatatagagattggtactgatgtatccttagctaaaactctttaatataggtatgactaaaacactacaacaatattgctgtttaaaacgttttaaaaagttctgatagttacactagataacataatcttctttgtatatcttattctttcagatacgctgtaagtaccaaaaaaatcaaaatttacacattaagtgtttttggcattggaaaagaactgagctatttttgtttaaataatggtgatgcaaaacatcttatcatcgtagttaagtactctgtatttatactgcttcttgattttgtaccaacagaagagcttcttacacgctacgtctaccttgctttaatatacaggtcatttttctattaaatcattccatattaaatatattatgtttatatgggattaagcgacaaataattgtaatgaaaattttattttagaattgttatttgacgtttcgatttccactactgaaatcattttgaaaaattaaattagtgcggtgttattataatcaagttgtttggcggatattgtttttcaaattgacagttgatttacttggccttgctcttttaggccatgcttatagtcgtgctatatgccgacaagatttaggtcatctaagttagccgtcaatttggaaaacaacggccaaacaacttggttatatcaacaacacactaatgtaaaatattcttttttgaaaattatttctggattggaattcgaaacgtcaaagttataaaaaatgcaatttttacagcagtcagttgtggttaatccaacacaaacataatatttaatttggatatgccacaataaaatagtttcggaacctttttatttcatatatttcatcttatcggattcat

SEQ ID NO: 2055 - DNA, 3237 bp, Diabrotica virgifera
ttattacagcgatggtggtgaagaataaggctgtaacacattaaaaaattacttaaatcggacaacaggtttaggagattcgagacaccggaaaattacccattttttggggtgctgcgttggtttcttggagaagtgtaatgtagtggtggtaatatattttttttcaaccactccgttcacctttactttttcccaaatctagtaaaatttgacaaaaatcattaagcttggcttgcagcttatgtgtttggacgacggtttagatctttggaacgtttttgatttgatatttataggaaaatttattgttggctagatacttgcattttgaatatctcaggttttaaaattaatacttagacttaagtaaagcatatgaaccacaactttgggaacttcaacgtgtaaatgatacgaatttaatggatgtagaagataaaataaactgaattatatcaaatatttttaaatgattcttcaactagaaagaagtttaaacttggcaagaacgtagagtataatttacgagttttcctagtttttagaagttttctgtacatattaggtttgttcgtagtacgatcagcaccgttgtcaaccatcagacgcatgcgccgttaacagctagcgatgcgcagttaacagctagcgtttgtagactacgaacgcgcatgcatctgatgtttggcaagggttactgatcgtaactacgaacaaaccttataatcttttctcttacgttctgtcttttcgttttttacttttattttgtgaatatatatttcagttgttttaaaatctatgagaactgtaaaatgcaagagactaagacaagaattaaaaatatgttgaatgctgcgatataatagtgttcatgtattataaatgttatttttgtggatctgtcatcaatgaaaagtaactggtggtaacatatataaaaaaattgacacttaatttttactgctattaacacagtcattacacgccctgcggcaatttgcttctttatacttaagaggcttaaaattagccaaatattattaaaatgtgcaaattttatttaaaaattcaattggtattccaaattagaattggtaatgtttttctctcgttttccttttatgtgacgagaaaacacgccccttagcaatttgccgcatcggacttatcgagactacacgctgtggattttatcattggatattttcagatttttataataatttatttgtgtgtgatatacatatacatgtttttaaactaaactaaatattaagcatgcatacctagatattataaagttagaacacaatgctaacttacagtattaaggatataaatgtaaatataatcgaaacagagagataatgaaaagtagtgactccataagaaaagttctcatgggatgtaaaaaccgggaactaaaagtaaagcagtttggttaaaccatcaaaatataaaataacacgttgtaatgaaagatcaaaagaaggttcagttggaggctgcaaatgttgattgacattctcatttttgatattcctgcgaaatatcttctgcaatacatactctcatctgtcgagtcagtatcgagttctgcatgatctattatttctgcttcgtcagaattagatgaattatataactagtaaacataatttttttaatacttgcatcagaacacgcctgttagcaaattgttcacttaactcactacgctataaaacgcctgttagaaaactgctcaaacaacacgatttattttgacaagggataatggcagactagtttgaccttcgaacatactgtgtaggattggtggagggaggaatactcggcaccgtcgactcttttacaggaacaatagaattattttaagaatttatggaattacgaaaagttgccgcgggtgcgtgtaatgacgtgttaaatctaatgtcgcacatactttttttttaatacatactttcctatctatattcattcatattcaatagctttggcgtttcagcagcgccattcaacttcccggaactcatattaacatttccagttggttgttgttggtggcacattccatttttgaaagaaatttaacgcattaattgtagaaaaatatttgaagacatgtagaaaatgtttagaactagacctacaaaattgatgtatttttctactcccaaaaaatgcccttttttacaaaaaaatttggttcgacttccacgacaaaagtaatacacacctgaagccttgtagtaaaacgtttacccttataaacgacagtaatgttagagaagagtgttaagtgtcttttttgaaacactaaatggtataaattttggctttttcatatagagattggtactgatgtatccttagctaaaactctttaatataggtatgactaaaacactacaacaatattgctgtttaaaacgttttaaaaagttctgatagttacactagataacataatcttctttgtatatcttattctttcagatacgctgtaagtaccaaaaaaatcaaaatttacacattaagtgtttttggcattggaaaagaactgagctatttttgtttaaataatggtgatgcaaaacatcttatcatcgtagttaagtactctgtatttatactgcttcttgattttgtaccaacagaagagcttcttacacgctacgtctaccttgctttaatatacaggtcatttttctattaaatcattccatattaaatatattatgtttatatgggattaagcgacaaataattgtaatgaaaattttattttagaattgttatttgacgtttcgatttccactactgaaatcattttgaaaaattaaattagtgcggtgttattataatcaagttgtttggcggatattgtttttcaaattgacagttgatttacttggccttgctcttttaggccatgcttatagtcgtgctatatgccgacaagatttaggtcatctaagttagccgtcaatttggaaaacaacggccaaacaacttggttatatcaacaacacactaatgtaaaatattcttttttgaaaattatttctggattggaattcgaaacgtcaaagttataaaaaatgcaatttttacagcagtcagttgtggttaatccaacacaaacataatatttaatttggatatgccacaataaaatagtttcggaacctttttatttcatatatttcatcttatcggattcat

SEQ ID NO: 2056 - DNA, 3230 bp, Diabrotica virgifera
ttattacagcgatggtggtgaagaataaggctgtaacacattaaaaaattacttaaatcggacaacaggtttaggagattcgagacaccggaaaattacccattttttggggtgctgcgttggtttcttggagaagtgtaatgtagtggtggtaatatattttttttcaaccactccgttcacctttactttttcccaaatctagtaaaatttgacaaaaatcattaagcttggcttgcagcttatgtgtttggacgacggtttagatctttggaacgtttttgatttgatatttataggaaaatttattgttggctagatacttgcattttgaatatctcaggttttaaaattaatacttagacttaagtaaagcatatgaaccacaactttgggaacttcaacgtgtaaatgatacgaatttaatggatgtagaagataaaataaactgaattatatcaaatatttttaaatgattcttcaactagaaagaagtttaaacttggcaagaacgtagagtataatttacgagttttcctagtttttagaagttttctgtacatattaggtttgttcgtagtacgatcagcaccgttgtcaaccatcagacgcatgcgccgttaacagctagcgatgcgcagttaacagctagcgtttgtagactacgaacgcgcatgcatctgatgtttggcaagggttactgatcgtaactacgaacaaaccttataatcttttctcttacgttctgtcttttcgttttttacttttattttgtgaatatatatttcagttgttttaaaatctatgagaactgtaaaatgcaagagactaagacaagaattaaaaatatgttgaatgctgcgatataatagtgttcatgtattataaatgttatttttgtggatctgtcatcaatgaaaagtaactggtggtaacatatataaaaaaattgacacttaatttttactgctattaacacagtcattacacgccctgcggcaatttgcttctttatacttaagaggcttaaaattagccaaatattattaaaatgtgcaaattttatttaaaaattcaattggtattccaaattagaattggtaatgtttttctctcgttttccttttatgtgacgagaaaacacgccccttagcaatttgccgcatcggacttatcgagacgacacgctctgttagcaaaacgccgctaacattttatcattggatattttcagatttttataataatttatttgtgtgtgatatacatatacatgtttttaaactaaactaaatattaagcatgcatacctagatattataaagttagaacacaatgctaacttacagtattaaggatataaatgtaaatataatcgaaacagagagataatgaaaagtagtgactccataagaaaagttctcatgggatgtaaaaaccgggaactaaaagtaaagcagtttggttaaaccatcaaaatataaaataacacgttgtaatgaaagatcaaaagaaggttcagttggaggctgcaaatgttgattgacattctcatttttgatattcctgcgaaatatcttctgcaatacatactctcatctgtcgagtcagtatcgagttctgcatgatctattatttctgcttcgtcagaattagatgaattatataactagtaaacataatttttttaatacttgcatcagaacacgcctgttagcaaattgttcacttaactcactacgctataaaacgcctgttagaaaactgctcaaacaacacgatttattttgacaagggataatggcagactagtttgaccttcgaacatactgtgtaggattggtggagggaggaatactcggcaccgtcgactcttttacaggaacaatagaattattttaagaatttatggaattacgaaaagttgccgcgggtgcgtgtaatgacgtgttaaatctaatgtcgcacatactttttttttaatacatactttcctatctatattcattcatattcaatagctttggcgtttcagcagcgccattcaacttcccggaactcatattaacatttccagttggttgttgttggtggcacattccatttttgaaagaaatttaacgcattaattgtagaaaaatatttgaagacatgtagaaaatgtttagaactagacctacaaaattgatgtatttttctactcccaaaaaatgcccttttttacaaaaaaatttggttcgacttccacgacaaaagtaatacacacctgaagccttgtagtaaaacgtttacccttataaacgacagtaatgttagagaagagtgttaagtgtcttttttgaaacactaaatggtataaattttggctttttcatatagagattggtactgatgtatccttagctaaaactctttaatataggtatgactaaaacactacaacaatattgctgtttaaaacgttttaaaaagttctgatagttacactagataacataatcttctttgtatatcttattctttcagatacgctgtaagtaccaaaaaaatcaaaatttacacattaagtgtttttggcattggaaaagaactgagctatttttgtttaaataatggtgatgcaaaacatcttatcatcgtagttaagtactctgtatttatactgcttcttgattttgtaccaacagaagagcttcttacacgctacgtctaccttgctttaatatacaggtcatttttctattaaatcattccatattaaatatattatgtttatatgggattaagcgacaaataattgtaatgaaaattttattttagaattgttatttgacgtttcgatttccactactgaaatcattttgaaaaattaaattagtgcggtgttattataatcaagttgtttggcggatattgtattgctacatgcatgtagccatgcttatagtcgtgctctatgtcgacaagatctaggtcatctaagttagccgtcaatttggaaaacaacggccaaacaacttggttatatcaacaacacactaatgtaaaatattcttttttgaaaattatttctggattggaattcgaaacgtcaaagttataaaaaatgcaatttttacagcagtcagttgtggttaatccaacacaaacataatatttaatttggatatgccacaataaaatagtttcggaacctttttatttcatatatttcatcttatcggattcat

SEQ ID NO: 2057 - DNA, 3214 bp, Diabrotica virgifera
ttattacagcgatggtggtgaagaataaggctgtaacacattaaaaaattacttaaatcggacaacaggtttaggagattcgagacaccggaaaattacccattttttggggtgctgcgttggtttcttggagaagtgtaatgtagtggtggtaatatattttttttcaaccactccgttcacctttactttttcccaaatctagtaaaatttgacaaaaatcattaagcttggcttgcagcttatgtgtttggacgacggtttagatctttggaacgtttttgatttgatatttataggaaaatttattgttggctagatacttgcattttgaatatctcaggttttaaaattaatacttagacttaagtaaagcatatgaaccacaactttgggaacttcaacgtgtaaatgatacgaatttaatggatgtagaagataaaataaactgaattatatcaaatatttttaaatgattcttcaactagaaagaagtttaaacttggcaagaacgtagagtataatttacgagttttcctagtttttagaagttttctgtacatattaggtttgttcgtagtacgatcagcaccgttgtcaaccatcagacgcatgcgccgttaacagctagcgatgcgcagttaacagctagcgtttgtagactacgaacgcgcatgcatctgatgtttggcaagggttactgatcgtaactacgaacaaaccttataatcttttctcttacgttctgtcttttcgttttttacttttattttgtgaatatatatttcagttgttttaaaatctatgagaactgtaaaatgcaagagactaagacaagaattaaaaatatgttgaatgctgcgatataatagtgttcatgtattataaatgttatttttgtggatctgtcatcaatgaaaagtaactggtggtaacatatataaaaaaattgacacttaatttttactgctattaacacagtcattacacgccattttaatattattaaaatgtgcaaattttatttaaaaattcaattggtattccaaattagaattggtaatgtttttctctcgttttccttttatgtgacgagaaaacacgccccttagcaatttgccgcatcggacttatcgagacgacacgctctgttagcaaaacgccgctaacattttatcattggatattttcagatttttataataatttatttgtgtgtgatatacatatacatgtttttaaactaaactaaatattaagcatgcatacctagatattataaagttagaacacaatgctaacttacagtattaaggatataaatgtaaatataatcgaaacagagagataatgaaaagtagtgactccataagaaaagttctcatgggatgtaaaaaccgggaactaaaagtaaagcagtttggttaaaccatcaaaatataaaataacacgttgtaatgaaagatcaaaagaaggttcagttggaggctgcaaatgttgattgacattctcatttttgatattcctgcgaaatatcttctgcaatacatactctcatctgtcgagtcagtatcgagttctgcatgatctattatttctgcttcgtcagaattagatgaattatataactagtaaacataatttttttaatacttgcatcagaacacgcctgttagcaaattgttcacttaactcactacgctataaaacgcctgttagaaaactgctcaaacaacacgatttattttgacaagggataatggcagactagtttgaccttcgaacatactgtgtaggattggtggagggaggaatactcggcaccgtcgactcttttacaggaacaatagaattattttaagaatttatggaattacgaaaagttgccgcgggtgcgtgtaatgacgtgttaaatctaatgtcgcacatactttttttttaatacatactttcctatctatattcattcatattcaatagctttggcgtttcagcagcgccattcaacttcccggaactcatattaacatttccagttggttgttgttggtggcacattccatttttgaaagaaatttaacgcattaattgtagaaaaatatttgaagacatgtagaaaatgtttagaactagacctacaaaattgatgtatttttctactcccaaaaaatgcccttttttacaaaaaaatttggttcgacttccacgacaaaagtaatacacacctgaagccttgtagtaaaacgtttacccttataaacgacagtaatgttagagaagagtgttaagtgtcttttttgaaacactaaatggtataaattttggctttttcatatagagattggtactgatgtatccttagctaaaactctttaatataggtatgactaaaacactacaacaatattgctgtttaaaacgttttaaaaagttctgatagttacactagataacataatcttctttgtatatcttattctttcagatacgctgtaagtaccaaaaaaatcaaaatttacacattaagtgtttttggcattggaaaagaactgagctatttttgtttaaataatggtgatgcaaaacatcttatcatcgtagttaagtactctgtatttatactgcttcttgattttgtaccaacagaagagcttcttacacgctacgtctaccttgctttaatatacaggtcatttttctattaaatcattccatattaaatatattatgtttatatgggattaagcgacaaataattgtaatgaaaattttattttagaattgttatttgacgtttcgatttccactactgaaatcattttgaaaaattaaattagtgcggtgttattataatcaagttgtttggcggatattgtttttcaaattgacagttgatttacttggccttgctcttttaggccatgcttatagtcgtgctatatgccgacaagatttaggtcatctaagttagccgtcaatttggaaaacaacggccaaacaacttggttatatcaacaacacactaatgtaaaatattcttttttgaaaattatttctggattggaattcgaaacgtcaaagttataaaaaatgcaatttttacagcagtcagttgtggttaatccaacacaaacataatatttaatttggatatgccacaataaaatagtttcggaacctttttatttcatatatttcatcttatcggattcat

SEQ ID NO: 2058 - DNA, 3212 bp, Diabrotica virgifera
ttattacagcgatggtggtgaagaataaggctgtaacacattaaaaaattacttaaatcggacaacaggtttaggagattcgagacaccggaaaattacccattttttggggtgctgcgttggtttcttggagaagtgtaatgtagtggtggtaatatattttttttcaaccactccgttcacctttactttttcccaaatctagtaaaatttgacaaaaatcattaagcttggcttgcagcttatgtgtttggacgacggtttagatctttggaacgtttttgatttgatatttataggaaaatttattgttggctagatacttgcattttgaatatctcaggttttaaaattaatacttagacttaagtaaagcatatgaaccacaactttgggaacttcaacgtgtaaatgatacgaatttaatggatgtagaagataaaataaactgaattatatcaaatatttttaaatgattcttcaactagaaagaagtttaaacttggcaagaacgtagagtataatttacgagttttcctagtttttagaagttttctgtacatattaggtttgttcgtagtacgatcagcaccgttgtcaaccatcagacgcatgcgccgttaacagctagcgatgcgcagttaacagctagcgtttgtagactacgaacgcgcatgcatctgatgtttggcaagggttactgatcgtaactacgaacaaaccttataatcttttctcttacgttctgtcttttcgttttttacttttattttgtgaatatatatttcagttgttttaaaatctatgagaactgtaaaatgcaagagactaagacaagaattaaaaatatgttgaatgctgcgatataatagtgttcatgtattataaatgttatttttgtggatctgtcatcaatgaaaagtaactggtggtaacatatataaaaaaattgacacttaatttttactgctattaacacagtcattacacgccctgcggcaatttgcttctttatacttaagaggcttaaaattagccaaatattattaaaatgtgcaaattttatttaaaaattcaattggtattccaaattagaattggtaatgtttttctctcgttttccttttatgtgacgagaaaacacgccccttagcaatttgccgcatcggacttatcgagactacacgctgtggattttatcattggatattttcagatttttataataatttatttgtgtgtgatatacatatacatgtttttaaactaaactaaatattaagcatgcatacctagatattataaagttagaacacaatgctaacttacagtattaaggatataaatgtaaatataatcgaaacagagagataatgaaaagtagtgactccataagaaaagttctcatgggatgtaaaaaccgggaactaaaagtaaagcagtttggttaaaccatcaaaatataaaataacacgttgtaatgaaagatcaaaagaaggttcagttggaggctgcaaatgttgattgacattctcatttttgatattcctgcgaaatatcttctgcaatacatactctcatctgtcgagtcagtatcgagttctgcatgatctattatttctgcttcgtcagaattagatgaattatataactagtaaacataatttttttaatacttgcatcagaacacgcctgttagcaaattgttcacttaactcactacgctataaaacgcctgttagaaaactgctcaaacaacacgatttattttgacaagggataatggcagactagtttgaccttcgaacatactgtgtaggattggtggagggaggaatactcggcaccgtcgactcttttacaggaacaatagaattattttaagaatttatggaattacgaaaagttgccgcgggtgcgtgtaatgacgtgttaaatctaatgtcgcacatactttttttttaatacatactttcctatctatattcattcatattcaatagctttggcgtttcagcagcgccattcaacttcccggaactcatattaacatttccagttggttgttgttggtggcacattccatttttgaaagaaatttaacgcattaattgtagaaaaatatttgaagacatgtagaaaatgtttagaactagacctacaaaattgatgtatttttctactcccaaaaaatgcccttttttacaaaaaaatttggttcgacttccacgacaaaagtaatacacacctgaagccttgtagtaaaacgtttacccttataaacgacagtaatgttagagaagagtgttaagtgtcttttttgaaacactaaatggtataaattttggctttttcatatagagattggtactgatgtatccttagctaaaactctttaatataggtatgactaaaacactacaacaatattgctgtttaaaacgttttaaaaagttctgatagttacactagataacataatcttctttgtatatcttattctttcagatacgctgtaagtaccaaaaaaatcaaaatttacacattaagtgtttttggcattggaaaagaactgagctatttttgtttaaataatggtgatgcaaaacatcttatcatcgtagttaagtactctgtatttatactgcttcttgattttgtaccaacagaagagcttcttacacgctacgtctaccttgctttaatatacaggtcatttttctattaaatcattccatattaaatatattatgtttatatgggattaagcgacaaataattgtaatgaaaattttattttagaattgttatttgacgtttcgatttccactactgaaatcattttgaaaaattaaattagtgcggtgttattataatcaagttgtttggcggatattgtattgctacatgcatgtagccatgcttatagtcgtgctctatgtcgacaagatctaggtcatctaagttagccgtcaatttggaaaacaacggccaaacaacttggttatatcaacaacacactaatgtaaaatattcttttttgaaaattatttctggattggaattcgaaacgtcaaagttataaaaaatgcaatttttacagcagtcagttgtggttaatccaacacaaacataatatttaatttggatatgccacaataaaatagtttcggaacctttttatttcatatatttcatcttatcggattcat

SEQ ID NO: 2059 - DNA, 3196 bp, Diabrotica virgifera
ttattacagcgatggtggtgaagaataaggctgtaacacattaaaaaattacttaaatcggacaacaggtttaggagattcgagacaccggaaaattacccattttttggggtgctgcgttggtttcttggagaagtgtaatgtagtggtggtaatatattttttttcaaccactccgttcacctttactttttcccaaatctagtaaaatttgacaaaaatcattaagcttggcttgcagcttatgtgtttggacgacggtttagatctttggaacgtttttgatttgatatttataggaaaatttattgttggctagatacttgcattttgaatatctcaggttttaaaattaatacttagacttaagtaaagcatatgaaccacaactttgggaacttcaacgtgtaaatgatacgaatttaatggatgtagaagataaaataaactgaattatatcaaatatttttaaatgattcttcaactagaaagaagtttaaacttggcaagaacgtagagtataatttacgagttttcctagtttttagaagttttctgtacatattaggtttgttcgtagtacgatcagcaccgttgtcaaccatcagacgcatgcgccgttaacagctagcgatgcgcagttaacagctagcgtttgtagactacgaacgcgcatgcatctgatgtttggcaagggttactgatcgtaactacgaacaaaccttataatcttttctcttacgttctgtcttttcgttttttacttttattttgtgaatatatatttcagttgttttaaaatctatgagaactgtaaaatgcaagagactaagacaagaattaaaaatatgttgaatgctgcgatataatagtgttcatgtattataaatgttatttttgtggatctgtcatcaatgaaaagtaactggtggtaacatatataaaaaaattgacacttaatttttactgctattaacacagtcattacacgccattttaatattattaaaatgtgcaaattttatttaaaaattcaattggtattccaaattagaattggtaatgtttttctctcgttttccttttatgtgacgagaaaacacgccccttagcaatttgccgcatcggacttatcgagactacacgctgtggattttatcattggatattttcagatttttataataatttatttgtgtgtgatatacatatacatgtttttaaactaaactaaatattaagcatgcatacctagatattataaagttagaacacaatgctaacttacagtattaaggatataaatgtaaatataatcgaaacagagagataatgaaaagtagtgactccataagaaaagttctcatgggatgtaaaaaccgggaactaaaagtaaagcagtttggttaaaccatcaaaatataaaataacacgttgtaatgaaagatcaaaagaaggttcagttggaggctgcaaatgttgattgacattctcatttttgatattcctgcgaaatatcttctgcaatacatactctcatctgtcgagtcagtatcgagttctgcatgatctattatttctgcttcgtcagaattagatgaattatataactagtaaacataatttttttaatacttgcatcagaacacgcctgttagcaaattgttcacttaactcactacgctataaaacgcctgttagaaaactgctcaaacaacacgatttattttgacaagggataatggcagactagtttgaccttcgaacatactgtgtaggattggtggagggaggaatactcggcaccgtcgactcttttacaggaacaatagaattattttaagaatttatggaattacgaaaagttgccgcgggtgcgtgtaatgacgtgttaaatctaatgtcgcacatactttttttttaatacatactttcctatctatattcattcatattcaatagctttggcgtttcagcagcgccattcaacttcccggaactcatattaacatttccagttggttgttgttggtggcacattccatttttgaaagaaatttaacgcattaattgtagaaaaatatttgaagacatgtagaaaatgtttagaactagacctacaaaattgatgtatttttctactcccaaaaaatgcccttttttacaaaaaaatttggttcgacttccacgacaaaagtaatacacacctgaagccttgtagtaaaacgtttacccttataaacgacagtaatgttagagaagagtgttaagtgtcttttttgaaacactaaatggtataaattttggctttttcatatagagattggtactgatgtatccttagctaaaactctttaatataggtatgactaaaacactacaacaatattgctgtttaaaacgttttaaaaagttctgatagttacactagataacataatcttctttgtatatcttattctttcagatacgctgtaagtaccaaaaaaatcaaaatttacacattaagtgtttttggcattggaaaagaactgagctatttttgtttaaataatggtgatgcaaaacatcttatcatcgtagttaagtactctgtatttatactgcttcttgattttgtaccaacagaagagcttcttacacgctacgtctaccttgctttaatatacaggtcatttttctattaaatcattccatattaaatatattatgtttatatgggattaagcgacaaataattgtaatgaaaattttattttagaattgttatttgacgtttcgatttccactactgaaatcattttgaaaaattaaattagtgcggtgttattataatcaagttgtttggcggatattgtttttcaaattgacagttgatttacttggccttgctcttttaggccatgcttatagtcgtgctatatgccgacaagatttaggtcatctaagttagccgtcaatttggaaaacaacggccaaacaacttggttatatcaacaacacactaatgtaaaatattcttttttgaaaattatttctggattggaattcgaaacgtcaaagttataaaaaatgcaatttttacagcagtcagttgtggttaatccaacacaaacataatatttaatttggatatgccacaataaaatagtttcggaacctttttatttcatatatttcatcttatcggattcat

SEQ ID NO: 2060 - DNA, 3189 bp, Diabrotica virgifera
ttattacagcgatggtggtgaagaataaggctgtaacacattaaaaaattacttaaatcggacaacaggtttaggagattcgagacaccggaaaattacccattttttggggtgctgcgttggtttcttggagaagtgtaatgtagtggtggtaatatattttttttcaaccactccgttcacctttactttttcccaaatctagtaaaatttgacaaaaatcattaagcttggcttgcagcttatgtgtttggacgacggtttagatctttggaacgtttttgatttgatatttataggaaaatttattgttggctagatacttgcattttgaatatctcaggttttaaaattaatacttagacttaagtaaagcatatgaaccacaactttgggaacttcaacgtgtaaatgatacgaatttaatggatgtagaagataaaataaactgaattatatcaaatatttttaaatgattcttcaactagaaagaagtttaaacttggcaagaacgtagagtataatttacgagttttcctagtttttagaagttttctgtacatattaggtttgttcgtagtacgatcagcaccgttgtcaaccatcagacgcatgcgccgttaacagctagcgatgcgcagttaacagctagcgtttgtagactacgaacgcgcatgcatctgatgtttggcaagggttactgatcgtaactacgaacaaaccttataatcttttctcttacgttctgtcttttcgttttttacttttattttgtgaatatatatttcagttgttttaaaatctatgagaactgtaaaatgcaagagactaagacaagaattaaaaatatgttgaatgctgcgatataatagtgttcatgtattataaatgttatttttgtggatctgtcatcaatgaaaagtaactggtggtaacatatataaaaaaattgacacttaatttttactgctattaacacagtcattacacgccattttaatattattaaaatgtgcaaattttatttaaaaattcaattggtattccaaattagaattggtaatgtttttctctcgttttccttttatgtgacgagaaaacacgccccttagcaatttgccgcatcggacttatcgagacgacacgctctgttagcaaaacgccgctaacattttatcattggatattttcagatttttataataatttatttgtgtgtgatatacatatacatgtttttaaactaaactaaatattaagcatgcatacctagatattataaagttagaacacaatgctaacttacagtattaaggatataaatgtaaatataatcgaaacagagagataatgaaaagtagtgactccataagaaaagttctcatgggatgtaaaaaccgggaactaaaagtaaagcagtttggttaaaccatcaaaatataaaataacacgttgtaatgaaagatcaaaagaaggttcagttggaggctgcaaatgttgattgacattctcatttttgatattcctgcgaaatatcttctgcaatacatactctcatctgtcgagtcagtatcgagttctgcatgatctattatttctgcttcgtcagaattagatgaattatataactagtaaacataatttttttaatacttgcatcagaacacgcctgttagcaaattgttcacttaactcactacgctataaaacgcctgttagaaaactgctcaaacaacacgatttattttgacaagggataatggcagactagtttgaccttcgaacatactgtgtaggattggtggagggaggaatactcggcaccgtcgactcttttacaggaacaatagaattattttaagaatttatggaattacgaaaagttgccgcgggtgcgtgtaatgacgtgttaaatctaatgtcgcacatactttttttttaatacatactttcctatctatattcattcatattcaatagctttggcgtttcagcagcgccattcaacttcccggaactcatattaacatttccagttggttgttgttggtggcacattccatttttgaaagaaatttaacgcattaattgtagaaaaatatttgaagacatgtagaaaatgtttagaactagacctacaaaattgatgtatttttctactcccaaaaaatgcccttttttacaaaaaaatttggttcgacttccacgacaaaagtaatacacacctgaagccttgtagtaaaacgtttacccttataaacgacagtaatgttagagaagagtgttaagtgtcttttttgaaacactaaatggtataaattttggctttttcatatagagattggtactgatgtatccttagctaaaactctttaatataggtatgactaaaacactacaacaatattgctgtttaaaacgttttaaaaagttctgatagttacactagataacataatcttctttgtatatcttattctttcagatacgctgtaagtaccaaaaaaatcaaaatttacacattaagtgtttttggcattggaaaagaactgagctatttttgtttaaataatggtgatgcaaaacatcttatcatcgtagttaagtactctgtatttatactgcttcttgattttgtaccaacagaagagcttcttacacgctacgtctaccttgctttaatatacaggtcatttttctattaaatcattccatattaaatatattatgtttatatgggattaagcgacaaataattgtaatgaaaattttattttagaattgttatttgacgtttcgatttccactactgaaatcattttgaaaaattaaattagtgcggtgttattataatcaagttgtttggcggatattgtattgctacatgcatgtagccatgcttatagtcgtgctctatgtcgacaagatctaggtcatctaagttagccgtcaatttggaaaacaacggccaaacaacttggttatatcaacaacacactaatgtaaaatattcttttttgaaaattatttctggattggaattcgaaacgtcaaagttataaaaaatgcaatttttacagcagtcagttgtggttaatccaacacaaacataatatttaatttggatatgccacaataaaatagtttcggaacctttttatttcatatatttcatcttatcggattcat

SEQ ID NO: 2061 - DNA, 3171 bp, Diabrotica virgifera
ttattacagcgatggtggtgaagaataaggctgtaacacattaaaaaattacttaaatcggacaacaggtttaggagattcgagacaccggaaaattacccattttttggggtgctgcgttggtttcttggagaagtgtaatgtagtggtggtaatatattttttttcaaccactccgttcacctttactttttcccaaatctagtaaaatttgacaaaaatcattaagcttggcttgcagcttatgtgtttggacgacggtttagatctttggaacgtttttgatttgatatttataggaaaatttattgttggctagatacttgcattttgaatatctcaggttttaaaattaatacttagacttaagtaaagcatatgaaccacaactttgggaacttcaacgtgtaaatgatacgaatttaatggatgtagaagataaaataaactgaattatatcaaatatttttaaatgattcttcaactagaaagaagtttaaacttggcaagaacgtagagtataatttacgagttttcctagtttttagaagttttctgtacatattaggtttgttcgtagtacgatcagcaccgttgtcaaccatcagacgcatgcgccgttaacagctagcgatgcgcagttaacagctagcgtttgtagactacgaacgcgcatgcatctgatgtttggcaagggttactgatcgtaactacgaacaaaccttataatcttttctcttacgttctgtcttttcgttttttacttttattttgtgaatatatatttcagttgttttaaaatctatgagaactgtaaaatgcaagagactaagacaagaattaaaaatatgttgaatgctgcgatataatagtgttcatgtattataaatgttatttttgtggatctgtcatcaatgaaaagtaactggtggtaacatatataaaaaaattgacacttaatttttactgctattaacacagtcattacacgccattttaatattattaaaatgtgcaaattttatttaaaaattcaattggtattccaaattagaattggtaatgtttttctctcgttttccttttatgtgacgagaaaacacgccccttagcaatttgccgcatcggacttatcgagactacacgctgtggattttatcattggatattttcagatttttataataatttatttgtgtgtgatatacatatacatgtttttaaactaaactaaatattaagcatgcatacctagatattataaagttagaacacaatgctaacttacagtattaaggatataaatgtaaatataatcgaaacagagagataatgaaaagtagtgactccataagaaaagttctcatgggatgtaaaaaccgggaactaaaagtaaagcagtttggttaaaccatcaaaatataaaataacacgttgtaatgaaagatcaaaagaaggttcagttggaggctgcaaatgttgattgacattctcatttttgatattcctgcgaaatatcttctgcaatacatactctcatctgtcgagtcagtatcgagttctgcatgatctattatttctgcttcgtcagaattagatgaattatataactagtaaacataatttttttaatacttgcatcagaacacgcctgttagcaaattgttcacttaactcactacgctataaaacgcctgttagaaaactgctcaaacaacacgatttattttgacaagggataatggcagactagtttgaccttcgaacatactgtgtaggattggtggagggaggaatactcggcaccgtcgactcttttacaggaacaatagaattattttaagaatttatggaattacgaaaagttgccgcgggtgcgtgtaatgacgtgttaaatctaatgtcgcacatactttttttttaatacatactttcctatctatattcattcatattcaatagctttggcgtttcagcagcgccattcaacttcccggaactcatattaacatttccagttggttgttgttggtggcacattccatttttgaaagaaatttaacgcattaattgtagaaaaatatttgaagacatgtagaaaatgtttagaactagacctacaaaattgatgtatttttctactcccaaaaaatgcccttttttacaaaaaaatttggttcgacttccacgacaaaagtaatacacacctgaagccttgtagtaaaacgtttacccttataaacgacagtaatgttagagaagagtgttaagtgtcttttttgaaacactaaatggtataaattttggctttttcatatagagattggtactgatgtatccttagctaaaactctttaatataggtatgactaaaacactacaacaatattgctgtttaaaacgttttaaaaagttctgatagttacactagataacataatcttctttgtatatcttattctttcagatacgctgtaagtaccaaaaaaatcaaaatttacacattaagtgtttttggcattggaaaagaactgagctatttttgtttaaataatggtgatgcaaaacatcttatcatcgtagttaagtactctgtatttatactgcttcttgattttgtaccaacagaagagcttcttacacgctacgtctaccttgctttaatatacaggtcatttttctattaaatcattccatattaaatatattatgtttatatgggattaagcgacaaataattgtaatgaaaattttattttagaattgttatttgacgtttcgatttccactactgaaatcattttgaaaaattaaattagtgcggtgttattataatcaagttgtttggcggatattgtattgctacatgcatgtagccatgcttatagtcgtgctctatgtcgacaagatctaggtcatctaagttagccgtcaatttggaaaacaacggccaaacaacttggttatatcaacaacacactaatgtaaaatattcttttttgaaaattatttctggattggaattcgaaacgtcaaagttataaaaaatgcaatttttacagcagtcagttgtggttaatccaacacaaacataatatttaatttggatatgccacaataaaatagtttcggaacctttttatttcatatatttcatcttatcggattcat

SEQ ID NO: 2062 - DNA, 4167 bp, Diabrotica virgifera
  SmartBlast Evalue=1E-83; Info=Isoform 2 of Tropomyosin-2 n=1 Tax=Bombyx mori RepID=Q1HPQ0-2
aaggaggcatggaggcaacaggccaaacgtaaactgatagcacctccgtggttcgtaagtcgtaacgttcaactttagtcgctccgagaccgtgtgtagtgtcaacgggtaactcgtactttctttgagttctttcgttttgtccgtaagcgcgaaaacaacacccatccaccatggacgcgatcaagaagaaaatgcaagcgatgaagcttgaaaaagacaacgcattagaccgcgcagcacacaatgaacaactcgccaaagatgccaacctccgcgctgaaaaggctgaagaagaagctcgctccctacaaaagaagatccaagccattgaaaacgatcttgaccaaactcaggaacaactcacacaagtcaatggcaaacttgaagaaaaagaaaaggccctccaaaacgctgaatccgaagttgccgccctcaaccgtcgtatccaattgttagaagaagacttggaacgttcagaagaacgtttagccactgccaccgccaaattggctgaagcctcacaggcagccgatgaaagcgaaaggatactcaaagcattagaaaacaagacaaatatggaagatgacagggtgtcccacttagagcagcaactgacacaggccaaattaatagcagaggaagctgacaaaaaatacgaagaggccgcccgaaagctggtactgatggagcaggatctcgaacgggcagaagaacgagccgatggaagcgaacacaaaattgtagaacttgaggaagaacttcgcgtagtaggcaactaacttaaaatcccttgaagtatcagaagaaaaggccacccgcaaggaagacgagtactcggttacgttaaaacaggtggagcagcagttgagagaggctgaagcaagagctgaattcgcagaacgttcagtacagaaactccagaaggaggtcgacagactagaagacgaccttttgctggaaaaagaaaagaacaaaatgctcgctgacgagatggaagcaaccttgcatgatatccaaaacatgtaaaaaaataatatcacaacaccgagaaaaggccggcctttccactaacacattcccgtctagttcttgcattccacgaaacggataggaataaaaaaatcacttaatttttataccatagtcgaggagatgttatcaattatttttgtttttgtttgagcgatatagatagaaatgccattttctagatattaagtgcaattttttagtcgtttgataaaaaatattctagaaattaaagaagcattcacatatcttacaaaatatttgctacttcaaacagaacaatgtgatttcgtcttgtcatgctaaaaatgtgttggtgtgcttctataatttcgatttgtgacacatagttcgtaccaagaattacttcttccgtataaaatgcaggttcataatgtcttgtcctgttcacaattttttttactgatagcacatgcacaattttgagatacctgcaatttttaaaccgtaaggaatagttcttccgaacaattttgacgtataaaaagcacacgcgcactggtcggcatttaagacgcgtgtcattaatgtgtcaatgtcacaaaatataaaagctatgctgtgacctaaggaaccaagcttataaggttgttataccagaaaaagcgcgattttagttaggatattaaaaaatataaatgtctttcaaataaataatatattgtgaattattaattttaatcttacaaattggaactaaagcaaaacttgcccaagaatatacaagtaatgaaaaagtattcaatacaaaagttagtcgtatgttacaatggtcttctgtaagaatggaaattattgtacctattagcttgacctcatctgctctaattacggcgacgatatcagtaattagaacatttttatcatttgtgaaataattacgtagtaagatcatcatttttatacattatttatctgagcagtgtttcatttagatcattttacctagtcgttctatgtagttttttgttgtcaaattattgcaaacgtagtttttgaatagatttttaaaacgattgtagtgcctacgcttttaagcatctgtgattaatcccaacaatgctcaactacaaatttttcattgaagaatatatagaaaataaatcttttatgtactataaaaagattttatccttctctgtatatctttcgaacagatttttttttatcaaatgaattcttcacattttttctacttgtagtacttgtagagtctagaaactggcgtaaagtaaaaaaatatgcaaaaaaatgattggtgcttagatttccgtattagctttgtttttgcaaattaaaaagaggtgtcgatctctaagaactgcaatatgtgtaggatcagtactgccataggccgagagatacttcctttaaaaatatttatcggttcattattttgtatattgtacattttatacattaattagcgaattccttgtaaaacacgggaaattacgaaaactttttgagaaacagtgaatttttttaagttactttattttcgaggactattgttatcaaaggtagtcatttttatggtaatgctagaatttattccaactcctgaagggaacatgtaggtactaaaaattgacataacatgataagttggtcaacaacttcaagggtttttcaagttctgatgagaaactgttcgtacctggtggcagacacgatcacacacgttaaaccatcatctattcacaggcctcgattgaagcaacgtgtttatgtgccttgatttcagtcttcaaacgctccaataaagcagtgtactcgttgttgattttttctccatgtttcaaatagtcaataaaaataattccttgggcgtctcaaaatacagaggccataacctttctggttgttggttgcgtctttgtagctttctccgggtgctgtttactcggatgactgtcgatttgattccggactgaagtgattgatccatgtttcattcattgtaacataccggcaaaaactccaattaaacatgtccaaaccgctccgagattcatcaatttgttgctgtttttgtcctggtgtgagaaaacggaggacccatttggaaaacagctttctcatactcaaatgttcatgtgtagtagtcaaaatgctaccctttgataaatgtagagtgtcagttatctcttgcaactttacttaacaaatttcagcattttttctatgttttcgggaataattgcatcatttggccttccggagtactcggcattattggtgtctttactatcacgtttgaattcagcaaaccattgtttaatggttgtaatcgatatagcacagtcccggtaacactttttgatccattgctcaatttgggcgatattttttcccatcaaaatgcatatcaacagtgataagtcaacacccgaagttgttttgaatccattgtttataaaaatcacaaaaaagtgctttgcagaatccacctactagtacagtttgctgcacattctagaattagatgtcattgtttgtgcattcgacttcataactataagagcacgaatgtgcacctttattttacgtagtctttgtagagtttttttttgatacctttaagaatagtcttatgatggagtaacaaacatttgcattccagctcaaacaatcgctgtaaaagcacatcggcttctaaatgtatacccatacatatcttcaaatttaacttccctgcgctaagttgtagtccaattagaagagaagcaaggcgaatactcaaatatttataataaaattttattattaatattacttgatttatattatggatttgcttatttctgatcttccgacttttagtgacaattataaacagctcaaaaagttttcgtacattccgctcatcttgttcataaaggatccatgaattatcaatttattgatttaatttatgtatagtattgtttaatttaggtatttatatagaattttcgcaaatctacaagggttttggtgtcagtaatttatctggttcctttattcacaagcgaagttcatccgattttttcaattaatataaattaaattatgaattctagcctaaagcctgtttatattctaatattactatgtattttatttagttat

SEQ ID NO: 2063 - DNA, 4139 bp, Diabrotica virgifera
  SmartBlast Evalue=1E-83; Info=Isoform 2 of Tropomyosin-2 n=1 Tax=Bombyx mori RepID=Q1HPQ0-2
aaggaggcatggaggcaacaggccaaacgtaaactgatagcacctccgtggttcgtaagtcgtaacgttcaactttagtcgctccgagaccgtgtgtagtgtcaacgggtaactcgtactttctttgagttctttcgttttgtccgtaagcgcgaaaacaacacccatccaccatggacgcgatcaagaagaaaatgcaagcgatgaagcttgaaaaagacaacgcattagaccgcgcagcacacaatgaacaactcgccaaagatgccaacctccgcgctgaaaaggctgaagaagaagctcgctccctacaaaagaagatccaagccattgaaaacgatcttgaccaaactcaggaacaactcacacaagtcaatggcaaacttgaagaaaaagaaaaggccctccaaaacgctgaatccgaagttgccgccctcaaccgtcgtatccaattgttagaagaagacttggaacgttcagaagaacgtttagccactgccaccgccaaattggctgaagcctcacaggcagccgatgaaagcgaaaggatactcaaagcattagaaaacaagacaaatatggaagatgacagggtgtcccacttagagcagcaactgacacaggccaaattaatagcagaggaagctgacaaaaaatacgaagaggccgcccgaaagctggtactgatggagcaggatctcgaacgggcagaagaacgagccgatggaagcgaacacaaaattgtagaacttgaggaagaacttcgcgtagtaggcaactaacttaaaatcccttgaagtatcagaagaaaaggccacccgcaaggaagacgagtactcggttacgttaaaacaggtggagcagcagttgagagaggctgaagcaagagctgaattcgcagaacgttcagtacagaaactccagaaggaggtcgacagactagaagacgaccttttgctggaaaaagaaaagaacaaaatgctcgctgacgagatggaagcaaccttgcatgatatccaaaacatgtaaaaaaataatatcacaacaccgagaaaaggccggcctttccactaacacattcccgtctagttcttgcattccacgaaacggataggaataaaaaaatcacttaatttttataccatagtcgaggagatgttatcaattatttttgtttttgtttgagcgatatagatagaaatgccattttctagatattaagtgcaattttttagtcgtttgataaaaaatattctagaaattaaagaagcattcacatatcttacaaaatatttgctacttcaaacagaacaatgtgatttcgtcttgtcatgctaaaaatgtgttggtgtgcttctataatttcgatttgtgacacatagttcgtaccaagaattacttcttccgtataaaatgcaggttcataatgtcttgtcctgttcacaattttttttactgatagcacatgcacaattttgagatacctgcaatttttaaaccgtaaggaatagttcttccgaacaattttgacgtataaaaagcacacgcgcactggtcggcatttaagacgcgtgtcattaatgtgtcaatgtcacaaaatataaaagctatgctgtgacctaaggaaccaagcttataaggttgttataccagaaaaagcgcgattttagttaggatattaaaaaatataaatgtctttcaaataaataatatattgtgaattattaattttaatcttacaaattggaactaaagcaaaacttgcccaagaatatacaagtaatgaaaaagtattcaatacaaaagttagtcgtatgttacaatggtcttctgtaagaatggaaattattgtacctattagcttgacctcatctgctctaattacggcgacgatatcagtaattagaacatttttatcatttgtgaaataattacgtagtaagatcatcatttttatacattatttatctgagcagtgtttcatttagatcattttacctagtcgttctatgtagttttttgttgtcaaattattgcaaacgtagtttttgaatagatttttaaaacgattgtagtgcctacgcttttaagcatctgtgattaatcccaacaatgctcaactacaaatttttcattgaagaatatatagaaaataaatcttttatgtactataaaaagattttatccttctctgtatatctttcgaacagatttttttttatcaaatgaattcttcacattttttctacttgtagtacttgtagagtctagaaactggcgtaaagtaaaaaaatatgcaaaaaaatgattggtgcttagatttccgtattagctttgtttttgcaaattaaaaagaggtgtcgatctctaagaactgcaatatgtgtaggatcagtactgccataggccgagagatacttcctttaaaaatatttatcggttcattattttgtatattgtacattttatacattaattagcgaattccttgtaaaacacgggaaattaggaaaactttttgagaaacagtgaatttttttaagttactttattttcgaggactattgttatcaaaggtagtcatttttatggtaatggtagaatttattccaactcctgaatggaacatgtaggtattaaaaattgacataacatgataagttggtcaacaacttcaagagtttttcaagttctgaagagaaactgttcgtacctgctggcagacacgatcatacacgttaaaccatcatctattcacaggcctcgattgaagcaacttgtttatgtgccttgatttcagtcttcaaacgctccaataaaccagtatactcgttgttgatattttctccatgtttcaaatagtcaatgaaaataattccttacacgtcccaaaatacagaagccataacctttctggttgttggttgcgtctttgtagctttcttcgggtgctgttcactcggatgactgtcgatttgattccggactgaagtgattgatccatgtttcattcattgtaacataccggcaaaaactccaattaaacatgtccaaaccgcttgtcctggtgtgagaaaacggaggacccatttggaaaacagctttctcatactcaaatgttcatgtatagtagtcaaaatgctaccctttgataaatgtagagtgtcagttatctcttgcaactttacttaacaaatttcagcattttttctatgttttcgggaataattgcatcatttggccttccggagtactcggcattattggtgtctttactatcacgtttgaattcagcaaaccattgtttaatggttgtaatcgatatagcacagtcccggtaacactttttgatccattgctcaatttgggcgatattttttcccatcaaaatgcatatcaacagtgataagtcaacacccgaagttgttttgaatccattgtttataaaaatcacaaaaaagtgctttgcagaatccacctactagtacagtttgctgcacattctagaattagatgtcattgtttgtgcattcgacttcataactataagagcacgaatgtgcacctttattttacgtagtctttgtagagtttttttttgatacctttaagaatagtcttatgatggagtaacaaacatttgcattccagctcaaacaatcgctgtaaaagcacatcggcttctaaatgtatacccatacatatcttcaaatttaacttccctgcgctaagttgtagtccaattagaagagaagcaaggcgaatactcaaatatttataataaaattttattattaatattacttgatttatattatggatttgcttatttctgatcttccgacttttagtgacaattataaacagctcaaaaagttttcgtacattccgctcatcttgttcataaaggatccatgaattatcaatttattgatttaatttatgtatagtattgtttaatttaggtatttatatagaattttcgcaaatctacaagggttttggtgtcagtaatttatctggttcctttattcacaagcgaagttcatccgattttttcaattaatataaattaaattatgaattctagcctaaagcctgtttatattctaatattactatgtattttatttagttat

SEQ ID NO: 2064 - DNA, 3980 bp, Diabrotica virgifera
  SmartBlast Evalue=2E-58; Info=Tropomyosin isoform 4 n=2 Tax= Bombyx mori RepID=Q1HPP7_BOMMO
cgcccagttgactcaaacgcttcgtactggagtagttcgtactcggttttttcgcgaagtgtgtgaaatttttcgataaaaaatgaccaccaatattcaacaaggttcccttctggatgtgctcaaaaaaaagatgaggcagaccaaggaggaaatggaaagatacaaagacgagtgcgaggagttcaacaagaggctccaagtcgaaattatgaggagagaagaggctgaatccgaagttgccgccctcaaccgtcgtatccaattgttagaagaagacttggaacgttcagaagaacgtttagccactgccaccgccaaattggctgaagcctcacaggcagccgatgaaagcgaaaggatactcaaagcattagaaaacaagacaaatatggaagatgacagggtgtcccacttagagcagcaactgacacaggccaaattaatagcagaggaagctgacaaaaaatacgaagaggccgcccgaaagctggtactgatggagcaggatctcgaacgggcagaagaacgagccgatggaagcgaacacaaaattgtagaacttgaggaagaacttcgcgtagtaggcaactaacttaaaatcccttgaagtatcagaagaaaaggccacccgcaaggaagacgagtactcggttacgttaaaacaggtggagcagcagttgagagaggctgaagcaagagctgaattcgcagaacgttcagtacagaaactccagaaggaggtcgacagactagaagacgaccttttgctggaaaaagaaaagaacaaaatgctcgctgacgagatggaagcaaccttgcatgatatccaaaacatgtaaaaaaataatatcacaacaccgagaaaaggccggcctttccactaacacattcccgtctagttcttgcattccacgaaacggataggaataaaaaaatcacttaatttttataccatagtcgaggagatgttatcaattatttttgtttttgtttgagcgatatagatagaaatgccattttctagatattaagtgcaattttttagtcgtttgataaaaaatattctagaaattaaagaagcattcacatatcttacaaaatatttgctacttcaaacagaacaatgtgatttcgtcttgtcatgctaaaaatgtgttggtgtgcttctataatttcgatttgtgacacatagttcgtaccaagaattacttcttccgtataaaatgcaggttcataatgtcttgtcctgttcacaattttttttactgatagcacatgcacaattttgagatacctgcaatttttaaaccgtaaggaatagttcttccgaacaattttgacgtataaaaagcacacgcgcactggtcggcatttaagacgcgtgtcattaatgtgtcaatgtcacaaaatataaaagctatgctgtgacctaaggaaccaagcttataaggttgttataccagaaaaagcgcgattttagttaggatattaaaaaatataaatgtctttcaaataaataatatattgtgaattattaattttaatcttacaaattggaactaaagcaaaacttgcccaagaatatacaagtaatgaaaaagtattcaatacaaaagttagtcgtatgttacaatggtcttctgtaagaatggaaattattgtacctattagcttgacctcatctgctctaattacggcgacgatatcagtaattagaacatttttatcatttgtgaaataattacgtagtaagatcatcatttttatacattatttatctgagcagtgtttcatttagatcattttacctagtcgttctatgtagttttttgttgtcaaattattgcaaacgtagtttttgaatagatttttaaaacgattgtagtgcctacgcttttaagcatctgtgattaatcccaacaatgctcaactacaaatttttcattgaagaatatatagaaaataaatcttttatgtactataaaaagattttatccttctctgtatatctttcgaacagatttttttttatcaaatgaattcttcacattttttctacttgtagtacttgtagagtctagaaactggcgtaaagtaaaaaaatatgcaaaaaaatgattggtgcttagatttccgtattagctttgtttttgcaaattaaaaagaggtgtcgatctctaagaactgcaatatgtgtaggatcagtactgccataggccgagagatacttcctttaaaaatatttatcggttcattattttgtatattgtacattttatacattaattagcgaattccttgtaaaacacgggaaattacgaaaactttttgagaaacagtgaatttttttaagttactttattttcgaggactattgttatcaaaggtagtcatttttatggtaatgctagaatttattccaactcctgaagggaacatgtaggtactaaaaattgacataacatgataagttggtcaacaacttcaagggtttttcaagttctgatgagaaactgttcgtacctggtggcagacacgatcacacacgttaaaccatcatctattcacaggcctcgattgaagcaacgtgtttatgtgccttgatttcagtcttcaaacgctccaataaagcagtgtactcgttgttgattttttctccatgtttcaaatagtcaataaaaataattccttgggcgtctcaaaatacagaggccataacctttctggttgttggttgcgtctttgtagctttctccgggtgctgtttactcggatgactgtcgatttgattccggactgaagtgattgatccatgtttcattcattgtaacataccggcaaaaactccaattaaacatgtccaaaccgctccgagattcatcaatttgttgctgtttttgtcctggtgtgagaaaacggaggacccatttggaaaacagctttctcatactcaaatgttcatgtgtagtagtcaaaatgctaccctttgataaatgtagagtgtcagttatctcttgcaactttacttaacaaatttcagcattttttctatgttttcgggaataattgcatcatttggccttccggagtactcggcattattggtgtctttactatcacgtttgaattcagcaaaccattgtttaatggttgtaatcgatatagcacagtcccggtaacactttttgatccattgctcaatttgggcgatattttttcccatcaaaatgcatatcaacagtgataagtcaacacccgaagttgttttgaatccattgtttataaaaatcacaaaaaagtgctttgcagaatccacctactagtacagtttgctgcacattctagaattagatgtcattgtttgtgcattcgacttcataactataagagcacgaatgtgcacctttattttacgtagtctttgtagagtttttttttgatacctttaagaatagtcttatgatggagtaacaaacatttgcattccagctcaaacaatcgctgtaaaagcacatcggcttctaaatgtatacccatacatatcttcaaatttaacttccctgcgctaagttgtagtccaattagaagagaagcaaggcgaatactcaaatatttataataaaattttattattaatattacttgatttatattatggatttgcttatttctgatcttccgacttttagtgacaattataaacagctcaaaaagttttcgtacattccgctcatcttgttcataaaggatccatgaattatcaatttattgatttaatttatgtatagtattgtttaatttaggtatttatatagaattttcgcaaatctacaagggttttggtgtcagtaatttatctggttcctttattcacaagcgaagttcatccgattttttcaattaatataaattaaattatgaattctagcctaaagcctgtttatattctaatattactatgtattttatttagttat

SEQ ID NO: 2065 - DNA, 3952 bp, Diabrotica virgifera
  SmartBlast Evalue=2E-58; Info=Tropomyosin isoform 4 n=2 Tax= Bombyx mori RepID=Q1HPP7_BOMMO
cgcccagttgactcaaacgcttcgtactggagtagttcgtactcggttttttcgcgaagtgtgtgaaatttttcgataaaaaatgaccaccaatattcaacaaggttcccttctggatgtgctcaaaaaaaagatgaggcagaccaaggaggaaatggaaagatacaaagacgagtgcgaggagttcaacaagaggctccaagtcgaaattatgaggagagaagaggctgaatccgaagttgccgccctcaaccgtcgtatccaattgttagaagaagacttggaacgttcagaagaacgtttagccactgccaccgccaaattggctgaagcctcacaggcagccgatgaaagcgaaaggatactcaaagcattagaaaacaagacaaatatggaagatgacagggtgtcccacttagagcagcaactgacacaggccaaattaatagcagaggaagctgacaaaaaatacgaagaggccgcccgaaagctggtactgatggagcaggatctcgaacgggcagaagaacgagccgatggaagcgaacacaaaattgtagaacttgaggaagaacttcgcgtagtaggcaactaacttaaaatcccttgaagtatcagaagaaaaggccacccgcaaggaagacgagtactcggttacgttaaaacaggtggagcagcagttgagagaggctgaagcaagagctgaattcgcagaacgttcagtacagaaactccagaaggaggtcgacagactagaagacgaccttttgctggaaaaagaaaagaacaaaatgctcgctgacgagatggaagcaaccttgcatgatatccaaaacatgtaaaaaaataatatcacaacaccgagaaaaggccggcctttccactaacacattcccgtctagttcttgcattccacgaaacggataggaataaaaaaatcacttaatttttataccatagtcgaggagatgttatcaattatttttgtttttgtttgagcgatatagatagaaatgccattttctagatattaagtgcaattttttagtcgtttgataaaaaatattctagaaattaaagaagcattcacatatcttacaaaatatttgctacttcaaacagaacaatgtgatttcgtcttgtcatgctaaaaatgtgttggtgtgcttctataatttcgatttgtgacacatagttcgtaccaagaattacttcttccgtataaaatgcaggttcataatgtcttgtcctgttcacaattttttttactgatagcacatgcacaattttgagatacctgcaatttttaaaccgtaaggaatagttcttccgaacaattttgacgtataaaaagcacacgcgcactggtcggcatttaagacgcgtgtcattaatgtgtcaatgtcacaaaatataaaagctatgctgtgacctaaggaaccaagcttataaggttgttataccagaaaaagcgcgattttagttaggatattaaaaaatataaatgtctttcaaataaataatatattgtgaattattaattttaatcttacaaattggaactaaagcaaaacttgcccaagaatatacaagtaatgaaaaagtattcaatacaaaagttagtcgtatgttacaatggtcttctgtaagaatggaaattattgtacctattagcttgacctcatctgctctaattacggcgacgatatcagtaattagaacatttttatcatttgtgaaataattacgtagtaagatcatcatttttatacattatttatctgagcagtgtttcatttagatcattttacctagtcgttctatgtagttttttgttgtcaaattattgcaaacgtagtttttgaatagatttttaaaacgattgtagtgcctacgcttttaagcatctgtgattaatcccaacaatgctcaactacaaatttttcattgaagaatatatagaaaataaatcttttatgtactataaaaagattttatccttctctgtatatctttcgaacagatttttttttatcaaatgaattcttcacattttttctacttgtagtacttgtagagtctagaaactggcgtaaagtaaaaaaatatgcaaaaaaatgattggtgcttagatttccgtattagctttgtttttgcaaattaaaaagaggtgtcgatctctaagaactgcaatatgtgtaggatcagtactgccataggccgagagatacttcctttaaaaatatttatcggttcattattttgtatattgtacattttatacattaattagcgaattccttgtaaaacacgggaaattaggaaaactttttgagaaacagtgaatttttttaagttactttattttcgaggactattgttatcaaaggtagtcatttttatggtaatggtagaatttattccaactcctgaatggaacatgtaggtattaaaaattgacataacatgataagttggtcaacaacttcaagagtttttcaagttctgaagagaaactgttcgtacctgctggcagacacgatcatacacgttaaaccatcatctattcacaggcctcgattgaagcaacttgtttatgtgccttgatttcagtcttcaaacgctccaataaaccagtatactcgttgttgatattttctccatgtttcaaatagtcaatgaaaataattccttacacgtcccaaaatacagaagccataacctttctggttgttggttgcgtctttgtagctttcttcgggtgctgttcactcggatgactgtcgatttgattccggactgaagtgattgatccatgtttcattcattgtaacataccggcaaaaactccaattaaacatgtccaaaccgcttgtcctggtgtgagaaaacggaggacccatttggaaaacagctttctcatactcaaatgttcatgtatagtagtcaaaatgctaccctttgataaatgtagagtgtcagttatctcttgcaactttacttaacaaatttcagcattttttctatgttttcgggaataattgcatcatttggccttccggagtactcggcattattggtgtctttactatcacgtttgaattcagcaaaccattgtttaatggttgtaatcgatatagcacagtcccggtaacactttttgatccattgctcaatttgggcgatattttttcccatcaaaatgcatatcaacagtgataagtcaacacccgaagttgttttgaatccattgtttataaaaatcacaaaaaagtgctttgcagaatccacctactagtacagtttgctgcacattctagaattagatgtcattgtttgtgcattcgacttcataactataagagcacgaatgtgcacctttattttacgtagtctttgtagagtttttttttgatacctttaagaatagtcttatgatggagtaacaaacatttgcattccagctcaaacaatcgctgtaaaagcacatcggcttctaaatgtatacccatacatatcttcaaatttaacttccctgcgctaagttgtagtccaattagaagagaagcaaggcgaatactcaaatatttataataaaattttattattaatattacttgatttatattatggatttgcttatttctgatcttccgacttttagtgacaattataaacagctcaaaaagttttcgtacattccgctcatcttgttcataaaggatccatgaattatcaatttattgatttaatttatgtatagtattgtttaatttaggtatttatatagaattttcgcaaatctacaagggttttggtgtcagtaatttatctggttcctttattcacaagcgaagttcatccgattttttcaattaatataaattaaattatgaattctagcctaaagcctgtttatattctaatattactatgtattttatttagttat

SEQ ID NO: 2066 - DNA, 3401 bp, Diabrotica virgifera
  SmartBlast Evalue=1E-83; Info=Isoform 2 of Tropomyosin-2 n=1 Tax=Bombyx mori RepID=Q1HPQ0-2
aaggaggcatggaggcaacaggccaaacgtaaactgatagcacctccgtggttcgtaagtcgtaacgttcaactttagtcgctccgagaccgtgtgtagtgtcaacgggtaactcgtactttctttgagttctttcgttttgtccgtaagcgcgaaaacaacacccatccaccatggacgcgatcaagaagaaaatgcaagcgatgaagcttgaaaaagacaacgcattagaccgcgcagcacacaatgaacaactcgccaaagatgccaacctccgcgctgaaaaggctgaagaagaagctcgctccctacaaaagaagatccaagccattgaaaacgatcttgaccaaactcaggaacaactcacacaagtcaatggcaaacttgaagaaaaagaaaaggccctccaaaacgctgaatccgaagttgccgccctcaaccgtcgtatccaattgttagaagaagacttggaacgttcagaagaacgtttagccactgccaccgccaaattggctgaagcctcacaggcagccgatgaaagcgaaaggatactcaaagcattagaaaacaagacaaatatggaagatgacagggtgtcccacttagagcagcaactgacacaggccaaattaatagcagaggaagctgacaaaaaatacgaagaggccgcccgaaagctggtactgatggagcaggatctcgaacgggcagaagaacgagccgatggaagcgaacacaaaattgtagaacttgaggaagaacttcgcgtagtaggcaactaacttaaaatcccttgaagtatcagaagaaaaggccacccgcaaggaagacgagtactcggttacgttaaaacaggtggagcagcagttgagagaggctgaagcaagagctgaattcgcagaacgttcagtacagaaactccagaaggaggtcgacagactagaagacgaccttttgctggaaaaagaaaagaacaaaatgctcgctgacgagatggaagcaaccttgcatgatatccaaaacatgtaaaaaaataatatcacaacaccgagaaaaggccggcctttccactaacacattcccgtctagttcttgcattccacgaaacggataggaataaaaaaatcacttaatttttataccatagtcgaggagatgttatcaattatttttgtttttgtttgagcgatatagatagaaatgccattttctagatattaagtgcaattttttagtcgtttgataaaaaatattctagaaattaaagaagcattcacatatcttacaaaatatttgctacttcaaacagaacaatgtgatttcgtcttgtcatgctaaaaatgtgttggtgtgcttctataatttcgatttgtgacacatagttcgtaccaagaattacttcttccgtataaaatgcaggttcataatgtcttgtcctgttcacaattttttttactgatagcacatgcacaattttgagatacctgcaatttttaaaccgtaaggaatagttcttccgaacaattttgacgtataaaaagcacacgcgcactggtcggcatttaagacgcgtgtcattaatgtgtcaatgtcacaaaatataaaagctatgctgtgacctaaggaaccaagcttataaggttgttataccagaaaaagcgcgattttagttaggatattaaaaaatataaatgtctttcaaataaataatatattgtgaattattaattttaatcttacaaattggaactaaagcaaaacttgcccaagaatatacaagtaatgaaaaagtattcaatacaaaagttagtcgtatgttacaatggtcttctgtaagaatggaaattattgtacctattagcttgacctcatctgctctaattacggcgacgatatcagtaattagaacatttttatcatttgtgaaataattacgtagtaagatcatcatttttatacattatttatctgagcagtgtttcatttagatcattttacctagtcgttctatgtagttttttgttgtcaaattattgcaaacgtagtttttgaatagatttttaaaacgattgtagtgcctacgcttttaagcatctgtgattaatcccaacaatgctcaactacaaatttttcattgaagaatatatagaaaataaatcttttatgtactataaaaagattttatccttctctgtatatctttcgaacagatttttttttatcaaatgaattcttcacattttttctacttgtagtacttgtagagtctagaaactggcgtaaagtaaaaaaatatgcaaaaaaatgattggtgcttagatttccgtattagctttgtttttgcaaattaaaaagaggtgtcgatctctaagaactgcaatatgtgtaggatcagtactgccataggccgagagatacttcctttaaaaatatttatcggttcattattttgtatattgtacattttatacattaattagcgaattccttgtaaaacacgggaaattacgaaaactttttgagaaacagtgaatttttttaagttactttattttcgaggactattgttatcaaaggtagtcatttttatggtaatgctagaatttattccaactcctgaagggaacatgtaggtactaaaaattgacataacatgataagttggtcaacaacttcaagggtttttcaagttctgatgagaaactgttcgtacctggtggcagacacgatcacacacgttaaaccatcatctattcacaggcctcgattgaagcaacgtgtttatgtgccttgatttcagtcttcaaacgctccaataaagcagtgtactcgttgttgattttttctccatgtttcaaatagtcaataaaaataattccttgggcgtctcaaaatacagaggccataacctttctggttgttggttgcgtctttgtagctttcttcgggtgctgttcactcggatgactgttgatttgattccggactgaagtgatggatacatgtttcatccattgtgagatactggcaaaaactccgattaaacaaaacttcgttgttgtttttgctgtggtgtgagaaaacgcgacacccatttggaaaacagctttctcatacccaaatgttgatgtatgatagtcagaatgctaccctttgataactttagaatgtcagctatctcttgcaacttcacgttgcggttttccataataaatttcagcattttttcgatgttttttaggaataactgcatcatttgaatgtgcacctttattttgcatggtctttgtagagttttttttaatgatgcctttaagaatagtcctacaattgagttacaaacatttgcattccagctcaaacaatagttttagagcatcaaaagcaaatctgcttctaaa

SEQ ID NO: 2067 - DNA, 3214 bp, Diabrotica virgifera
  SmartBlast Evalue=2E-58; Info=Tropomyosin isoform 4 n=2 Tax= Bombyx mori RepID=Q1HPP7_BOMMO
cgcccagttgactcaaacgcttcgtactggagtagttcgtactcggttttttcgcgaagtgtgtgaaatttttcgataaaaaatgaccaccaatattcaacaaggttcccttctggatgtgctcaaaaaaaagatgaggcagaccaaggaggaaatggaaagatacaaagacgagtgcgaggagttcaacaagaggctccaagtcgaaattatgaggagagaagaggctgaatccgaagttgccgccctcaaccgtcgtatccaattgttagaagaagacttggaacgttcagaagaacgtttagccactgccaccgccaaattggctgaagcctcacaggcagccgatgaaagcgaaaggatactcaaagcattagaaaacaagacaaatatggaagatgacagggtgtcccacttagagcagcaactgacacaggccaaattaatagcagaggaagctgacaaaaaatacgaagaggccgcccgaaagctggtactgatggagcaggatctcgaacgggcagaagaacgagccgatggaagcgaacacaaaattgtagaacttgaggaagaacttcgcgtagtaggcaactaacttaaaatcccttgaagtatcagaagaaaaggccacccgcaaggaagacgagtactcggttacgttaaaacaggtggagcagcagttgagagaggctgaagcaagagctgaattcgcagaacgttcagtacagaaactccagaaggaggtcgacagactagaagacgaccttttgctggaaaaagaaaagaacaaaatgctcgctgacgagatggaagcaaccttgcatgatatccaaaacatgtaaaaaaataatatcacaacaccgagaaaaggccggcctttccactaacacattcccgtctagttcttgcattccacgaaacggataggaataaaaaaatcacttaatttttataccatagtcgaggagatgttatcaattatttttgtttttgtttgagcgatatagatagaaatgccattttctagatattaagtgcaattttttagtcgtttgataaaaaatattctagaaattaaagaagcattcacatatcttacaaaatatttgctacttcaaacagaacaatgtgatttcgtcttgtcatgctaaaaatgtgttggtgtgcttctataatttcgatttgtgacacatagttcgtaccaagaattacttcttccgtataaaatgcaggttcataatgtcttgtcctgttcacaattttttttactgatagcacatgcacaattttgagatacctgcaatttttaaaccgtaaggaatagttcttccgaacaattttgacgtataaaaagcacacgcgcactggtcggcatttaagacgcgtgtcattaatgtgtcaatgtcacaaaatataaaagctatgctgtgacctaaggaaccaagcttataaggttgttataccagaaaaagcgcgattttagttaggatattaaaaaatataaatgtctttcaaataaataatatattgtgaattattaattttaatcttacaaattggaactaaagcaaaacttgcccaagaatatacaagtaatgaaaaagtattcaatacaaaagttagtcgtatgttacaatggtcttctgtaagaatggaaattattgtacctattagcttgacctcatctgctctaattacggcgacgatatcagtaattagaacatttttatcatttgtgaaataattacgtagtaagatcatcatttttatacattatttatctgagcagtgtttcatttagatcattttacctagtcgttctatgtagttttttgttgtcaaattattgcaaacgtagtttttgaatagatttttaaaacgattgtagtgcctacgcttttaagcatctgtgattaatcccaacaatgctcaactacaaatttttcattgaagaatatatagaaaataaatcttttatgtactataaaaagattttatccttctctgtatatctttcgaacagatttttttttatcaaatgaattcttcacattttttctacttgtagtacttgtagagtctagaaactggcgtaaagtaaaaaaatatgcaaaaaaatgattggtgcttagatttccgtattagctttgtttttgcaaattaaaaagaggtgtcgatctctaagaactgcaatatgtgtaggatcagtactgccataggccgagagatacttcctttaaaaatatttatcggttcattattttgtatattgtacattttatacattaattagcgaattccttgtaaaacacgggaaattacgaaaactttttgagaaacagtgaatttttttaagttactttattttcgaggactattgttatcaaaggtagtcatttttatggtaatgctagaatttattccaactcctgaagggaacatgtaggtactaaaaattgacataacatgataagttggtcaacaacttcaagggtttttcaagttctgatgagaaactgttcgtacctggtggcagacacgatcacacacgttaaaccatcatctattcacaggcctcgattgaagcaacgtgtttatgtgccttgatttcagtcttcaaacgctccaataaagcagtgtactcgttgttgattttttctccatgtttcaaatagtcaataaaaataattccttgggcgtctcaaaatacagaggccataacctttctggttgttggttgcgtctttgtagctttcttcgggtgctgttcactcggatgactgttgatttgattccggactgaagtgatggatacatgtttcatccattgtgagatactggcaaaaactccgattaaacaaaacttcgttgttgtttttgctgtggtgtgagaaaacgcgacacccatttggaaaacagctttctcatacccaaatgttgatgtatgatagtcagaatgctaccctttgataactttagaatgtcagctatctcttgcaacttcacgttgcggttttccataataaatttcagcattttttcgatgttttttaggaataactgcatcatttgaatgtgcacctttattttgcatggtctttgtagagttttttttaatgatgcctttaagaatagtcctacaattgagttacaaacatttgcattccagctcaaacaatagttttagagcatcaaaagcaaatctgcttctaaa

SEQ ID NO: 2068 - DNA, 1234 bp, Diabrotica virgifera
  SmartBlast Evalue=1E-114; Info=Tropomyosin-2 n=10 Tax=Neoptera RepID=TPM2_BOMMO
aaggaggcatggaggcaacaggccaaacgtaaactgatagcacctccgtggttcgtaagtcgtaacgttcaactttagtcgctccgagaccgtgtgtagtgtcaacgggtaactcgtactttctttgagttctttcgttttgtccgtaagcgcgaaaacaacacccatccaccatggacgcgatcaagaagaaaatgcaagcgatgaagcttgaaaaagacaacgcattagaccgcgcagcacacaatgaacaactcgccaaagatgccaacctccgcgctgaaaaggctgaagaagaagctcgctccctacaaaagaagatccaagccattgaaaacgatcttgaccaaactcaggaacaactcacacaagtcaatggcaaacttgaagaaaaagaaaaggccctccaaaacgctgaatccgaagttgccgccctcaaccgtcgtatccaattgttagaagaagacttggaacgttcagaagaacgtttagccactgccaccgccaaattggctgaagcctcacaggcagccgatgaaagcgaaaggcagcgcaaagtactcgagaatcgttccctggccgatgaggaacgtatggacgccctcgagaaccaacttaaagaggcccgtttcctagctgaagaagccgacaaaaaatacgatgaggtagcccgtaaattggccatggttgaagctgacttggaacgtgctgaagaacgtgccgaagccggtgaatccaaaattgtagaacttgaggaagaacttcgcgtagtaggcaacaacttaaaatcccttgaagtatcagaagaaaaggccaaccaacgcgaagaagaatacaaaaaccaaattaagaacctcaccacccgtctaaaggaggctgaagcaagagctgaattcgcagaacgttcagtacagaaactccagaaggaggtcgacagactagaagacgaattggtagccgagaaggagcgttacaaagaaattggagacgatttggacaccgctttcgtcgagcttatcctttaattttctttatgttgttttaataaaccctgtattcgaggtatagtcttgcacggcttgttcagcgactcaaattcacaaggaagaaccattacggattaagttcagaatgaatacaggggaaaatattgtgttttgacattgtgtattagactttattaccagaaaatttttatgtaaatattattttcattaatacatgattgtgaatg

SEQ ID NO: 2069 - DNA, 1047 bp, Diabrotica virgifera
  SmartBlast Evalue=1E-96; Info="Tropomyosin-1, isoforms 9A/A/B n= 1 Tax=Drosophila melanogaster RepID=TPM1_DROME"
cgcccagttgactcaaacgcttcgtactggagtagttcgtactcggttttttcgcgaagtgtgtgaaatttttcgataaaaaatgaccaccaatattcaacaaggttcccttctggatgtgctcaaaaaaaagatgaggcagaccaaggaggaaatggaaagatacaaagacgagtgcgaggagttcaacaagaggctccaagtcgaaattatgaggagagaagaggctgaatccgaagttgccgccctcaaccgtcgtatccaattgttagaagaagacttggaacgttcagaagaacgtttagccactgccaccgccaaattggctgaagcctcacaggcagccgatgaaagcgaaaggcagcgcaaagtactcgagaatcgttccctggccgatgaggaacgtatggacgccctcgagaaccaacttaaagaggcccgtttcctagctgaagaagccgacaaaaaatacgatgaggtagcccgtaaattggccatggttgaagctgacttggaacgtgctgaagaacgtgccgaagccggtgaatccaaaattgtagaacttgaggaagaacttcgcgtagtaggcaacaacttaaaatcccttgaagtatcagaagaaaaggccaaccaacgcgaagaagaatacaaaaaccaaattaagaacctcaccacccgtctaaaggaggctgaagcaagagctgaattcgcagaacgttcagtacagaaactccagaaggaggtcgacagactagaagacgaattggtagccgagaaggagcgttacaaagaaattggagacgatttggacaccgctttcgtcgagcttatcctttaattttctttatgttgttttaataaaccctgtattcgaggtatagtcttgcacggcttgttcagcgactcaaattcacaaggaagaaccattacggattaagttcagaatgaatacaggggaaaatattgtgttttgacattgtgtattagactttattaccagaaaatttttatgtaaatattattttcattaatacatgattgtgaatg

SEQ ID NO: 2070 - DNA, 3127 bp, Diabrotica virgifera
cagtgacacaacaccaaccggccctaaaacacaaaaaagcaagttcaatagcggaaccaaattcaaaattattttgcacatcatatttgaaacattatttggttaaaacatttcattcttgttggtaaaaaatgtattaatttctctggactaaattacgattctgttgatatccgagatacttggtcttcacacaatattaccaaactgaattttgttataatattcggtttaaattttctagccgatttccgagtctactaggcgagttctttcacaactgatgatggaagaatgttcgatgttcaatattaacgtttttatttgtgctgtttttcctcataagatgtctggcttttgctgtattggcgtaagaagcataatatagtgctgggcatgactacttcaatcacaccaaaaaaagtagtaagaaaatgagaactttagtaaaaatcattcacaccaattcataacgtctacaaccacactaaatattaagaataaatacgaacatatcgggcgtcaattgcatattgacgcgttaacagtgttgccatgttttaaggtgacaaatatgttttatagttgaattattaacttcttttataaaattttactagctggctttaataatttgatcacctactaaggaatagatacagattattgggtaattttttaaacaaactggaagaatcattgtacttgcttaataatgtactaataagcatgctatcaaatcactaatatgttaataattattcccatccctaatttttcatattactaaaagatgtgacacttttgttgtcttgctgtacagcttcatctaagtataaagtaaattatgaaagcgatcaaatcccctaatttttatgacttaatactctggatatgcggtgagaattccttggaaacaggaaaactgagaataaatgtctttttgtaaaattagggcttattttcttattataccccccgcaaagtatccaattgtaattgttaaaatctttatatatttgtatataggttaggattaatcaaaaaaggctgtgtaatgtctctacatttaatatgtagatgtttaaaaaaaagggatattttttaaatatgtttatggcaatttcttaatatacacgagattgtacttcctggtatgtttagtctcaactcagaattttcctttggggtggggggttggcttggacacagaaattttttttatttttttttgtgaaaaacgaattacattttgctactattccttatatattttttatatgtccttgggggcgatggttaacccctaaaacagtgggtacgccactatataataacacctagattaggcaaatccgacaaatagcgtaacgcggagcagttcgggtcggtggtctatctatctcgctctaccggcgcttagcttttttagacaaagatagctagaccaccgtacttgatattggcgttacaccccgatgcattgagtggcatatgactagccagatctatagttaacatgtctctgttttactcgctaactaaattttgataatagggcttttcattcacagtcatttgtttcgagcttctgtcatgtgtcacataatattaatatatctacgtcatacgttattgatatataccaatgatacaaaccaaagacgtatggcgtagatatattaatgtatgtgacacatgacaggggctcgaaacaaatgacagtcgatgaaaagccctatatattggttaattgtcaattggtcaagtcgggcaattgtaaataaagagacaatgttgaagatatatttacaaagaactgaaaagacatgtgcagatagtatactgtataatattgtaagttaagtgttagtcttatgacattcttaaattcctcttacgacattcaatttaaaaagccttacttgtggaagactttgtttccagtgacatatgactaccaattgaaagcattttgttgattttcatataaaacaaatatgaaactgttatacaatgatgagcgcgctgataaccggtaaaataacgcacaagtatggaaaacacattgagttgtgagatggaaagaaatgaaactagtgaaggtgggagatttagcgataaagaggtgtaaattttcattctactaattgtttcccacctttagacgtatcggacgagtttggcaactgccactatgacagttttagttcatatacttctccgatatgtctaaaggtgggaaaaaataagtggagtgtaagtttataggtttttatcgctaaatctcccacctacactagttcatttctttttgtctcacaacttggtgtgttttccatcttttgcgttcttgtgtcggttattagcgcgctcatcaattgagcgcgctaataaccggcgcgcgtttatattggtcaattccttataaatcctttgcacttcattaaattttgacgttgtcatttttatacagcgttgtcatattgtggagtaggtaagtagaaaatgtcaggaattgtgaaatgaataatttaatttccattagagttcaatggttctttacagttttaaagttgtacatgatcggttacttacagttagttacacaaaactttgtgataataataaaaataaccgtcttgaataaaactcttgcaacgcaataaatataaaagtaacaatagttcctataaataatttgcactccattaattaaaagtcaattgttttttcagcgatattgaatgtaaataattattgttttttactagacattttttctataaattttattttttgaaaatatattaaaagtgtcaggtaatttcaaggacgatgtagaaatgttattgatcgcatgcaacagacataaaaggaaggtatatcaaaattttctattgtataaattttccagttagcttgtatattgtacattatttatatatattatattatattaatttttgtagaaaatatatacaaaatgataatgcacacttatttactttttaattcaaatttagtattaaaccattttacaattattataacaaatttatttttgcaaaaagaaagattacttatttaatctgtaactaaaactaaataaatattttaaaatctc

SEQ ID NO: 2071 - DNA, 3110 bp, Diabrotica virgifera
cagtgacacaacaccaaccggccctaaaacacaaaaaagcaagttcaatagcggaaccaaattcaaaattattttgcacatcatatttgaaacattatttggttaaaacatttcattcttgttggtaaaaaatgtattaatttctctggactaaattacgattctgttgatatccgagatacttggtcttcacacaatattaccaaactgaattttgttataatattcggtttaaattttctagccgatttccgagtctactaggcgagttctttcacaactgatgatggaagaatgttcgatgttcaatattaacgtttttatttgtgctgtttttcctcataagatgtctggcttttgctgtattggcgtaagaagcataatatagtgctgggcatgactacttcaatcacaccaaaaaaagtagtaagaaaatgagaactttagtaaaaatcattcacaccaattcataacgtctacaaccacactaaatattaagaataaatacgaacatatcgggcgtcaattgcatattgacgcgttaacagtgttgccatgttttaaggtgacaaatatgttttatagttgaattattaacttcttttataaaattttactagctggctttaataatttgatcacctactaaggaatagatacagattattgggtaattttttaaacaaactggaagaatcattgtacttgcttaataatgtactaataagcatgctatcaaatcactaatatgttaataattattcccatccctaatttttcatattactaaaagatgtgacacttttgttgtcttgctgtacagcttcatctaagtataaagtaaattatgaaagcgatcaaatcccctaatttttatgacttaatactctggatatgcggtgagaattccttggaaacaggaaaactgagaataaatgtctttttgtaaaattagggcttattttcttattataccccccgcaaagtatccaattgtaattgttaaaatctttatatatttgtatataggttaggattaatcaaaaaaggctgtgtaatgtctctacatttaatatgtagatgtttaaaaaaaagggatattttttaaatatgtttatggcaatttcttaatatacacgagattgtacttcctggtatgtttagtctcaactcagaattttcctttggggtggggggttggcttggacacagaaattttttttatttttttttgtgaaaaacgaattacattttgctactattccttatatattttttatatgtccttgggggcgatggttaacccctaaaacagtgggtacgccactatataataacacctagattaggcaaatccgacaaatagcgtaacgcggagcagttcgggtcggtggtctatctatctcgctctaccggcgcttagcttttttagacaaagatagctagaccaccgtacttgatattggcgttacaccccgatgcattgagtggcatatgactagccagatctatagttaacatgtctctgttttactcgctaactaaattttgataatagggcttttcattcacagtcatttgtttcgagcttctgtcatgtgtcacataatattaatatatctacgtcatacgttattgatatataccaatgatacaaaccaaagacgtatggcgtagatatattaatgtatgtgacacatgacaggggctcgaaacaaatgacagtcgatgaaaagccctatatattggttaattgtcaattggtcaagtcgggcaattgtaaataaagagacaatgttgaagatatatttacaaagaactgaaaagacatgtgcagatagtatactgtataatattgtaagttaagtgttagtcttatgacattcttaaattcctcttacgacattcaatttaaaaagccttacttgtggaagactttgtttccagtgacatatgactaccaattgaaagcattttgttgattttcatataaaacaaatatgaaactgttatacaatgatgagcgcgctgataaccggtaaaataacgcacaagtatggaaaacacattgagttgtgagatggaaagaaatgaaactagtgaaggtgggagatttagcgataaagaggtgtaaattttcattctactaattgtttcccacctttagacgtatcggacgagtttggcaactgccactatgacagttttagttcatatacttctccgatatgtctaaaggtgggaaaaaataagtggagtgtaagtttataggtttttatcgctaaatctcccacctacactagttcatttctttttgtctcacaacttggtgtgttttccatcttttgcgttcttgtgtcggttattagcgcgctcatcaattgagcgcgctaataaccggcgcgcgtttatattggtcaattccttataaatcctttgcacttcattaaattttgacgttgtcatttttatacagcgttgtcatattgtggagtaggtaagtagaaaatgtcaggaattgtgaaatgaataatttaatttccattagagttcaatggttctttacagttttaaagttgtacatgatcggttacttacagttagttacacaaaactttgtgataataataaaaataaccgtcttgaataaaactcttgcaacagtaacaatagttcctataaataatttgcactccattaattaaaagtcaattgttttttcagcgatattgaatgtaaataattattgtttttactagacatttttctataaattttatttttgaaaatatgttaaaattgttaggtaatttcaaggacgatgtagaaatgttattgatcgcatgcaacagacataaaaggaaggtatatcaaaattttctattgtataaattttccagttagcttgtatattgtacattatttatatatattatattatattaatttttgtagaaaatatatacaaaatgataatgcacacttatttactttttaattcaaatttagtattaaaccattttacaattattataacaaatttatttttgcaaaaagaaagattacttatttaatctgtaactaaaactaaataaatattttaaaatctc

SEQ ID NO: 2072 - DNA, 3045 bp, Diabrotica virgifera
cagtgacacaacaccaaccggccctaaaacacaaaaaagcaagttcaatagcggaaccaaattcaaaattattttgcacatcatatttgaaacattatttggttaaaacatttcattcttgttggtaaaaaatgtattaatttctctggactaaattacgattctgttgatatccgagatacttggtcttcacacaatattaccaaactgaattttgttataatattcggtttaaattttctagccgatttccgagtctactaggcgagttctttcacaactgatgatggaagaatgttcgatgttcaatattaacgtttttatttgtgctggttttcctcataagatgtctggctttactttagtaaaaatcattcacaccaattcataacgtctacaaccacactaaatattaagaataaatacgaacatatcgggcgtcaattgcatattgacgcgttaacagtgttgccatgttttaaggtgacaaatatgttttatagttgaattattaacttcttttataaaattttactagctggctttaataatttgatcacctactaaggaatagatacagattattgggtaattttttaaacaaactggaagaatcattgtacttgcttaataatgtactaataagcatgctatcaaatcactaatatgttaataattattcccatccctaatttttcatattactaaaagatgtgacacttttgttgtcttgctgtacagcttcatctaagtataaagtaaattatgaaagcgatcaaatcccctaatttttatgacttaatactctggatatgcggtgagaattccttggaaacaggaaaactgagaataaatgtctttttgtaaaattagggcttattttcttattataccccccgcaaagtatccaattgtaattgttaaaatctttatatatttgtatataggttaggattaatcaaaaaaggctgtgtaatgtctctacatttaatatgtagatgtttaaaaaaaagggatattttttaaatatgtttatggcaatttcttaatatacacgagattgtacttcctggtatgtttagtctcaactcagaattttcctttggggtggggggttggcttggacacagaaattttttttatttttttttgtgaaaaacgaattacattttgctactattccttatatattttttatatgtccttgggggcgatggttaacccctaaaacagtgggtacgccactatataataacacctagattaggcaaatccgacaaatagcgtaacgcggagcagttcgggtcggtggtctatctatctcgctctaccggcgcttagcttttttagacaaagatagctagaccaccgtacttgatattggcgttacaccccgatgcattgagtggcatatgactagccagatctatagttaacatgtctctgttttactcgctaactaaattttgataatagggcttttcattcacagtcatttgtttcgagcttctgtcatgtgtcacataatattaatatatctacgtcatacgttattgatatataccaatgatacaaaccaaagacgtatggcgtagatatattaatgtatgtgacacatgacaggggctcgaaacaaatgacagtcgatgaaaagccctatatattggttaattgtcaattggtcaagtcgggcaattgtaaataaagagacaatgttgaagatatatttacaaagaactgaaaagacatgtgcagatagtatactgtataatattgtaagttaagtgttagtcttatgacattcttaaattcctcttacgacattcaatttaaaaagccttacttgtggaagactttgtttccagtgacatatgactaccaattgaaagcattttgttgattttcatataaaacaaatatgaaactgttatacaatgatgagcgcgctgataaccggtaaaataacgcacaagtatggaaaacacattgagttgtgagatggaaagaaatgaaactagtgaaggtgggagatttagcgataaagaggtgtaaattttcattctactaattgtttcccacctttagacgtatcggacgagtttggcaactgccactatgacagttttagttcatatacttctccgatatgtctaaaggtgggaaaaaataagtggagtgtaagtttataggtttttatcgctaaatctcccacctacactagttcatttctttttgtctcacaacttggtgtgttttccatcttttgcgttcttgtgtcggttattagcgcgctcatcaattgagcgcgctaataaccggcgcgcgtttatattggtcaattccttataaatcctttgcacttcattaaattttgacgttgtcatttttatacagcgttgtcatattgtggagtaggtaagtagaaaatgtcaggaattgtgaaatgaataatttaatttccattagagttcaatggttctttacagttttaaagttgtacatgatcggttacttacagttagttacacaaaactttgtgataataataaaaataaccgtcttgaataaaactcttgcaacgcaataaatataaaagtaacaatagttcctataaataatttgcactccattaattaaaagtcaattgttttttcagcgatattgaatgtaaataattattgttttttactagacattttttctataaattttattttttgaaaatatattaaaagtgtcaggtaatttcaaggacgatgtagaaatgttattgatcgcatgcaacagacataaaaggaaggtatatcaaaattttctattgtataaattttccagttagcttgtatattgtacattatttatatatattatattatattaatttttgtagaaaatatatacaaaatgataatgcacacttatttactttttaattcaaatttagtattaaaccattttacaattattataacaaatttatttttgcaaaaagaaagattacttatttaatctgtaactaaaactaaataaatattttaaaatctc

SEQ ID NO: 2073 - DNA, 3028 bp, Diabrotica virgifera
cagtgacacaacaccaaccggccctaaaacacaaaaaagcaagttcaatagcggaaccaaattcaaaattattttgcacatcatatttgaaacattatttggttaaaacatttcattcttgttggtaaaaaatgtattaatttctctggactaaattacgattctgttgatatccgagatacttggtcttcacacaatattaccaaactgaattttgttataatattcggtttaaattttctagccgatttccgagtctactaggcgagttctttcacaactgatgatggaagaatgttcgatgttcaatattaacgtttttatttgtgctggttttcctcataagatgtctggctttactttagtaaaaatcattcacaccaattcataacgtctacaaccacactaaatattaagaataaatacgaacatatcgggcgtcaattgcatattgacgcgttaacagtgttgccatgttttaaggtgacaaatatgttttatagttgaattattaacttcttttataaaattttactagctggctttaataatttgatcacctactaaggaatagatacagattattgggtaattttttaaacaaactggaagaatcattgtacttgcttaataatgtactaataagcatgctatcaaatcactaatatgttaataattattcccatccctaatttttcatattactaaaagatgtgacacttttgttgtcttgctgtacagcttcatctaagtataaagtaaattatgaaagcgatcaaatcccctaatttttatgacttaatactctggatatgcggtgagaattccttggaaacaggaaaactgagaataaatgtctttttgtaaaattagggcttattttcttattataccccccgcaaagtatccaattgtaattgttaaaatctttatatatttgtatataggttaggattaatcaaaaaaggctgtgtaatgtctctacatttaatatgtagatgtttaaaaaaaagggatattttttaaatatgtttatggcaatttcttaatatacacgagattgtacttcctggtatgtttagtctcaactcagaattttcctttggggtggggggttggcttggacacagaaattttttttatttttttttgtgaaaaacgaattacattttgctactattccttatatattttttatatgtccttgggggcgatggttaacccctaaaacagtgggtacgccactatataataacacctagattaggcaaatccgacaaatagcgtaacgcggagcagttcgggtcggtggtctatctatctcgctctaccggcgcttagcttttttagacaaagatagctagaccaccgtacttgatattggcgttacaccccgatgcattgagtggcatatgactagccagatctatagttaacatgtctctgttttactcgctaactaaattttgataatagggcttttcattcacagtcatttgtttcgagcttctgtcatgtgtcacataatattaatatatctacgtcatacgttattgatatataccaatgatacaaaccaaagacgtatggcgtagatatattaatgtatgtgacacatgacaggggctcgaaacaaatgacagtcgatgaaaagccctatatattggttaattgtcaattggtcaagtcgggcaattgtaaataaagagacaatgttgaagatatatttacaaagaactgaaaagacatgtgcagatagtatactgtataatattgtaagttaagtgttagtcttatgacattcttaaattcctcttacgacattcaatttaaaaagccttacttgtggaagactttgtttccagtgacatatgactaccaattgaaagcattttgttgattttcatataaaacaaatatgaaactgttatacaatgatgagcgcgctgataaccggtaaaataacgcacaagtatggaaaacacattgagttgtgagatggaaagaaatgaaactagtgaaggtgggagatttagcgataaagaggtgtaaattttcattctactaattgtttcccacctttagacgtatcggacgagtttggcaactgccactatgacagttttagttcatatacttctccgatatgtctaaaggtgggaaaaaataagtggagtgtaagtttataggtttttatcgctaaatctcccacctacactagttcatttctttttgtctcacaacttggtgtgttttccatcttttgcgttcttgtgtcggttattagcgcgctcatcaattgagcgcgctaataaccggcgcgcgtttatattggtcaattccttataaatcctttgcacttcattaaattttgacgttgtcatttttatacagcgttgtcatattgtggagtaggtaagtagaaaatgtcaggaattgtgaaatgaataatttaatttccattagagttcaatggttctttacagttttaaagttgtacatgatcggttacttacagttagttacacaaaactttgtgataataataaaaataaccgtcttgaataaaactcttgcaacagtaacaatagttcctataaataatttgcactccattaattaaaagtcaattgttttttcagcgatattgaatgtaaataattattgtttttactagacatttttctataaattttatttttgaaaatatgttaaaattgttaggtaatttcaaggacgatgtagaaatgttattgatcgcatgcaacagacataaaaggaaggtatatcaaaattttctattgtataaattttccagttagcttgtatattgtacattatttatatatattatattatattaatttttgtagaaaatatatacaaaatgataatgcacacttatttactttttaattcaaatttagtattaaaccattttacaattattataacaaatttatttttgcaaaaagaaagattacttatttaatctgtaactaaaactaaataaatattttaaaatctc

SEQ ID NO: 2074 - DNA, 2988 bp, Diabrotica virgifera
cagtgacacaacaccaaccggccctaaaacacaaaaaagcaagttcaatagcggaaccaaattcaaaattattttgcacatcatatttgaaacattatttggttaaaacatttcattcttgttggtaaaaaatgtattaatttctctggactaaattacgattctgttgatatccgagatacttggtcttcacacaatattaccaaactgaattttgttataatattcggtttaaattttctagccgatttccgagtctactaggcgagttctttcacaactgatgatggaagaatgttcgatgttcaatattaacgtttttatttgtgctgtttttcctcataagatgtctggcttttgctgtattggcgtaagaagcataatatagtgctgggcatgactacttcaatcacaccaaaaaaagtagtaagaaaatgagaactttagtaaaaatcattcacaccaattcataacgtctacaaccacactaaatattaagaataaatacgaacatatcgggcgtcaattgcatattgacgcgttaacagtgttgccatgttttaaggtgacaaatatgttttatagttgaattattaacttcttttataaaattttactagctggctttaataatttgatcacctactaaggaatagatacagattattgggtaattttttaaacaaactggaagaatcattgtacttgcttaataatgtactaataagcatgctatcaaatcactaatatgttaataattattcccatccctaatttttcatattactaaaagatgtgacacttttgttgtcttgctgtacagcttcatctaagtataaagtaaattatgaaagcgatcaaatcccctaatttttatgacttaacttaatactctggatatgcggtgagaattccttggaaacaggaaaactgagaataaacgtctttttgtataattagggcttattttcttattatacccccccccccccgcaaagtatccaattgtaattgttaaaatctttatatatttgtatataggttaggattaatcaaaaaaggctgtgtaatgtctctacatttaatatgtaggtgtttcaaaaaaaagggatattttttaaatatgtttatggcaatttcttaatatacacgagattgtacttcctggcatgtttagtctcaactcagaattttcctttggggtggggggttggcttggacacataattttttttaattttttttgtaaaaaacgaattacattttcctactattctttatatatttttatatgccctcgggggcgatggttaacccccaaaacaatgggtacgccactgtctcaactagccgagagtctggtgttttaccatagatataataacacgtagattaggcaaatccgacaaatagcgtaacgcggagaagttcgggtcggtggtctatctatctcgctctaccggcgcttagcttttttagacaaaaatagctagaccaccgtacttgatattggcgttacaccccaatgcattgagtggcatatgactagcaatatctatggttaacatgtctatgttttactcgctaactaaattgggataatatattggttaattgtcaattggtcaagtcgggcaattgtaaataaagagacaatgttgaagatatatttacaaagaactgaaaagacatgtgcagatagtatactgtataatattgtaagttaagtgttagtcttatgacattcttaaattcctcttacgacattcaatttaaaaagccttacttgtggaagactttgtttccagtgacatatgactaccaattgaaagcattttgttgattttcatataaaacaaatatgaaactgttatacaatgatgagcgcgctgataaccggtaaaataacgcacaagtatggaaaacacattgagttgtgagatggaaagaaatgaaactagtgaaggtgggagatttagcgataaagaggtgtaaattttcattctactaattgtttcccacctttagacgtatcggacgagtttggcaactgccactatgacagttttagttcatatacttctccgatatgtctaaaggtgggaaaaaataagtggagtgtaagtttataggtttttatcgctaaatctcccacctacactagttcatttctttttgtctcacaacttggtgtgttttccatcttttgcgttcttgtgtcggttattagcgcgctcatcaattgagcgcgctaataaccggcgcgcgtttatattggtcaattccttataaatcctttgcacttcattaaattttgacgttgtcatttttatacagcgttgtcatattgtggagtaggtaagtagaaaatgtcaggaattgtgaaatgaataatttaatttccattagagttcaatggttctttacagttttaaagttgtacatgatcggttacttacagttagttacacaaaactttgtgataataataaaaataaccgtcttgaataaaactcttgcaacgcaataaatataaaagtaacaatagttcctataaataatttgcactccattaattaaaagtcaattgttttttcagcgatattgaatgtaaataattattgttttttactagacattttttctataaattttattttttgaaaatatattaaaagtgtcaggtaatttcaaggacgatgtagaaatgttattgatcgcatgcaacagacataaaaggaaggtatatcaaaattttctattgtataaattttccagttagcttgtatattgtacattatttatatatattatattatattaatttttgtagaaaatatatacaaaatgataatgcacacttatttactttttaattcaaatttagtattaaaccattttacaattattataacaaatttatttttgcaaaaagaaagattacttatttaatctgtaactaaaactaaataaatattttaaaatctc

SEQ ID NO: 2075 - DNA, 2971 bp, Diabrotica virgifera
cagtgacacaacaccaaccggccctaaaacacaaaaaagcaagttcaatagcggaaccaaattcaaaattattttgcacatcatatttgaaacattatttggttaaaacatttcattcttgttggtaaaaaatgtattaatttctctggactaaattacgattctgttgatatccgagatacttggtcttcacacaatattaccaaactgaattttgttataatattcggtttaaattttctagccgatttccgagtctactaggcgagttctttcacaactgatgatggaagaatgttcgatgttcaatattaacgtttttatttgtgctgtttttcctcataagatgtctggcttttgctgtattggcgtaagaagcataatatagtgctgggcatgactacttcaatcacaccaaaaaaagtagtaagaaaatgagaactttagtaaaaatcattcacaccaattcataacgtctacaaccacactaaatattaagaataaatacgaacatatcgggcgtcaattgcatattgacgcgttaacagtgttgccatgttttaaggtgacaaatatgttttatagttgaattattaacttcttttataaaattttactagctggctttaataatttgatcacctactaaggaatagatacagattattgggtaattttttaaacaaactggaagaatcattgtacttgcttaataatgtactaataagcatgctatcaaatcactaatatgttaataattattcccatccctaatttttcatattactaaaagatgtgacacttttgttgtcttgctgtacagcttcatctaagtataaagtaaattatgaaagcgatcaaatcccctaatttttatgacttaacttaatactctggatatgcggtgagaattccttggaaacaggaaaactgagaataaacgtctttttgtataattagggcttattttcttattatacccccccccccccgcaaagtatccaattgtaattgttaaaatctttatatatttgtatataggttaggattaatcaaaaaaggctgtgtaatgtctctacatttaatatgtaggtgtttcaaaaaaaagggatattttttaaatatgtttatggcaatttcttaatatacacgagattgtacttcctggcatgtttagtctcaactcagaattttcctttggggtggggggttggcttggacacataattttttttaattttttttgtaaaaaacgaattacattttcctactattctttatatatttttatatgccctcgggggcgatggttaacccccaaaacaatgggtacgccactgtctcaactagccgagagtctggtgttttaccatagatataataacacgtagattaggcaaatccgacaaatagcgtaacgcggagaagttcgggtcggtggtctatctatctcgctctaccggcgcttagcttttttagacaaaaatagctagaccaccgtacttgatattggcgttacaccccaatgcattgagtggcatatgactagcaatatctatggttaacatgtctatgttttactcgctaactaaattgggataatatattggttaattgtcaattggtcaagtcgggcaattgtaaataaagagacaatgttgaagatatatttacaaagaactgaaaagacatgtgcagatagtatactgtataatattgtaagttaagtgttagtcttatgacattcttaaattcctcttacgacattcaatttaaaaagccttacttgtggaagactttgtttccagtgacatatgactaccaattgaaagcattttgttgattttcatataaaacaaatatgaaactgttatacaatgatgagcgcgctgataaccggtaaaataacgcacaagtatggaaaacacattgagttgtgagatggaaagaaatgaaactagtgaaggtgggagatttagcgataaagaggtgtaaattttcattctactaattgtttcccacctttagacgtatcggacgagtttggcaactgccactatgacagttttagttcatatacttctccgatatgtctaaaggtgggaaaaaataagtggagtgtaagtttataggtttttatcgctaaatctcccacctacactagttcatttctttttgtctcacaacttggtgtgttttccatcttttgcgttcttgtgtcggttattagcgcgctcatcaattgagcgcgctaataaccggcgcgcgtttatattggtcaattccttataaatcctttgcacttcattaaattttgacgttgtcatttttatacagcgttgtcatattgtggagtaggtaagtagaaaatgtcaggaattgtgaaatgaataatttaatttccattagagttcaatggttctttacagttttaaagttgtacatgatcggttacttacagttagttacacaaaactttgtgataataataaaaataaccgtcttgaataaaactcttgcaacagtaacaatagttcctataaataatttgcactccattaattaaaagtcaattgttttttcagcgatattgaatgtaaataattattgtttttactagacatttttctataaattttatttttgaaaatatgttaaaattgttaggtaatttcaaggacgatgtagaaatgttattgatcgcatgcaacagacataaaaggaaggtatatcaaaattttctattgtataaattttccagttagcttgtatattgtacattatttatatatattatattatattaatttttgtagaaaatatatacaaaatgataatgcacacttatttactttttaattcaaatttagtattaaaccattttacaattattataacaaatttatttttgcaaaaagaaagattacttatttaatctgtaactaaaactaaataaatattttaaaatctc

SEQ ID NO: 2076 - DNA, 2906 bp, Diabrotica virgifera
cagtgacacaacaccaaccggccctaaaacacaaaaaagcaagttcaatagcggaaccaaattcaaaattattttgcacatcatatttgaaacattatttggttaaaacatttcattcttgttggtaaaaaatgtattaatttctctggactaaattacgattctgttgatatccgagatacttggtcttcacacaatattaccaaactgaattttgttataatattcggtttaaattttctagccgatttccgagtctactaggcgagttctttcacaactgatgatggaagaatgttcgatgttcaatattaacgtttttatttgtgctggttttcctcataagatgtctggctttactttagtaaaaatcattcacaccaattcataacgtctacaaccacactaaatattaagaataaatacgaacatatcgggcgtcaattgcatattgacgcgttaacagtgttgccatgttttaaggtgacaaatatgttttatagttgaattattaacttcttttataaaattttactagctggctttaataatttgatcacctactaaggaatagatacagattattgggtaattttttaaacaaactggaagaatcattgtacttgcttaataatgtactaataagcatgctatcaaatcactaatatgttaataattattcccatccctaatttttcatattactaaaagatgtgacacttttgttgtcttgctgtacagcttcatctaagtataaagtaaattatgaaagcgatcaaatcccctaatttttatgacttaacttaatactctggatatgcggtgagaattccttggaaacaggaaaactgagaataaacgtctttttgtataattagggcttattttcttattatacccccccccccccgcaaagtatccaattgtaattgttaaaatctttatatatttgtatataggttaggattaatcaaaaaaggctgtgtaatgtctctacatttaatatgtaggtgtttcaaaaaaaagggatattttttaaatatgtttatggcaatttcttaatatacacgagattgtacttcctggcatgtttagtctcaactcagaattttcctttggggtggggggttggcttggacacataattttttttaattttttttgtaaaaaacgaattacattttcctactattctttatatatttttatatgccctcgggggcgatggttaacccccaaaacaatgggtacgccactgtctcaactagccgagagtctggtgttttaccatagatataataacacgtagattaggcaaatccgacaaatagcgtaacgcggagaagttcgggtcggtggtctatctatctcgctctaccggcgcttagcttttttagacaaaaatagctagaccaccgtacttgatattggcgttacaccccaatgcattgagtggcatatgactagcaatatctatggttaacatgtctatgttttactcgctaactaaattgggataatatattggttaattgtcaattggtcaagtcgggcaattgtaaataaagagacaatgttgaagatatatttacaaagaactgaaaagacatgtgcagatagtatactgtataatattgtaagttaagtgttagtcttatgacattcttaaattcctcttacgacattcaatttaaaaagccttacttgtggaagactttgtttccagtgacatatgactaccaattgaaagcattttgttgattttcatataaaacaaatatgaaactgttatacaatgatgagcgcgctgataaccggtaaaataacgcacaagtatggaaaacacattgagttgtgagatggaaagaaatgaaactagtgaaggtgggagatttagcgataaagaggtgtaaattttcattctactaattgtttcccacctttagacgtatcggacgagtttggcaactgccactatgacagttttagttcatatacttctccgatatgtctaaaggtgggaaaaaataagtggagtgtaagtttataggtttttatcgctaaatctcccacctacactagttcatttctttttgtctcacaacttggtgtgttttccatcttttgcgttcttgtgtcggttattagcgcgctcatcaattgagcgcgctaataaccggcgcgcgtttatattggtcaattccttataaatcctttgcacttcattaaattttgacgttgtcatttttatacagcgttgtcatattgtggagtaggtaagtagaaaatgtcaggaattgtgaaatgaataatttaatttccattagagttcaatggttctttacagttttaaagttgtacatgatcggttacttacagttagttacacaaaactttgtgataataataaaaataaccgtcttgaataaaactcttgcaacgcaataaatataaaagtaacaatagttcctataaataatttgcactccattaattaaaagtcaattgttttttcagcgatattgaatgtaaataattattgttttttactagacattttttctataaattttattttttgaaaatatattaaaagtgtcaggtaatttcaaggacgatgtagaaatgttattgatcgcatgcaacagacataaaaggaaggtatatcaaaattttctattgtataaattttccagttagcttgtatattgtacattatttatatatattatattatattaatttttgtagaaaatatatacaaaatgataatgcacacttatttactttttaattcaaatttagtattaaaccattttacaattattataacaaatttatttttgcaaaaagaaagattacttatttaatctgtaactaaaactaaataaatattttaaaatctc

SEQ ID NO: 2077 - DNA, 2889 bp, Diabrotica virgifera
cagtgacacaacaccaaccggccctaaaacacaaaaaagcaagttcaatagcggaaccaaattcaaaattattttgcacatcatatttgaaacattatttggttaaaacatttcattcttgttggtaaaaaatgtattaatttctctggactaaattacgattctgttgatatccgagatacttggtcttcacacaatattaccaaactgaattttgttataatattcggtttaaattttctagccgatttccgagtctactaggcgagttctttcacaactgatgatggaagaatgttcgatgttcaatattaacgtttttatttgtgctggttttcctcataagatgtctggctttactttagtaaaaatcattcacaccaattcataacgtctacaaccacactaaatattaagaataaatacgaacatatcgggcgtcaattgcatattgacgcgttaacagtgttgccatgttttaaggtgacaaatatgttttatagttgaattattaacttcttttataaaattttactagctggctttaataatttgatcacctactaaggaatagatacagattattgggtaattttttaaacaaactggaagaatcattgtacttgcttaataatgtactaataagcatgctatcaaatcactaatatgttaataattattcccatccctaatttttcatattactaaaagatgtgacacttttgttgtcttgctgtacagcttcatctaagtataaagtaaattatgaaagcgatcaaatcccctaatttttatgacttaacttaatactctggatatgcggtgagaattccttggaaacaggaaaactgagaataaacgtctttttgtataattagggcttattttcttattatacccccccccccccgcaaagtatccaattgtaattgttaaaatctttatatatttgtatataggttaggattaatcaaaaaaggctgtgtaatgtctctacatttaatatgtaggtgtttcaaaaaaaagggatattttttaaatatgtttatggcaatttcttaatatacacgagattgtacttcctggcatgtttagtctcaactcagaattttcctttggggtggggggttggcttggacacataattttttttaattttttttgtaaaaaacgaattacattttcctactattctttatatatttttatatgccctcgggggcgatggttaacccccaaaacaatgggtacgccactgtctcaactagccgagagtctggtgttttaccatagatataataacacgtagattaggcaaatccgacaaatagcgtaacgcggagaagttcgggtcggtggtctatctatctcgctctaccggcgcttagcttttttagacaaaaatagctagaccaccgtacttgatattggcgttacaccccaatgcattgagtggcatatgactagcaatatctatggttaacatgtctatgttttactcgctaactaaattgggataatatattggttaattgtcaattggtcaagtcgggcaattgtaaataaagagacaatgttgaagatatatttacaaagaactgaaaagacatgtgcagatagtatactgtataatattgtaagttaagtgttagtcttatgacattcttaaattcctcttacgacattcaatttaaaaagccttacttgtggaagactttgtttccagtgacatatgactaccaattgaaagcattttgttgattttcatataaaacaaatatgaaactgttatacaatgatgagcgcgctgataaccggtaaaataacgcacaagtatggaaaacacattgagttgtgagatggaaagaaatgaaactagtgaaggtgggagatttagcgataaagaggtgtaaattttcattctactaattgtttcccacctttagacgtatcggacgagtttggcaactgccactatgacagttttagttcatatacttctccgatatgtctaaaggtgggaaaaaataagtggagtgtaagtttataggtttttatcgctaaatctcccacctacactagttcatttctttttgtctcacaacttggtgtgttttccatcttttgcgttcttgtgtcggttattagcgcgctcatcaattgagcgcgctaataaccggcgcgcgtttatattggtcaattccttataaatcctttgcacttcattaaattttgacgttgtcatttttatacagcgttgtcatattgtggagtaggtaagtagaaaatgtcaggaattgtgaaatgaataatttaatttccattagagttcaatggttctttacagttttaaagttgtacatgatcggttacttacagttagttacacaaaactttgtgataataataaaaataaccgtcttgaataaaactcttgcaacagtaacaatagttcctataaataatttgcactccattaattaaaagtcaattgttttttcagcgatattgaatgtaaataattattgtttttactagacatttttctataaattttatttttgaaaatatgttaaaattgttaggtaatttcaaggacgatgtagaaatgttattgatcgcatgcaacagacataaaaggaaggtatatcaaaattttctattgtataaattttccagttagcttgtatattgtacattatttatatatattatattatattaatttttgtagaaaatatatacaaaatgataatgcacacttatttactttttaattcaaatttagtattaaaccattttacaattattataacaaatttatttttgcaaaaagaaagattacttatttaatctgtaactaaaactaaataaatattttaaaatctc

SEQ ID NO: 2078 - DNA, 2917 bp, Diabrotica virgifera
tgtttaacctttaactacacgcgctggcgtattttgtacgccagatataagaattctactgcaaatatatttaaaaatttaatttttgaccttgtttatctctctaacctatcactggaatgtgctttacaatttggttttagtttcgttataatcggcgttctggaaagatcgtaatttacattttattatttgttgtttccggtggtggacaatatacgccacgattatattaatataagtagtaatataagtacatatttcaattgttttttagtcattatggcacaaaatatattttctttataaacaatcctttttctcccgtaaaaaatcacatttcaaaaaatttttattaacaattttatttatcatggactccagttattccgtaattccagttataaatcccaattggcttactgagaaggaactccaagtattcactgatgccaaataaggtttataacaaacaactaagtgtattttttcaaaaaaaaaataaacaaatccgctgttattgtgtattttcttgtggcgtataaagtacgccacgcgtgtagttatgtcataacttgatgcgcgggtagttaaaggttaacggcgagcgaccggcaaatactagatatacctaaatacaatttatagataaagaacagattacacgaaaatatacgcaaacaatacacagtgtttcaatgtttcaaattatcaaaggtaaagcgattacaaatattgcaatttcgcattatacattatacaatgtctcacacagccaacggtgaatagacaataagaagtagcttgaaaacaaaaaacctctgttgttatagaacggcgagaggcagaaaatagataggtacctgtacagtaggtacataaatatagtttataataaaaaatccattacacgaaaatgtcgatatcctaacaatagatgtacactgtttcaaagcgttgtaatagtgaaataattgcagagtattttgttcaattgtttgaatagaatttcgtttcgacatgccgctttggggcccctgaatgtcgggggccccgtataattgatacggctgatacggcggtagctacgcctctgatcgtttggtattattccggtaacacaaaaattttgtttgcattgcattatacgggatgaatggaagggttgtatttcctcctaactttaaaagattctgtggaaaaatggaagggctggttttgtttcatagtcctgtcatattatcccagaggtatcactaaaattttgtgttctttgaattatccgaatatctctcttcttgtaagagctgtgccattttttgtaaataaaaacactgattgactcataaaatagaggttggattgataagattagaatggcccgcatgcagcccagatctcaatcctattgagcatttatgggatgaattaaaaagctattcgccgtcatcctaggcctccagaaaatttggtacagttatggccctggtagaggaatatcgggctattccccaggcaaggaaaacacatctttattcgatgctaaacagattgcgagcagtcgttgctgcaagaggtggacatacccgctatttatttgttttgttttgttgttaattttgttttgttttgttaattttagtacgtttgatatttttaattaaataaaccttcaacgcagtgtttttatttacagctcttacaagaaaagagatattcggataattcaaaaaacaaaatctcagtaatacctccaggataatacaaaagaagtgtcagccctccaatttttccacagaattttttaaagttaagagaaataacaacacttccattcattccagtacaatgccatacaagcaaaaaaatttgttacctgaataataacaaacgacatcaatacatgtatgtacctacaaactgatgcaaaaatcttgaaaatcggggcacaaataataaagttacagattgtcaaactcaatcaaaaattttgggtggcggaaccttgcgccgatgagtgtatattgttgagtttctagttctattattacccattatccatatcatacgtttgaattaaattaagttaaatataccttataaataattatttcaaaaaaatgtaacaagaatacattttctaatcatctataaacttcacactcaaataaattacttttaaatttcattgcgtattttcaatatttcctttttttttattatttataccaattcaaatattctacatttctaatatttattccctgtttagtttttaattgaaaatatcacacaacttgtatcacagtaatgcataatcctttctaataagaatggtggctttcaatatatcattgtttaattttaacggttttaattatattaaatatgaaataatcattatatcgaatttgtctttaatttaaaatttaatttcaattaatgacaaattccgtgagtccgaaaactttttattgtggcactactgtcagattttttccaaatatatttaagaacataaaccatcaattgtatcgtattttatacccaaaccacataaactacctagtatttatctatttaaggggctatcctaatgtaaaagcacgaaattcatatacttcctttgggaatttccaaaataaaaagcactgcacaaattgctttgaaaatttgcatgagcacccattataaaaagacgaacatgtaaaacaattttcataaaaaaatattaaaaattaaacgatttatgcgccatctactggcaccgtgaaaacaaaaacatgactccactgctgcagtgattgagactaatagagatcctgaaacataaaatttcaaagtgattattgaaatataagttatttcccataccatcaactaggattttgaaaaatattaaaatttgaaaaaatga

SEQ ID NO: 2079 - DNA, 2539 bp, Diabrotica virgifera
tttaaataaattgcaaattgcataatacaaccttaggaactaataagttcagcgtatgacactcaaatatagataataataatatatctaataaatctaataatccaaagtcgaaaaacagatttgaattgagactcattgttttaaaacagattcagttttttcaagccaagggtaatggacattgaaaatgaacgtaaacaaagaagctctgttactttaacggcgagcgaccggcaaatactagatatacctaaatacaatttatagataaagaacagattacacgaaaatatacgcaaacaatacacagtgtttcaatgtttcaaattatcaaaggtaaagcgattacaaatattgcaatttcgcattatacattatacaatgtctcacacagccaacggtgaatagacaataagaagtagcttgaaaacaaaaaacctctgttgttatagaacggcgagaggcagaaaatagataggtacctgtacagtaggtacataaatatagtttataataaaaaatccattacacgaaaatgtcgatatcctaacaatagatgtacactgtttcaaagcgttgtaatagtgaaataattgcagagtattttgttcaattgtttgaatagaatttcgtttcgacatgccgctttggggcccctgaatgtcgggggccccgtataattgatacggctgatacggcggtagctacgcctctgatcgtttggtattattccggtaacacaaaaattttgtttgcattgcattatacgggatgaatggaagggttgtatttcctcctaactttaaaagattctgtggaaaaatggaagggctggttttgtttcatagtcctgtcatattatcccagaggtatcactaaaattttgtgttctttgaattatccgaatatctctcttcttgtaagagctgtgccattttttgtaaataaaaacactgattgactcataaaatagaggttggattgataagattagaatggcccgcatgcagcccagatctcaatcctattgagcatttatgggatgaattaaaaagctattcgccgtcatcctaggcctccagaaaatttggtacagttatggccctggtagaggaatatcgggctattccccaggcaaggaaaacacatctttattcgatgctaaacagattgcgagcagtcgttgctgcaagaggtggacatacccgctatttatttgttttgttttgttgttaattttgttttgttttgttaattttagtacgtttgatatttttaattaaataaaccttcaacgcagtgtttttatttacagctcttacaagaaaagagatattcggataattcaaaaaacaaaatctcagtaatacctccaggataatacaaaagaagtgtcagccctccaatttttccacagaattttttaaagttaagagaaataacaacacttccattcattccagtacaatgccatacaagcaaaaaaatttgttacctgaataataacaaacgacatcaatacatgtatgtacctacaaactgatgcaaaaatcttgaaaatcggggcacaaataataaagttacagattgtcaaactcaatcaaaaattttgggtggcggaaccttgcgccgatgagtgtatattgttgagtttctagttctattattacccattatccatatcatacgtttgaattaaattaagttaaatataccttataaataattatttcaaaaaaatgtaacaagaatacattttctaatcatctataaacttcacactcaaataaattacttttaaatttcattgcgtattttcaatatttcctttttttttattatttataccaattcaaatattctacatttctaatatttattccctgtttagtttttaattgaaaatatcacacaacttgtatcacagtaatgcataatcctttctaataagaatggtggctttcaatatatcattgtttaattttaacggttttaattatattaaatatgaaataatcattatatcgaatttgtctttaatttaaaatttaatttcaattaatgacaaattccgtgagtccgaaaactttttattgtggcactactgtcagattttttccaaatatatttaagaacataaaccatcaattgtatcgtattttatacccaaaccacataaactacctagtatttatctatttaaggggctatcctaatgtaaaagcacgaaattcatatacttcctttgggaatttccaaaataaaaagcactgcacaaattgctttgaaaatttgcatgagcacccattataaaaagacgaacatgtaaaacaattttcataaaaaaatattaaaaattaaacgatttatgcgccatctactggcaccgtgaaaacaaaaacatgactccactgctgcagtgattgagactaatagagatcctgaaacataaaatttcaaagtgattattgaaatataagttatttcccataccatcaactaggattttgaaaaatattaaaatttgaaaaaatga

SEQ ID NO: 2080 - DNA, 1957 bp, Diabrotica virgifera
tgatattattgaagctacactcaccggcacaaaattccgccacccaaaactccgattaagtttgacaatccatgacttaaccatttatgctccgaccctcaagattcttgcaccagcttgcaggtacatgtattcatattgtttggtattattccggcaacaaaaaatcttgcttgcatgtcattgtacaggggtgaaaggaagcgttgcattttctcccaactttaaaaaattctgtggaaaaatggaatagctgattttgtttcatagtcctgtcatattttcccggaggcatcaccaacattttgttttttgaattatccgaatatctctttttcttgtaagagctgtaccattttttgtaaataaaaacactgattgactcataaaatagaggttggattgataagattagaatggcccgcatgcagcccagatctcaatcctattgagcatttatgggatgaattaaaaagctattcgccgtcatcctaggcctccagaaaatttggtacagttatggccctggtagaggaatatcgggctattccccaggcaaggaaaacacatctttattcgatgctaaacagattgcgagcagtcgttgctgcaagaggtggacatacccgctatttatttgttttgttttgttgttaattttgttttgttttgttaattttagtacgtttgatatttttaattaaataaaccttcaacgcagtgtttttatttacagctcttacaagaaaagagatattcggataattcaaaaaacaaaatctcagtaatacctccaggataatacaaaagaagtgtcagccctccaatttttccacagaattttttaaagttaagagaaataacaacacttccattcattccagtacaatgccatacaagcaaaaaaatttgttacctgaataataacaaacgacatcaatacatgtatgtacctacaaactgatgcaaaaatcttgaaaatcggggcacaaataataaagttacagattgtcaaactcaatcaaaaattttgggtggcggaaccttgcgccgatgagtgtatattgttgagtttctagttctattattacccattatccatatcatacgtttgaattaaattaagttaaatataccttataaataattatttcaaaaaaatgtaacaagaatacattttctaatcatctataaacttcacactcaaataaattacttttaaatttcattgcgtattttcaatatttcctttttttttattatttataccaattcaaatattctacatttctaatatttattccctgtttagtttttaattgaaaatatcacacaacttgtatcacagtaatgcataatcctttctaataagaatggtggctttcaatatatcattgtttaattttaacggttttaattatattaaatatgaaataatcattatatcgaatttgtctttaatttaaaatttaatttcaattaatgacaaattccgtgagtccgaaaactttttattgtggcactactgtcagattttttccaaatatatttaagaacataaaccatcaattgtatcgtattttatacccaaaccacataaactacctagtatttatctatttaaggggctatcctaatgtaaaagcacgaaattcatatacttcctttgggaatttccaaaataaaaagcactgcacaaattgctttgaaaatttgcatgagcacccattataaaaagacgaacatgtaaaacaattttcataaaaaaatattaaaaattaaacgatttatgcgccatctactggcaccgtgaaaacaaaaacatgactccactgctgcagtgattgagactaatagagatcctgaaacataaaatttcaaagtgattattgaaatataagttatttcccataccatcaactaggattttgaaaaatattaaaatttgaaaaaatga

SEQ ID NO: 2081 - DNA, 1858 bp, Diabrotica virgifera
caagattcccgcaccagcctgtagctacatgcattgatattgttgtactattccggtacaaaaaaattctgcttgcatggcattatgcaggggtgaatggaagcgttgtactctctcccaattttaaaaaaattctttggaaaaatagaatagctgattttgtttcatagtcctgtcatattatcccagaggtatcactaaaattttgtgttctttgaattatccgaatatctctcttcttgtaagagctgtgccattttttgtaaataaaaacactgattgactcataaaatagaggttggattgataagattagaatggcccgcatgcagcccagatctcaatcctattgagcatttatgggatgaattaaaaagctattcgccgtcatcctaggcctccagaaaatttggtacagttatggccctggtagaggaatatcgggctattccccaggcaaggaaaacacatctttattcgatgctaaacagattgcgagcagtcgttgctgcaagaggtggacatacccgctatttatttgttttgttttgttgttaattttgttttgttttgttaattttagtacgtttgatatttttaattaaataaaccttcaacgcagtgtttttatttacagctcttacaagaaaagagatattcggataattcaaaaaacaaaatctcagtaatacctccaggataatacaaaagaagtgtcagccctccaatttttccacagaattttttaaagttaagagaaataacaacacttccattcattccagtacaatgccatacaagcaaaaaaatttgttacctgaataataacaaacgacatcaatacatgtatgtacctacaaactgatgcaaaaatcttgaaaatcggggcacaaataataaagttacagattgtcaaactcaatcaaaaattttgggtggcggaaccttgcgccgatgagtgtatattgttgagtttctagttctattattacccattatccatatcatacgtttgaattaaattaagttaaatataccttataaataattatttcaaaaaaatgtaacaagaatacattttctaatcatctataaacttcacactcaaataaattacttttaaatttcattgcgtattttcaatatttcctttttttttattatttataccaattcaaatattctacatttctaatatttattccctgtttagtttttaattgaaaatatcacacaacttgtatcacagtaatgcataatcctttctaataagaatggtggctttcaatatatcattgtttaattttaacggttttaattatattaaatatgaaataatcattatatcgaatttgtctttaatttaaaatttaatttcaattaatgacaaattccgtgagtccgaaaactttttattgtggcactactgtcagattttttccaaatatatttaagaacataaaccatcaattgtatcgtattttatacccaaaccacataaactacctagtatttatctatttaaggggctatcctaatgtaaaagcacgaaattcatatacttcctttgggaatttccaaaataaaaagcactgcacaaattgctttgaaaatttgcatgagcacccattataaaaagacgaacatgtaaaacaattttcataaaaaaatattaaaaattaaacgatttatgcgccatctactggcaccgtgaaaacaaaaacatgactccactgctgcagtgattgagactaatagagatcctgaaacataaaatttcaaagtgattattgaaatataagttatttcccataccatcaactaggattttgaaaaatattaaaatttgaaaaaatga

SEQ ID NO: 2082 - DNA, 1821 bp, Diabrotica virgifera
tgtttaacctttaactacacgcgctggcgtattttgtacgccagatataagaattctactgcaaatatatttaaaaatttaatttttgaccttgtttatctctctaacctatcactggaatgtgctttacaatttggttttagtttcgttataatcggcgttctggaaagatcgtaatttacattttattatttgttgtttccggtggtggacaatatacgccacgattatattaatataagtagtaatataagtacatatttcaattgttttttagtcattatggcacaaaatatattttctttataaacaatcctttttctcccgtaaaaaatcacatttcaaaaaatttttattaacaattttatttatcatggactccagttattccgtaattccagttataaatcccaattggcttactgagaaggaactccaagtattcactgatgccaaataaggtttataacaaacaactaagtgtattttttcaaaaaaaaaataaacaaatccgctgttattgtgtattttcttgtggcgtataaagtacgccacgcgtgtagttatgtcataacttgatgcgcgggtagttaaaggttaacggcgagcgaccggcaaatactagatatacctaaatacaatttatagataaagaacagattacacgaaaatatacgcaaacaatacacagtgtttcaatgtttcaaattatcaaaggtaaagcgattacaaatattgcaatttcgcattatacattatacaatgtctcacacagccaacggtgaatagacaataagaagtagcttgaaaacaaaaaacctctgttgttatagaacggcgagaggcagaaaatagataggtacctgtacagtaggtacataaatatagtttataataaaaaatccattacacgaaaatgtcgatatcctaacaatagatgtacactgtttcaaagcgttgtaatagtgaaataattgcagagtattttgttcaattgtttgaatagaatttcgtttcgacatgccgctttggggcccctgaatgtcgggggccccgtataattgatacggctgatacggcggtagctacgcctctgatcgtttggtattattccggtaacacaaaaattttgtttgcattgcattatacgggatgaatggaagggttgtatttcctcctaactttaaaagattctgtggaaaaatggaagggctggttttgtttcatagtcctgtcatattatcccagaggtatcactaaaattttgtgttctttgaattatccgaatatctctcttcttgtaagagctgtgccattttttgtaaataaaaacactgattgactcataaaatagaggttggattgataagattagaatggcccgcatgcagcccagatctcaatcctattgagcatttatgggatgaattaaaaaaagctattcgccgtcatcctgggcctccagaaactttggtacagttatggccctggtagaggaatatcggactattcccgaggcaagaataacacatatttattcgatgccaaacagatcgcgagcagtcgttgctgcaaagaggtaggacatacccgctattgaattgtttggttttgttgttaattttgtgttgttttgttaattttagtgagtttgatattttttaatcaaaaaaaccttcaaagctgtgtttttctttacagctcttacaagaaaagagatatttagataattcaaaaaacaaaacctcagtgatacttccaggacaatacaaaaagagtatgaaacaaaatcagcgatcaaaatttttccacagaactatt

SEQ ID NO: 2083 - DNA, 1525 bp, Diabrotica virgifera
tgtttaacctttaactacacgcgctggcgtattttgtacgccagatataagaattctactgcaaatatatttaaaaatttaatttttgaccttgtttatctctctaacctatcactggaatgtgctttacaatttggttttagtttcgttataatcggcgttctggaaagatcgtaatttacattttattatttgttgtttccggtggtggacaatatacgccacgattatattaatataagtagtaatataagtacatatttcaattgttttttagtcattatggcaaaaaatatattttctttgtaaacaatactttttctcctgtaaaaaatcacatttaaaaaaattttttattagtaattttatttatcatggaatccagttattccatgattccagttataaatcccaattggcttactgaaaaggaactccaagtattcactgatgccgaataaggtttataacaaacaactaagtgtattttttcaaaaaaaaattaaacaaatccgctgtttttaagtgtattttcttgtggcgtacaaagtacgccacgcgtgtagttatgttataacttgatgcgcgggtagttaaaggttaaatattgattttagcaaaatacgaaacagatcaaaattgtatttaatttaattctctcaatttttgtataggtacatttttgttgtaaaactaataacaaacgaaataattcaataactataatctaactgtcactatttcccacaatttcagcccttacactttttgtcgaaaaggcggagaaaatggtggagatattgagcaaaaccggttctcctttaaaatcaagatggcggctaatgcaacggcggaattcattcgccattttaaatttaaactactatcgatccccctaaacagggccgctttatccattaggcaatatatgcagttgcctagggcggcaaattatgaaagggcggcaaaagtacggtacaaaaaaaatggtacatgtttgaagggctgctactagagaattgcctagggtgtcaattgacctaaatgtggtcctgccccctaaagcttaaaaaataaaattttggttagctcggcatgcatgatcaagtgctatcccgagtggactacatagttttgactctgatactattgcatgcaacttttcttgtattgcaaaactatacaaattcttttaaccacttaaagtcctgtgctttgtccatctgtgagcaaatttcagcgaaatcgaagggcacgtattttgggaatggaggaaactgcaaaaaccggtattttaagattttccacactaaaattggatcaaaaacttgttttgaatcaaaacaacttattataatgtctaataatgacattttggagtcccttttattaaacattattttttccatcgatactttgcgacaaaaaaatgcaaatttgtttaaataaatcacaaatactgtaaaaacgctaaaaatgatattttcagaaaaaaaaagcagaagaagacggttcgaccctttaa

SEQ ID NO: 2084 - DNA, 1443 bp, Diabrotica virgifera
tttaaataaattgcaaattgcataatacaaccttaggaactaataagttcagcgtatgacactcaaatatagataataataatatatctaataaatctaataatccaaagtcgaaaaacagatttgaattgagactcattgttttaaaacagattcagttttttcaagccaagggtaatggacattgaaaatgaacgtaaacaaagaagctctgttactttaacggcgagcgaccggcaaatactagatatacctaaatacaatttatagataaagaacagattacacgaaaatatacgcaaacaatacacagtgtttcaatgtttcaaattatcaaaggtaaagcgattacaaatattgcaatttcgcattatacattatacaatgtctcacacagccaacggtgaatagacaataagaagtagcttgaaaacaaaaaacctctgttgttatagaacggcgagaggcagaaaatagataggtacctgtacagtaggtacataaatatagtttataataaaaaatccattacacgaaaatgtcgatatcctaacaatagatgtacactgtttcaaagcgttgtaatagtgaaataattgcagagtattttgttcaattgtttgaatagaatttcgtttcgacatgccgctttggggcccctgaatgtcgggggccccgtataattgatacggctgatacggcggtagctacgcctctgatcgtttggtattattccggtaacacaaaaattttgtttgcattgcattatacgggatgaatggaagggttgtatttcctcctaactttaaaagattctgtggaaaaatggaagggctggttttgtttcatagtcctgtcatattatcccagaggtatcactaaaattttgtgttctttgaattatccgaatatctctcttcttgtaagagctgtgccattttttgtaaataaaaacactgattgactcataaaatagaggttggattgataagattagaatggcccgcatgcagcccagatctcaatcctattgagcatttatgggatgaattaaaaaaagctattcgccgtcatcctgggcctccagaaactttggtacagttatggccctggtagaggaatatcggactattcccgaggcaagaataacacatatttattcgatgccaaacagatcgcgagcagtcgttgctgcaaagaggtaggacatacccgctattgaattgtttggttttgttgttaattttgtgttgttttgttaattttagtgagtttgatattttttaatcaaaaaaaccttcaaagctgtgtttttctttacagctcttacaagaaaagagatatttagataattcaaaaaacaaaacctcagtgatacttccaggacaatacaaaaagagtatgaaacaaaatcagcgatcaaaatttttccacagaactatt

SEQ ID NO: 2085 - DNA, 762 bp, Diabrotica virgifera
caagattcccgcaccagcctgtagctacatgcattgatattgttgtactattccggtacaaaaaaattctgcttgcatggcattatgcaggggtgaatggaagcgttgtactctctcccaattttaaaaaaattctttggaaaaatagaatagctgattttgtttcatagtcctgtcatattatcccagaggtatcactaaaattttgtgttctttgaattatccgaatatctctcttcttgtaagagctgtgccattttttgtaaataaaaacactgattgactcataaaatagaggttggattgataagattagaatggcccgcatgcagcccagatctcaatcctattgagcatttatgggatgaattaaaaaaagctattcgccgtcatcctgggcctccagaaactttggtacagttatggccctggtagaggaatatcggactattcccgaggcaagaataacacatatttattcgatgccaaacagatcgcgagcagtcgttgctgcaaagaggtaggacatacccgctattgaattgtttggttttgttgttaattttgtgttgttttgttaattttagtgagtttgatattttttaatcaaaaaaaccttcaaagctgtgtttttctttacagctcttacaagaaaagagatatttagataattcaaaaaacaaaacctcagtgatacttccaggacaatacaaaaagagtatgaaacaaaatcagcgatcaaaatttttccacagaactatt

SEQ ID NO: 2086 - DNA, 2749 bp, Diabrotica virgifera
ccaattaaacacttttacttataaagttatacattaaaatattgctgaaaaattgcatctcatattttctcctcatctacactaattttgttcaaatagtctatatcggtcatattaaggtaatcttcctcatctggttctaaatctcctgcaacttcatctaaacatttgatatgttttgtaatgtacttaccataataatttttcctgcattcataggattataatttagtcgctttaacaaacatcttgttttgaacaccacttaatttttcaatcacatttctaggttcctacttcttattaaatggtagttaatcacttccaggtccaggtcaattactttttgtttttgttgtaatctgaattcagctctacaaaaagaaacaaaaatttgaaatttgttatacctagatgttagatttggtgttagtatgtcgattgtaaagtaaattgagacttacctttcatgattatttattacttctccaaatacattataaaaggacattatttaccatttttaaatgtttatctccaatataatacataaatagcaaactattattcattattcatataaataaggactaaataagtcctattcatataaataaggactaaataggtcctattcatataaataggacctaaatatccgagaattataaatcctagacaagcaagatactctaaaacttccagaaagttgaatatttcttgaataattctctggatgacacttgtcctcatgaagtgaaaatcaaaagtgaacaaaaatgacactagacaggttaaagacaaaaagatgacacttactagacaggtagcaatttatacctaaagcctacttcatgcctgatttcctatatgatttcggacttaaaaatggcttgatatcagctaatatttaagacaatatagaagcttgatttttataattgtttagaccagtacttgtgagaataaagcaaaaattatgacaatctgattattaaaaatcgttcctagttgcttagcgacttttaacccgtaacaacataaccaaacaaaaataatcaaaccacatttaacggactgctaaaaatttagcgggcacgttttgacatcatctaaaatattttgatttagcgggggttttaacggtttaggttaacggatgcataatttacagaataccaacatatttttagcgggcgctaaaattttagagacctctgaaatttggcggaagtgttacagaatacacccctatttgtcctacggtaggtccaaggaattcgtaacattcgtttctaacataaaatttcagtggcgtctatctttcttcttttcgattgtatcaaggtccaagagaaggtttttgagaatctacctcttacctaatttatttctccagctgccgtatggtccatggattatgaacaccctgtatatccaatcgactctcatacaatttccaaccgtgcctgtatattaatcacaatctatatacagtatgtaaatcgttcagctggacgtagggaatatacattgagagaattgtggcaactgcgctaacctgtgttagttgaagcttctgttcgagtacgagtttttggtgcaatagagctgttagaatgaacagaatgagtagttttgaagcaaggctgtccataaatatatcaaaaacaaagtttatgattaattgagttaataattttactttaatttttaaagtattttttatttaaaaactaatttcaaaactaaacagttttcccattcccttacgccaaaaatattaagcattacattgtcatattttgacgtttatttgtgtccgtcgaaatgagttgtcaattttgaggttaatgtctcttaatgctaacaaccgtattgtcatcgagagagctcagttgccacaattgtctcaatataatacaatgtatgtatttatgtatctaaatataatatacaatgtatgttccctatgtccagctgaacgatttacgtactgtatatacatataaatttatatatacacattatatatacatataaatttatatacatatttgataaacccttaaatcattcatccataactagatggcctatacgcattctcactaaattgggtcatgttctcatgcaaattacatggaataaacactgcaacattaagacagatgaaaaacaaaatggaatattcaacactatgaaggaaagaaaaatgaattactttggtcacatactaagaactgaaaaatatgagttgattcgattggttttaagttgaaagcagtggagtgaaaaaacaacaatagaaccgaagcagacagagtaaaaaaacgacaatgtccttaaacgatgaggcacatgaagaagataattaccgtattggagctactacagtctattccatgaatatacgactgttttggatcatcaggacaacgaatatattactgtgcaacattagaagtacaaaaataaattgctttaattattccaataaaaagaatgggatttttaagaaatattcttattttcatatgttgcacagtaaaatattcgttgacagtcatacattcatgaaatggactatacataacttttgacgacaaaactatattttcgctagaaaatccattattttttttgtttggatatgaacaatgtatttgaaaagacaaatatttgaatgataatgtggaatgtgcgtaatatactaaataaaaaagtgatagataatgaagatggatag

SEQ ID NO: 2087 - DNA, 1727 bp, Diabrotica virgifera
ccaattaaacacttttacttataaagttatacattaaaatattgctgaaaaattgcatctcatattttctcctcatctacactaattttgttcaaatagtctatatcggtcatattaaggtaatcttcctcatctggttctaaatctcctgcaacttcatctaaacatttgatatgttttgtaatgtacttaccataataatttttcctgcattcataggattataatttagtcgctttaacaaacatcttgttttgaacaccacttaatttttcaatcacatttctaggttcctacttcttattaaatggtagttaatcacttccaggtccaggtcaattactttttgtttttgttgtaatctgaattcagctctacaaaaagaaacaaaaatttgaaatttgttatacctagatgttagatttggtgttagtatgtcgattgtaaagtaaattgagacttacctttcatgattatttattacttctccaaatacattataaaaggacattatttaccatttttaaatgtttatctccaatataatacataaatagcaaactattattcattattcatataaataaggactaaataagtcctattcatataaataaggactaaataggtcctattcatataaataggacctaaatatccgagaattataaatcctagacaagcaagatactctaaaacttccagaaagttgaatatttcttgaataattctctggatgacacttgtcctcatgaagtgaaaatcaaaagtgaacaaaaatgacactagacaggttaaagacaaaaagatgacacttactagacaggtagcaatttatacctaaagcctacttcatgcctgatttcctatatgatttcggacttaaaaatggcttgatatcagctaatatttaagacaatatagaagcttgatttttataattgtttagaccagtacttgtgagaataaagcaaaaattatgacaatctgattattaaaaatcgttcctagttgcttagcgacttttaacccgtaacaacataaccaaacaaaaataatcaaaccacatttaacggactgctaaaaatttagcgggcacgttttgacatcatctaaaatattttgatttagcgggggttttaacggtttaggttaacggatgcataatttacagaataccaacatatttttagcgggcgctaaaattttagagacctctgaaatttggcggaagtgttacagaatacacccctatttgtcctacggtaggtccaaggaattcgtaacattcgtttctaacataaaatttcagtggcgtctatctttcttcttttcgattgtatcaaggtccaagagaaggtttttgagaatctacctcttacctaatttatttctccagctgccgtatggtccatggattatgaacaccctgtatatccaatcgactctcatacaatttccaaccgtgcctgtatattaatcacaatctatatacagtatgtaaatcgttcagctggacgtagggaatatacattgagagaattgtggcaactgcgctaacctgtgttagttgaagcttctgttcgagtacgagtttttggtgcaatagagctgttagaatgaacagaatgagtagttttgaagcaaggctgtccataaatatatcaaaaacaaagtttatgattaattgagttaataattttactttaatttttaaagtatttttt

SEQ ID NO: 2088 - DNA, 1547 bp, Diabrotica virgifera
gaatagactaggcatggtaggcaaaatagtgtaacgcggagcagtcggtagtaagtcgatacatctccctttttcctcgcgataccgcatatgtgacagacaaagatggttacaccacgcaaagtgaacattgaccaataacgtccttgatattggcgttacacctcgatgctcagagcggtccatacctaccttgtctattcttattatgtctgtggttcgacctctagaatatttttcaaacagcatacaggattactggttgcctatatttgaaacaacagaaatcatacagtacgtaaatcgttcagctggacgtagggaatatacattgagagaattgtggcaactgcgctaacctgtgttagttgaagcttctgttcgagtacgagtttttggtgcaatagagctgttagaatgaacagaatgagtagttttgaagcaaggctgtccataaatatatcaaaaacaaagtttatgattaattgagttaataattttactttaatttttaaagtattttttatttaaaaactaatttcaaaactaaacagttttcccattcccttacgccaaaaatattaagcattacattgtcatattttgacgtttatttgtgtccgtcgaaatgagttgtcaattttgaggttaatgtctcttaatgctaacaaccgtattgtcatcgagagagctcagttgccacaattgtctcaatataatacaatgtatgtatttatgtatctaaatataatatacaatgtatgttccctatgtccagctgaacgatttacgtactgtatatacatataaatttatatatacacattatatatacatataaatttatatacatatttgataaacccttaaatcattcatccataactagatggcctatacgcattctcactaaattgggtcatgttctcatgcaaattacatggaataaacactgcaacattaagacagatgaaaaacaaaatggaatattcaacactatgaaggaaagaaaaatgaattactttggtcacatactaagaactgaaaaatatgagttgattcgattggttttaagttgaaagcagtggagtgaaaaaacaacaatagaaccgaagcagacagagtaaaaaaacgacaatgtccttaaacgatgaggcacatgaagaagataattaccgtattggagctactacagtctattccatgaatatacgactgttttggatcatcaggacaacgaatatattactgtgcaacattagaagtacaaaaataaattgctttaattattccaataaaaagaatgggatttttaagaaatattcttattttcatatgttgcacagtaaaatattcgttgacagtcatacattcatgaaatggactatacataacttttgacgacaaaactatattttcgctagaaaatccattattttttttgtttggatatgaacaatgtatttgaaaagacaaatatttgaatgataatgtggaatgtgcgtaatatactaaataaaaaagtgatagataatgaagatggatag

SEQ ID NO: 2089 - DNA, 1495 bp, Diabrotica virgifera
ctaaatcatccaatttatgtatgtatcagcgcaactaaggtttgaaaataatagtgtttttagtaaatatatttattataatttttgtgtctttgtctttggatttgtcttccttgggagtaagataataagtattttaaacatttttatatttaatacttcacttgatctatttgtcaccgtcgtttgtaattacgtcccagaagccgtaaaaacaaaaccctggtgggttatcggtagagcattcgactgcataacgcgaaggtcccgggttcaaatcctgacacggacgattgttaccctttttttttggtgttgttttaataaaatttttttgaaagtggtaatatcaaaattagtttattaattaaataaaatacaaataaacttttaagtatatttatttcgttgaaatcatataatagaagtataacttcttacttgcgtacaaagtacacacactttcttttttatttaaaaactaatttcagaactaaacagttttcccattccgttagaccaaaatatttagctactacattgtgatattttgacgtttatttgtgtcagtcgaaatgagtttgtcaatcttgaggttaatgccccttaatgctaacaaccatattgtcatcgagagagctcagttgccacaattgtctcaatataatacaatgtatgtatttatgtatctaaatataatatacaatgtatgttccctatgtccagctgaacgatttacgtactgtatatacatataaatttatatatacacattatatatacatataaatttatatacatatttgataaacccttaaatcattcatccataactagatggcctatacgcattctcactaaattgggtcatgttctcatgcaaattacatggaataaacactgcaacattaagacagatgaaaaacaaaatggaatattcaacactatgaaggaaagaaaaatgaattactttggtcacatactaagaactgaaaaatatgagttgattcgattggttttaagttgaaagcagtggagtgaaaaaacaacaatagaaccgaagcagacagagtaaaaaaacgacaatgtccttaaacgatgaggcacatgaagaagataattaccgtattggagctactacagtctattccatgaatatacgactgttttggatcatcaggacaacgaatatattactgtgcaacattagaagtacaaaaataaattgctttaattattccaataaaaagaatgggatttttaagaaatattcttattttcatatgttgcacagtaaaatattcgttgacagtcatacattcatgaaatggactatacataacttttgacgacaaaactatattttcgctagaaaatccattattttttttgtttggatatgaacaatgtatttgaaaagacaaatatttgaatgataatgtggaatgtgcgtaatatactaaataaaaaagtgatagataatgaagatggatag

SEQ ID NO: 2090 - DNA, 1495 bp, Diabrotica virgifera
ctaaatcatccaatttatgtatgtatcagcgcaactaaggtttgaaaataatagtgtttttagtaaatatatttattataatttttgtgtctttgtctttggatttgtcttccttgggagtaagataataagtattttaaacatttttatatttaatacttcacttgatctatttgtcaccgtcgtttgtaattacgtcccagaagccgtaaaaacaaaaccctggtgggttatcggtagagcattcgactgcataacgcgaaggtcccgggttcaaatcctgacacggacgattgttaccctttttttttggtgttgttttaataaaatttttttgaaagtggtaatatcaaaattagtttattaattaaataaaatacaaataaacttttaagtatatttatttcgttgaaatcatataatagaagtataacttcttacttgcgtacaaagtacacacactttcttttttatttaaaaaactaatttcaaaactaaacagttttcccattcccttacgccaaaaatattaagcattacattgtcatattttgacgtttatttgtgtccgtcgaaatgagttgtcaattttgaggttaatgtctcttaatgctaacaaccgtattgtcatcgagagagctcagttgccacaattgtctcaatataatacaatgtatgtatttatgtatctaaatataatatacaatgtatgttccctatgtccagctgaacgatttacgtactgtatatacatataaatttatatatacacattatatatacatataaatttatatacatatttgataaacccttaaatcattcatccataactagatggcctatacgcattctcactaaattgggtcatgttctcatgcaaattacatggaataaacactgcaacattaagacagatgaaaaacaaaatggaatattcaacactatgaaggaaagaaaaatgaattactttggtcacatactaagaactgaaaaatatgagttgattcgattggttttaagttgaaagcagtggagtgaaaaaacaacaatagaaccgaagcagacagagtaaaaaaacgacaatgtccttaaacgatgaggcacatgaagaagataattaccgtattggagctactacagtctattccatgaatatacgactgttttggatcatcaggacaacgaatatattactgtgcaacattagaagtacaaaaataaattgctttaattattccaataaaaagaatgggatttttaagaaatattcttattttcatatgttgcacagtaaaatattcgttgacagtcatacattcatgaaatggactatacataacttttgacgacaaaactatattttcgctagaaaatccattattttttttgtttggatatgaacaatgtatttgaaaagacaaatatttgaatgataatgtggaatgtgcgtaatatactaaataaaaaagtgatagataatgaagatggatag

SEQ ID NO: 2091 - DNA, 1496 bp, Diabrotica virgifera
ggagacttcgaaagtattgatgaacactccagagatagagtgtgactctagatgaatggctacggctgactctggagactgagaaccccaaagttctgatgaacactccagagtgggtgtagaaaactcgaagaggcaaatgagatacggtcggccccagaaagacagtaaggctgatgttttctaataatcttaatcttagaaagtttgattgtactaaccgtcgaagctttttcgaatacaatacataaatcgttcagctggacattgggaatatacatttagataattatggcaactgcgctaacctgtgttagttgaagcttctgttcgagtacgagtttttggtgcaatagagctgttagaatgaacagaatgagtagttttgaagcaaggctgtccataaatatatcaaaaacaaagtttatgattaattgagttaataattttactttaatttttaaagtattttttatttaaaaactaatttcaaaactaaacagttttcccattcccttacgccaaaaatattaagcattacattgtcatattttgacgtttatttgtgtccgtcgaaatgagttgtcaattttgaggttaatgtctcttaatgctaacaaccgtattgtcatcgagagagctcagttgccacaattgtctcaatataatacaatgtatgtatttatgtatctaaatataatatacaatgtatgttccctatgtccagctgaacgatttacgtactgtatatacatataaatttatatatacacattatatatacatataaatttatatacatatttgataaacccttaaatcattcatccataactagatggcctatacgcattctcactaaattgggtcatgttctcatgcaaattacatggaataaacactgcaacattaagacagatgaaaaacaaaatggaatattcaacactatgaaggaaagaaaaatgaattactttggtcacatactaagaactgaaaaatatgagttgattcgattggttttaagttgaaagcagtggagtgaaaaaacaacaatagaaccgaagcagacagagtaaaaaaacgacaatgtccttaaacgatgaggcacatgaagaagataattaccgtattggagctactacagtctattccatgaatatacgactgttttggatcatcaggacaacgaatatattactgtgcaacattagaagtacaaaaataaattgctttaattattccaataaaaagaatgggatttttaagaaatattcttattttcatatgttgcacagtaaaatattcgttgacagtcatacattcatgaaatggactatacataacttttgacgacaaaactatattttcgctagaaaatccattattttttttgtttggatatgaacaatgtatttgaaaagacaaatatttgaatgataatgtggaatgtgcgtaatatactaaataaaaaagtgatagataatgaagatggatag

SEQ ID NO: 2092 - DNA, 525 bp, Diabrotica virgifera
gaatagactaggcatggtaggcaaaatagtgtaacgcggagcagtcggtagtaagtcgatacatctccctttttcctcgcgataccgcatatgtgacagacaaagatggttacaccacgcaaagtgaacattgaccaataacgtccttgatattggcgttacacctcgatgctcagagcggtccatacctaccttgtctattcttattatgtctgtggttcgacctctagaatatttttcaaacagcatacaggattactggttgcctatatttgaaacaacagaaatcatacagtacgtaaatcgttcagctggacgtagggaatatacattgagagaattgtggcaactgcgctaacctgtgttagttgaagcttctgttcgagtacgagtttttggtgcaatagagctgttagaatgaacagaatgagtagttttgaagcaaggctgtccataaatatatcaaaaacaaagtttatgattaattgagttaataattttactttaatttttaaagtatttttt

SEQ ID NO: 2093 - DNA, 474 bp, Diabrotica virgifera
ggagacttcgaaagtattgatgaacactccagagatagagtgtgactctagatgaatggctacggctgactctggagactgagaaccccaaagttctgatgaacactccagagtgggtgtagaaaactcgaagaggcaaatgagatacggtcggccccagaaagacagtaaggctgatgttttctaataatcttaatcttagaaagtttgattgtactaaccgtcgaagctttttcgaatacaatacataaatcgttcagctggacattgggaatatacatttagataattatggcaactgcgctaacctgtgttagttgaagcttctgttcgagtacgagtttttggtgcaatagagctgttagaatgaacagaatgagtagttttgaagcaaggctgtccataaatatatcaaaaacaaagtttatgattaattgagttaataattttactttaatttttaaagtatttttt

SEQ ID NO: 2094 - DNA, 1459 bp, Diabrotica virgifera
agatgttgctttatttaaaataaattacaaatgtataatctacattttccgtgtatactttagcaacccacaattgttaaaataaattaaataaaccttttacaatgctattaataaatgcataactaaaattacttcaccgaataagaagggatctaattgatcttgggtactcattgaacaatcttaatgatacatgcctgagcaattgatctatattaaaagcaattatcaagtttcggaacaacaaaaaatttaatatatttttggagaactgaaccaaagtatctgtactttgttttcgatgacgtttcagtgaccgaataataattcaaaatgatgaacggcttctattttcttatattttaaacggtatcatatggcaagtaatatcatatttaacggctcttgtgacactcgataagttcaaaatggcgaccgctcaatgctcgatggtggtaatatggaaaaaaacgctgaagcaaatcagcttattattaaagtttcccgcattctgatagaattaattttttattgatgtttgtcaaaaatatggcgtcctagccattttcgatcaataaaaatagcatgtgacacacatttgaaaacttttgtgtcacttagtatgtttctagaaacacgaaaactttgcaacttcgcaacataatttaaaaacaaattgaattaagttatggaaagctagaaaatatattgaccagttcaagtagttttcattaaagctgaatactaccaaattattagtagtttgtaattactcaatcattgaaaatataatggagataataaattttgaaacttcgtgacagattccgtgagtgataccagagcttttaaatggttttacttgctctatgatctcatttaaactaactttagaaaatggcacccaccagccattttgaatgattacaccactaaaaccattgacatattaagcctagactcggcatactcaccaaaaaagcgtaacgcggaaacagcatggaaacagtcgatcggtggtctatctatctcttttaaccaaacgatcccgcgcatgtgactgacaaagatggctagaccactcaatcctatgtcggcgttacacctcgatgcattgagtggcatatccctagccaagtatatccttaacatgtctctgacagcaacagggcttttcattcacagtcagttgtttcgagcttctatcatatgtcgtataatccgtttatattaatattatacaaagattatacaacacattgtgacagaagctcgaaacaaatgacaatcgatgaaaagccctataagtgaactatgatgtacattgacattcgttttacgtttagggttttgtctactcttcgctgttatagcgccacctacacctaaccaacaatctaaaatctttaggatggcgtagctaacttcagttttatacttgctaaactcgacttta

SEQ ID NO: 2095 - DNA, 1374 bp, Diabrotica virgifera
agatgttgctttatttaaaataaattacaaatgtataatctacattttccgtgtatactttagcaacccacaattgttaaaataaattaaataaaccttttacaatgctattaataaatgcataactaaaattacttcaccgaataagaagggatctaattgatcttgggtactcattgaacaatcttaatgatacatgcctgagcaattgatctatattaaaagcaattatcaagtttcggaacaacaaaaaatttaatatatttttggagaactgaaccaaagtatctgtactttgttttcgatgacgtttcagtgaccgaataataattcaaaatgatgaacggcttctattttcttatattttaaacggtatcatatggcaagtaatatcatatttaacggctcttgtgacactcgataagttcaaaatggcgaccgctcaatgctcgatggtggtaatatggaaaaaaacgctgaagcaaatcagcttattattaaagtttcccgcattctgatagaattaattttttattgatgtttgtcaaaaatatggcgtcctagccattttcgatcaataaaaatagcatgtgacacacatttgaaaacttttgtgtcacttagtatgtttctagaaacacgaaaactttgcaacttcgcaacataatttaaaaacaaattgaattaagttatggaaagctagaaaatatattgaccagttcaagtagttttcattaaagctgaatactaccaaattattagtagtttgtaattactcaatcattgaaaatataatggagataataaattttgaaacttcgtgacagattccgtgagtgataccagagcttttaaatggttttacttgctctatgatctcatttaaactaactttagaaaatggcacccaccagccattttgaatgattacaccactaaaaccattgacatattaagcctagactcggcatactcaccaaaaaagcgtaacgcggaaacagcatggaaacagtcgatcggtggtctatctatctcttttaaccaaacgatcccgcgcatgtgactgacaaagatggctagaccactcaatcctatgtcggcgttacacctcgatgcattgagtggcatatccctagccaagtctatcctctttacatgtctctgctaaaacatcgtagaaaaaagtgctttaggccataggtttgttccaactcgatagacgcatgcgcaataacgaataattatgtgcagtaacacatttctcgttactgcgcatctgcgcatactcgtaaccgttcaagaacggttttttgtgaataaaaaagcgaaaaactgaacttacaatgagatgttgatggttttttaacttaggta

SEQ ID NO: 2096 - DNA, 1259 bp, Diabrotica virgifera
  SmartBlast Evalue=2E-11; Info=Endonuclease-reverse transcriptase n=1 Tax=Bombyx mori RepID=D7F162_BOMMO
gtagaacaaataattcaatttttaagagagctaaaagttggccaacgactctccagtaaagtccatctccaacaattaaaatactttggacatgttatgagaggaaacacagaaaacatggaaagactcattatataaggaaaggtggaaggccgaagattataaggtagatccccaacaagatgaatcgatcaaattacaggaatatgcaaaagacatatgcatgagttaaaagaaatgaccagagacagagatctttggagacgaacaatacacgacatcacgtcgaccactacactccctccggcggtcaggattgaagaaagagagtctatagcagtaaggccatgtctgtagcatcatcgcttgtaaatattctctgaatcatgttaaaatgttgaaactgcctgtagaattttataggggctcatatagttgttattctagatattttccaacaattctgtaacaatagtgctgcttgtaaaaacttgtacgtgttccagattatgttgtaccactattagtgcttcttgatcattcggtgtcccatttttctacagtagaagtaaacgtgaaatgtctccgtatacatttctaatggccccaaatgaatttcaacctatattaaacgttcttttaagaacattatgatatccaatggacacttagattgactacgtgacgtcaatgagccgataggagcgtggtggtcattttggaagtgggcgtgacttacaaccattgacatattaagcctagactcggcatactcaccaaaaaagcgtaacgcggaaacagcatggaaacagtcgatcggtggtctatctatctcttttaaccaaacgatcccgcgcatgtgactgacaaagatggctagaccactcaatcctatgtcggcgttacacctcgatgcattgagtggcatatccctagccaagtatatccttaacatgtctctgacagcaacagggcttttcattcacagtcagttgtttcgagcttctatcatatgtcgtataatccgtttatattaatattatacaaagattatacaacacattgtgacagaagctcgaaacaaatgacaatcgatgaaaagccctataagtgaactatgatgtacattgacattcgttttacgtttagggttttgtctactcttcgctgttatagcgccacctacacctaaccaacaatctaaaatctttaggatggcgtagctaacttcagttttatacttgctaaactcgacttta

SEQ ID NO: 2097 - DNA, 1174 bp, Diabrotica virgifera
  SmartBlast Evalue=1E-11; Info=Endonuclease-reverse transcriptase n=1 Tax=Bombyx mori RepID=D7F162_BOMMO
gtagaacaaataattcaatttttaagagagctaaaagttggccaacgactctccagtaaagtccatctccaacaattaaaatactttggacatgttatgagaggaaacacagaaaacatggaaagactcattatataaggaaaggtggaaggccgaagattataaggtagatccccaacaagatgaatcgatcaaattacaggaatatgcaaaagacatatgcatgagttaaaagaaatgaccagagacagagatctttggagacgaacaatacacgacatcacgtcgaccactacactccctccggcggtcaggattgaagaaagagagtctatagcagtaaggccatgtctgtagcatcatcgcttgtaaatattctctgaatcatgttaaaatgttgaaactgcctgtagaattttataggggctcatatagttgttattctagatattttccaacaattctgtaacaatagtgctgcttgtaaaaacttgtacgtgttccagattatgttgtaccactattagtgcttcttgatcattcggtgtcccatttttctacagtagaagtaaacgtgaaatgtctccgtatacatttctaatggccccaaatgaatttcaacctatattaaacgttcttttaagaacattatgatatccaatggacacttagattgactacgtgacgtcaatgagccgataggagcgtggtggtcattttggaagtgggcgtgacttacaaccattgacatattaagcctagactcggcatactcaccaaaaaagcgtaacgcggaaacagcatggaaacagtcgatcggtggtctatctatctcttttaaccaaacgatcccgcgcatgtgactgacaaagatggctagaccactcaatcctatgtcggcgttacacctcgatgcattgagtggcatatccctagccaagtctatcctctttacatgtctctgctaaaacatcgtagaaaaaagtgctttaggccataggtttgttccaactcgatagacgcatgcgcaataacgaataattatgtgcagtaacacatttctcgttactgcgcatctgcgcatactcgtaaccgttcaagaacggttttttgtgaataaaaaagcgaaaaactgaacttacaatgagatgttgatggttttttaacttaggta

SEQ ID NO: 2098 - DNA, 662 bp, Diabrotica virgifera
ttgagatagatgcaatgacagatgacagttaagattttcaagataaccaactgaaacaatgacgtcacatgaatatattccttctgcaatctacgaccagattaatatctccctgtatttactacggcaatggaactacagcaaccattgacatattaagcctagactcggcatactcaccaaaaaagcgtaacgcggaaacagcatggaaacagtcgatcggtggtctatctatctcttttaaccaaacgatcccgcgcatgtgactgacaaagatggctagaccactcaatcctatgtcggcgttacacctcgatgcattgagtggcatatccctagccaagtatatccttaacatgtctctgacagcaacagggcttttcattcacagtcagttgtttcgagcttctatcatatgtcgtataatccgtttatattaatattatacaaagattatacaacacattgtgacagaagctcgaaacaaatgacaatcgatgaaaagccctataagtgaactatgatgtacattgacattcgttttacgtttagggttttgtctactcttcgctgttatagcgccacctacacctaaccaacaatctaaaatctttaggatggcgtagctaacttcagttttatacttgctaaactcgacttta

SEQ ID NO: 2099 - DNA, 577 bp, Diabrotica virgifera
ttgagatagatgcaatgacagatgacagttaagattttcaagataaccaactgaaacaatgacgtcacatgaatatattccttctgcaatctacgaccagattaatatctccctgtatttactacggcaatggaactacagcaaccattgacatattaagcctagactcggcatactcaccaaaaaagcgtaacgcggaaacagcatggaaacagtcgatcggtggtctatctatctcttttaaccaaacgatcccgcgcatgtgactgacaaagatggctagaccactcaatcctatgtcggcgttacacctcgatgcattgagtggcatatccctagccaagtctatcctctttacatgtctctgctaaaacatcgtagaaaaaagtgctttaggccataggtttgttccaactcgatagacgcatgcgcaataacgaataattatgtgcagtaacacatttctcgttactgcgcatctgcgcatactcgtaaccgttcaagaacggttttttgtgaataaaaaagcgaaaaactgaacttacaatgagatgttgatggttttttaacttaggta

SEQ ID NO: 2100 - DNA, 1931 bp, Diabrotica virgifera
  SmartBlast Evalue=4E-44; Info=Endonuclease-reverse transcriptase n=1 Tax=Schistosoma mansoni RepID=Q4QQE8_SCHMA
ggctgctgactacgaacttcgagggtggatttgatccgagtggtacaacaattgttataaagaatttatgggtaatgtgaagtttctctataggactctaaaaaatctaagacaaagtaaatcaaacgaagtaagaggtttattattaaaaaatgaagagattacggaaagatgacgagaatattttatggaattattaatggaagacaacaacgaaatagataatgatagggtagagtacaatttaaatgaagaaaaagattaaggctgaactaattatatatcaaaagaaaagaattacaattactgtggaagatcataaggagctgttgacataccaaatgcatacctagagattggactcttgcaacaattcttccattatgcaaaaaaggtgatcaacataggtgatctaactacagaggaatatcattgttggtagttgctagtaaaatttacgaaataatactagagaaaaagctgcgagaaaatatcgaggccacactggatgacagccaatgcggctttaggccagggcgaggtacaaccgatctcataatcacggtgagacagttatcagaaaaagccctagagcataacagtaagttgtttctctgttttgtggacttggaaaaagcatttgatcgggcgccacgtaacaagatctgggaaatattaaaccgcagaaatgtgaaaccgaagttaatccaagcaataaagagtatatataaatgtacacgtaataatgtaagaacgaacaatcgctcatctctagaattctacacaaggacaggtgtaagacaaggtggtgttctgagtctcctttgttattcatcactctaatggacgaaattgcaaaagaatgcaggggtaaggtaaaaagaactagggttggggtgtataaacttcaacaagtttacgtgtcagagttgatatatgccgatgacctggtaattgtggcaaaatcagaaaaagacttgcaagtgaatgtgaatgtttggaatgaagcctttaagaaatttgggatgaaaataaatattgaaaaaacagaagctttagtaatatcgaaaactcaagaaaatataaatgtaaagctgaataatgagaccattacacaagtagaggacttcaagtatctaggatcaacaatgaatgggcaaggaaatatagaaccagaaataaacagcagggtaatgagtgcaacaaaattatactatgcactaaataaaagttttattaggaagaaagaagtaagcctgaaaacaaaaatgaaagtatttcaaactgtatacgagccggtgctactctacggtagtgaaacgtgaacagtgaacgacaacatccgtagtaaaattcaagcatgcgaaatgcgatatttacgtgcggtatccggggtgaccagacgtgatcgtataagaaatgaagacatacgtgaaaggtgcggtgttggaaggaccttagacagacttgaaagaaacagttatcgtggttcggacatatggcgagaatgagtgaaggtagaactgtaaagagggtatggaaagcggcatctgacaacaaacgacgaagaggcaggccagcaagggaacgcaaatattggaaaggcttgcgtaaaaagaaatattgggtggagagaagcagaaagactagctactggccgaaagtcatggagacgtctgatttctccacttacctcgacaccgtaaggtacaagaggacggcttaagtaagtaagtaagttattaaagcgcagatactgagatggctatgtcatatagagggaaggaaaaacgacctactgattaagaagatcaccagatggaaaccagaaactgaaagaccgaggggaagacgcagagagagatgggaggaccgcgtcatgagagatatcaaaattcttaaagtgagaaactggagggaaactatacaca

SEQ ID NO: 2101 - DNA, 1922 bp, Diabrotica virgifera
  SmartBlast Evalue=9E-44; Info=Endonuclease-reverse transcriptase n=1 Tax=Schistosoma mansoni RepID=Q4QQE8_SCHMA
ggctgctgactacgaacttcgagggtggatttgatccgagtggtacaacaattgttataaagaatttatgggtaatgtgaagtttctctataggactctaaaaaatctaagacaaagtaaatcaaacgaagtaagaggtttattattaaaaaatgaagagattacggaaagatgacgagaatattttatggaattattaatggaagacaacaacgaaatagataatgatagggtagagtacaatttaaatgaagaaaaagattaaggctgaactaattatatatcaaaagaaaagaattacaattactgtggaagatcataaggagctgttgacataccaaatgcatacctagagattggactcttgcaacaattcttccattatgcaaaaaaggtgatcaacataggtgatctaactacagaggaatatcattgttggtagttgctagtaaaatttacgaaataatactagagaaaaagctgcgagaaaatatcgaggccacactggatgacagccaatgcggctttaggccagggcgaggtacaaccgatctcataatcacggtgagacagttatcagaaaaagccctagagcataacagtaagttgtttctctgttttgtggacttggaaaaagcatttgatcgggcgccacgtaacaagatctgggaaatattaaaccgcagaaatgtgaaaccgaagttaatccaagcaataaagagtatatataaatgtacacgtaataatgtaagaacgaacaatcgctcatctctagaattctacacaaggacaggtgtaagacaaggtggtgttctgagtctcctttgttattcatcactctaatggacgaaattgcaaaagaatgcaggggtaaggtaaaaagaactagggttggggtgtataaacttcaacaagtttacgtgtcagagttgatatatgccgatgacctggtaattgtggcaaaatcagaaaaagacttgcaagtgaatgtgaatgtttggaatgaagcctttaagaaatttgggatgaaaataaatattaaaaaagcagaagctttagtaatatcgaaaaatataaatgtaaagctgaataatgagaccattacacaagtagaggacttcaagtatctaggatcaacaatgaatgggcaaggaaatatagaaccagaaataaacagcagggtaatgagtgcaacaaaattatactatgcactaaataaaagttttattaggaagaaagaagtaagcctgaaaacaaaaatgaaagtatttcaaactgtatacgagccggtgctactctacggtagtgaaacgtgaacagtgaacgacaacatccgtagtaaaattcaagcatgcgaaatgcgatatttacgtgcggtatccggggtgaccagacgtgatcgtataagaaatgaagacatacgtgaaaggtgcggtgttggaaggaccttagacagacttgaaagaaacagttatcgtggttcggacatatggcgagaatgagtgaaggtagaactgtaaagagggtatggaaagcggcatctgacaacaaacgacgaagaggcaggccagcaagggaacgcaaatattggaaaggcttgcgtaaaaagaaatattgggtggagagaagcagaaagactagctactggccgaaagtcatggagacgtctgatttctccacttacctcgacaccgtaaggtacaagaggacggcttaagtaagtaagtaagttattaaagcgcagatactgagatggctatgtcatatagagggaaggaaaaacgacctactgattaagaagatcaccagatggaaaccagaaactgaaagaccgaggggaagacgcagagagagatgggaggaccgcgtcatgagagatatcaaaattcttaaagtgagaaactggagggaaactatacaca

SEQ ID NO: 2102 - DNA, 1698 bp, Diabrotica virgifera
  SmartBlast Evalue=4E-33; Info=Endonuclease-reverse transcriptase n=1 Tax=Schistosoma mansoni RepID=Q4QQE8_SCHMA
ctctgtatgaggttacatctggcataccgttcaccatatggaagcaagattgacgaaatttcgtccacagaggagttggcggacggtatgtcagttgtaacctcatatagagcatagtgctatgctatggagcggtattttttgaaaagcacatgccgaaattgtggaggtgattttgctcatgatagctgacatgtacattgaaggcgttttggaggatcatgttttgccgtttaccaaccatattggacatgaccaaatcgaggccacactggatgacagccaatgcggctttaggccagggcgaggtacaaccgatctcataatcacggtgagacagttatcagaaaaagccctagagcataacagtaagttgtttctctgttttgtggacttggaaaaagcatttgatcgggcgccacgtaacaagatctgggaaatattaaaccgcagaaatgtgaaaccgaagttaatccaagcaataaagagtatatataaatgtacacgtaataatgtaagaacgaacaatcgctcatctctagaattctacacaaggacaggtgtaagacaaggtggtgttctgagtctcctttgttattcatcactctaatggacgaaattgcaaaagaatgcaggggtaaggtaaaaagaactagggttggggtgtataaacttcaacaagtttacgtgtcagagttgatatatgccgatgacctggtaattgtggcaaaatcagaaaaagacttgcaagtgaatgtgaatgtttggaatgaagcctttaagaaatttgggatgaaaataaatattgaaaaaacagaagctttagtaatatcgaaaactcaagaaaatataaatgtaaagctgaataatgagaccattacacaagtagaggacttcaagtatctaggatcaacaatgaatgggcaaggaaatatagaaccagaaataaacagcagggtaatgagtgcaacaaaattatactatgcactaaataaaagttttattaggaagaaagaagtaagcctgaaaacaaaaatgaaagtatttcaaactgtatacgagccggtgctactctacggtagtgaaacgtgaacagtgaacgacaacatccgtagtaaaattcaagcatgcgaaatgcgatatttacgtgcggtatccggggtgaccagacgtgatcgtataagaaatgaagacatacgtgaaaggtgcggtgttggaaggaccttagacagacttgaaagaaacagttatcgtggttcggacatatggcgagaatgagtgaaggtagaactgtaaagagggtatggaaagcggcatctgacaacaaacgacgaagaggcaggccagcaagggaacgcaaatattggaaaggcttgcgtaaaaagaaatattgggtggagagaagcagaaagactagctactggccgaaagtcatggagacgtctgatttctccacttacctcgacaccgtaaggtacaagaggacggcttaagtaagtaagtaagttattaaagcgcagatactgagatggctatgtcatatagagggaaggaaaaacgacctactgattaagaagatcaccagatggaaaccagaaactgaaagaccgaggggaagacgcagagagagatgggaggaccgcgtcatgagagatatcaaaattcttaaagtgagaaactggagggaaactatacaca

SEQ ID NO: 2103 - DNA, 1692 bp, Diabrotica virgifera
  SmartBlast Evalue=2E-36; Info=Endonuclease-reverse transcriptase n=1 Tax=Schistosoma mansoni RepID=Q4QQE8_SCHMA
tatctaccctatctagaagagaagataacaggacgacagaaaccaagataaaaaattacacttttcaaacagttgagagaaatcaagatagaaaattacacttttgaaagagtttaacaattaaaatatttgcggtaatctaagagacatactgaacggagaagatatagttagatttattaaagcgttatcattgttggtagttgctagtaaaatttacgaaataatactagagaaaaagctgcgagaaaatatcgaggccacactggatgacagccaatgcggctttaggccagggcgaggtacaaccgatctcataatcacggtgagacagttatcagaaaaagccctagagcataacagtaagttgtttctctgttttgtggacttggaaaaagcatttgatcgggcgccacgtaacaagatctgggaaatattaaaccgcagaaatgtgaaaccgaagttaatccaagcaataaagagtatatataaatgtacacgtaataatgtaagaacgaacaatcgctcatctctagaattctacacaaggacaggtgtaagacaaggtggtgttctgagtctcctttgttattcatcactctaatggacgaaattgcaaaagaatgcaggggtaaggtaaaaagaactagggttggggtgtataaacttcaacaagtttacgtgtcagagttgatatatgccgatgacctggtaattgtggcaaaatcagaaaaagacttgcaagtgaatgtgaatgtttggaatgaagcctttaagaaatttgggatgaaaataaatattgaaaaaacagaagctttagtaatatcgaaaactcaagaaaatataaatgtaaagctgaataatgagaccattacacaagtagaggacttcaagtatctaggatcaacaatgaatgggcaaggaaatatagaaccagaaataaacagcagggtaatgagtgcaacaaaattatactatgcactaaataaaagttttattaggaagaaagaagtaagcctgaaaacaaaaatgaaagtatttcaaactgtatacgagccggtgctactctacggtagtgaaacgtgaacagtgaacgacaacatccgtagtaaaattcaagcatgcgaaatgcgatatttacgtgcggtatccggggtgaccagacgtgatcgtataagaaatgaagacatacgtgaaaggtgcggtgttggaaggaccttagacagacttgaaagaaacagttatcgtggttcggacatatggcgagaatgagtgaaggtagaactgtaaagagggtatggaaagcggcatctgacaacaaacgacgaagaggcaggccagcaagggaacgcaaatattggaaaggcttgcgtaaaaagaaatattgggtggagagaagcagaaagactagctactggccgaaagtcatggagacgtctgatttctccacttacctcgacaccgtaaggtacaagaggacggcttaagtaagtaagtaagttattaaagcgcagatactgagatggctatgtcatatagagggaaggaaaaacgacctactgattaagaagatcaccagatggaaaccagaaactgaaagaccgaggggaagacgcagagagagatgggaggaccgcgtcatgagagatatcaaaattcttaaagtgagaaactggagggaaactatacaca

SEQ ID NO: 2104 - DNA, 1689 bp, Diabrotica virgifera
  SmartBlast Evalue=8E-33; Info=Endonuclease-reverse transcriptase n=1 Tax=Schistosoma mansoni RepID=Q4QQE8_SCHMA
ctctgtatgaggttacatctggcataccgttcaccatatggaagcaagattgacgaaatttcgtccacagaggagttggcggacggtatgtcagttgtaacctcatatagagcatagtgctatgctatggagcggtattttttgaaaagcacatgccgaaattgtggaggtgattttgctcatgatagctgacatgtacattgaaggcgttttggaggatcatgttttgccgtttaccaaccatattggacatgaccaaatcgaggccacactggatgacagccaatgcggctttaggccagggcgaggtacaaccgatctcataatcacggtgagacagttatcagaaaaagccctagagcataacagtaagttgtttctctgttttgtggacttggaaaaagcatttgatcgggcgccacgtaacaagatctgggaaatattaaaccgcagaaatgtgaaaccgaagttaatccaagcaataaagagtatatataaatgtacacgtaataatgtaagaacgaacaatcgctcatctctagaattctacacaaggacaggtgtaagacaaggtggtgttctgagtctcctttgttattcatcactctaatggacgaaattgcaaaagaatgcaggggtaaggtaaaaagaactagggttggggtgtataaacttcaacaagtttacgtgtcagagttgatatatgccgatgacctggtaattgtggcaaaatcagaaaaagacttgcaagtgaatgtgaatgtttggaatgaagcctttaagaaatttgggatgaaaataaatattaaaaaagcagaagctttagtaatatcgaaaaatataaatgtaaagctgaataatgagaccattacacaagtagaggacttcaagtatctaggatcaacaatgaatgggcaaggaaatatagaaccagaaataaacagcagggtaatgagtgcaacaaaattatactatgcactaaataaaagttttattaggaagaaagaagtaagcctgaaaacaaaaatgaaagtatttcaaactgtatacgagccggtgctactctacggtagtgaaacgtgaacagtgaacgacaacatccgtagtaaaattcaagcatgcgaaatgcgatatttacgtgcggtatccggggtgaccagacgtgatcgtataagaaatgaagacatacgtgaaaggtgcggtgttggaaggaccttagacagacttgaaagaaacagttatcgtggttcggacatatggcgagaatgagtgaaggtagaactgtaaagagggtatggaaagcggcatctgacaacaaacgacgaagaggcaggccagcaagggaacgcaaatattggaaaggcttgcgtaaaaagaaatattgggtggagagaagcagaaagactagctactggccgaaagtcatggagacgtctgatttctccacttacctcgacaccgtaaggtacaagaggacggcttaagtaagtaagtaagttattaaagcgcagatactgagatggctatgtcatatagagggaaggaaaaacgacctactgattaagaagatcaccagatggaaaccagaaactgaaagaccgaggggaagacgcagagagagatgggaggaccgcgtcatgagagatatcaaaattcttaaagtgagaaactggagggaaactatacaca

SEQ ID NO: 2105 - DNA, 1683 bp, Diabrotica virgifera
  SmartBlast Evalue=5E-36; Info=Endonuclease-reverse transcriptase n=1 Tax=Schistosoma mansoni RepID=Q4QQE8_SCHMA
tatctaccctatctagaagagaagataacaggacgacagaaaccaagataaaaaattacacttttcaaacagttgagagaaatcaagatagaaaattacacttttgaaagagtttaacaattaaaatatttgcggtaatctaagagacatactgaacggagaagatatagttagatttattaaagcgttatcattgttggtagttgctagtaaaatttacgaaataatactagagaaaaagctgcgagaaaatatcgaggccacactggatgacagccaatgcggctttaggccagggcgaggtacaaccgatctcataatcacggtgagacagttatcagaaaaagccctagagcataacagtaagttgtttctctgttttgtggacttggaaaaagcatttgatcgggcgccacgtaacaagatctgggaaatattaaaccgcagaaatgtgaaaccgaagttaatccaagcaataaagagtatatataaatgtacacgtaataatgtaagaacgaacaatcgctcatctctagaattctacacaaggacaggtgtaagacaaggtggtgttctgagtctcctttgttattcatcactctaatggacgaaattgcaaaagaatgcaggggtaaggtaaaaagaactagggttggggtgtataaacttcaacaagtttacgtgtcagagttgatatatgccgatgacctggtaattgtggcaaaatcagaaaaagacttgcaagtgaatgtgaatgtttggaatgaagcctttaagaaatttgggatgaaaataaatattaaaaaagcagaagctttagtaatatcgaaaaatataaatgtaaagctgaataatgagaccattacacaagtagaggacttcaagtatctaggatcaacaatgaatgggcaaggaaatatagaaccagaaataaacagcagggtaatgagtgcaacaaaattatactatgcactaaataaaagttttattaggaagaaagaagtaagcctgaaaacaaaaatgaaagtatttcaaactgtatacgagccggtgctactctacggtagtgaaacgtgaacagtgaacgacaacatccgtagtaaaattcaagcatgcgaaatgcgatatttacgtgcggtatccggggtgaccagacgtgatcgtataagaaatgaagacatacgtgaaaggtgcggtgttggaaggaccttagacagacttgaaagaaacagttatcgtggttcggacatatggcgagaatgagtgaaggtagaactgtaaagagggtatggaaagcggcatctgacaacaaacgacgaagaggcaggccagcaagggaacgcaaatattggaaaggcttgcgtaaaaagaaatattgggtggagagaagcagaaagactagctactggccgaaagtcatggagacgtctgatttctccacttacctcgacaccgtaaggtacaagaggacggcttaagtaagtaagtaagttattaaagcgcagatactgagatggctatgtcatatagagggaaggaaaaacgacctactgattaagaagatcaccagatggaaaccagaaactgaaagaccgaggggaagacgcagagagagatgggaggaccgcgtcatgagagatatcaaaattcttaaagtgagaaactggagggaaactatacaca

SEQ ID NO: 2106 - DNA, 957 bp, Diabrotica virgifera
ttacgaagctagacgaccaagagggagaccacagaagagatgggtagacgacataaaaacaatagcctgaataaattggaagtatgttgaaatcgatgctaagaagaagaagaagggatacatgtcataacactgcatatatttatgggggttagttctagaaagcagtcggtaaaatggttaatttagttcacagtttgcggtaatggtttacatattattaggtatgcttcttttcatgagcatttttcagtgcgttacaaattatagaaaaaaaaggtaagtccgtgataacacaaagtatttcaaactgtatacgagccggtgctactctacggtagtaaaacgtggatagtgaacgacaacatccgtagtaaaattcaagcatgcgaaatgcgatatttacgtacggtattcggggtgaccagacgtgatcgtataagaaatgaagacatacgtgaaaggtgcggtgttggaaggaccttagacagacttgaaagaaacagttatcgtggttcggacatatggcgagaatgagtgaaggtagaactgtaaagagggtatggaaagcggcatctgacaacaaacgacgaagaggcaggccagcaagggaacgcaaatattggaaaggcttgcgtaaaaagaaatattgggtggagagaagcagaaagactagctactggccgaaagtcatggagacgtctgatttctccacttacctcgacaccgtaaggtacaagaggacggcttaagtaagtaagtaagttattaaagcgcagatactgagatggctatgtcatatagagggaaggaaaaacgacctactgattaagaagatcaccagatggaaaccagaaactgaaagaccgaggggaagacgcagagagagatgggaggaccgcgtcatgagagatatcaaaattcttaaagtgagaaactggagggaaactatacaca

SEQ ID NO: 2107 - DNA, 2060 bp, Diabrotica virgifera
  SmartBlast Evalue=8E-87; Info=Ferritin n=1 Tax=Leptinotarsa decemlineata RepID=Q7Z161_LEPDE
atcaaacacacgctaaacatatcaaaatagcatgtaccaaaatatacagtcactgcgcacgctaaataataacgtcactggcttgatgaagtttaattcgcgtgtacatacctaacttttttatttgcgtacacgttagcgtgtacctagacacagcgaaatataaccataataataactaatgtaaaactatgtgacgtcacgggtcgtttgaactattttataccgctgaagactttaaatacgtatttctaagttattacgagtttttgaagcgtgaaattttggaaatctcatttttaaacaaaactgaacattattatgtaataaaaaaattgtgcaagttccctattcggtctcctaaaccttacttcacccatacatacattttattgctatttatataaaacatcatgctttattatttacacaaccttgtaaaattgttgtagtaactataacaatacttaaatattgcaaaaaacggaaatattctctgcaaaaactgaaaaaacaataaaaaaatacaaatttgccacactaaacaacgtttgtttggaaaagtttgaaaaaatctgacatatatgtcaatgaaaattgacactttacgtcatcactccggccgtctattcgtgcatttgtcggctcccagctcccccttcacttatcacaactagtcaccaattgaactacttacatttttaaaaattcgtgtaaaataccaacttttcgaatatgtaaaatgattttttccacggacaatatttttaaagttattcttacttacttactagccaacgcccacccttggcatgttagccatttggcggcgcgctgaccagtatagacgagccgtttctcgtaggcgatcttcatcctcctcgggtgggtctgttatcagggctgggcactctgggaggtgagcagcatccatctggggctgattacatagtggacagttgtcattttcacggacgccgatgcgatgtagatgggagaccaggtagtctttttttttttttttaagcttttttaattaaaagttgtctttatttctgttataatttccaaaatgaacataacgaatacataaatggaaccatcttacaatttacaaaaaagaaaaaatgataagaactatcactatatcacgtaacacagtttcacggacgtcaaatcaaaaactgcactaaaaatatttacaactctaatgaaattatgaagaggctccttggagcttcttgtcgtagagccattcgccaagggctccgtgttctcccatcatcttttgtaaattggagacttttccagctaagtcccgttgtccatggtattgttcttccaagaagtcgccagtcaggtaatcaacaagatggtaatcgttgaagttggagccgtcttcgcaaacttggatgacatctctgatctttctggtaactgaagcttccagtttaagggcgtgtttgagagcactcacaccgttttcccatgtggtttgagcaggtgcaagatttcttttgatgagatcactgatgctagaagtaagttctcctctcatgagcaaataatggatcaatttgatggcatgttccctttcttcactagctgatttgaaaaataaatcagcaaaaccgggtctgttcactgtgtctcttgcgaaatatgcacccatggccatgtattgcattgaagctttaagttcctcttcaacttggcctctcatctttttcacacaaacgttgttcatgtcgatccaatcttttgggatatccagttcttggtgggcacatttcagctggacagcctgtaaacctgcgaagcaggccaaaaatacgaataccgctacggacttcatgttgtttttggtatgatggtttgattgatgttataaatataacgaaagtttattcaatacgtaagtaatcactgtagtctgcctttacactcactggtgcagaaggtggactatgacaatacaacttgaaaaagttagattatacgtaaatataatattttgcgcacagcactatcatgacatttatctctttctcatacttgtt

SEQ ID NO: 2108 - DNA, 2059 bp, Diabrotica virgifera
  SmartBlast Evalue=1E-65; Info=Ferritin n=1 Tax=Leptinotarsa decemlineata RepID=Q7Z161_LEPDE
atcaaacacacgctaaacatatcaaaatagcatgtaccaaaatatacagtcactgcgcacgctaaataataacgtcactggcttgatgaagtttaattcgcgtgtacatacctaacttttttatttgcgtacacgttagcgtgtacctagacacagcgaaatataaccataataataactaatgtaaaactatgtgacgtcacgggtcgtttgaactattttataccgctgaagactttaaatacgtatttctaagttattacgagtttttgaagcgtgaaattttggaaatctcatttttaaacaaaactgaacattattatgtaataaaaaaattgtgcaagttccctattcggtctcctaaaccttacttcacccatacatacattttattgctatttatataaaacatcatgctttattatttacacaaccttgtaaaattgttgtagtaactataacaatacttaaatattgcaaaaaacggaaatattctctgcaaaaactgaaaaaacaataaaaaaatacaaatttgccacactaaacaacgtttgtttggaaaagtttgaaaaaatctgacatatatgtcaatgaaaattgacactttacgtcatcactccggccgtctattcgtgcatttgtcggctcccagctcccccttcacttatcacaactagtcaccaattgaactacttacatttttaaaaattcgtgtaaaataccaacttttcgaatatgtaaaatgattttttccacggacaatatttttaaagttattcttacttacttactagccaacgcccacccttggcatgttagccatttggcggcgcgctgaccagtatagacgagccgtttctcgtaggcgatcttcatcctcctcgggtgggtctgttatcagggctgggcactctgggaggtgagcagcatccatctggggctgattacatagtggacagttgtcattttcacggacgccgatgcgatgtagatgggagaccaggtagtctttttttttttttttaagcttttttaattaaaagttgtctttatttctgttataatttccaaaatgaacataacgaatacataaatggaaccatcttacaatttacaaaaaagaaaaaatgataagaactatcactatatcacgtaacacagtttcacggacgtcaaatcaaaaactgcactaaaaatatttacaactctaatgaaattatgaagaggctccttggagcttcttgtcgtagagccattcgccaagggctccgtgttctcccatcatcttttgtaaattggagacttttccagctaagtcccgttgtccatggtattgttcttccaagaagtcgccagtcaggtaatcaacaagatggtaatcgttgaagtttgagccgtcttcgcaaacttggatcacatctctgatctttctggtaactgaagcttccagtttaagggcgtgtttgagggcactcacaccgttttcccatgtggtttgagcaggtgcaagatttcttttgatgagatcactgatgctagaagtaagttctcctctcatgagcaaataatggatcaatttgatggcatgttccctttcttcactagctgatttgaaaaataaatcagcaaaaccgggtctgttcactgtgtctcttgcgaaatatgcacccatggccatgtattgcatgaagctttaagttcctcttcaacttggcctctcatctttttcacacaaacgttgttcatgtcgatccaatcttttgggatatccagttcttggtgggcacatttcagctggacagcctgtaaacctgcgaagcaggccaaaaatacgaataccgctacggacttcatgttgtttttggtatgatggtttgattgatgttataaatataacgaaagtttattcaatacgtaagtaatcactgtagtctgcctttacactcactggtgcagaaggtggactatgacaatacaacttgaaaaagttagattatacgtaaatataatattttgcgcacagcactatcatgacatttatctctttctcatacttgtt

SEQ ID NO: 2109 - DNA, 1998 bp, Diabrotica virgifera
  SmartBlast Evalue=7E-87; Info=Ferritin n=1 Tax=Leptinotarsa decemlineata RepID=Q7Z161_LEPDE
gcaactttttggctgaaagaagtatgctgctgcaaatattccggacaataacctcaaaataaataggaagtagacttgtaatagacggccggagtgtgacgtcacggctaacggcggctatattcagtgttatgatcactttccaaacaaacattgtgaacacgttgaaaagatagggatagatatttaccgaatctcaagactttttaattagtataaagttaaaatgtcgcttcctgtgccattttttatgtttaattatagtgtttatttaatttcactatcttacttcagtctcctaaaccttacttcacccatacatacattttattgctatttatataaaacatcatgctttattatttacacaaccttgtaaaattgttgtagtaactataacaatacttaaatattgcaaaaaacggaaatattctctgcaaaaactgaaaaaacaataaaaaaatacaaatttgccacactaaacaacgtttgtttggaaaagtttgaaaaaatctgacatatatgtcaatgaaaattgacactttacgtcatcactccggccgtctattcgtgcatttgtcggctcccagctcccccttcacttatcacaactagtcaccaattgaactacttacatttttaaaaattcgtgtaaaataccaacttttcgaatatgtaaaatgattttttccacggacaatatttttaaagttattcttacttacttactagccaacgcccacccttggcatgttagccatttggcggcgcgctgaccagtatagacgagccgtttctcgtaggcgatcttcatcctcctcgggtgggtctgttatcagggctgggcactctgggaggtgagcagcatccatctggggctgattacatagtggacagttgtcattttcacggacgccgatgcgatgtagatgggagaccaggtagtctttttttttttttttaagcttttttaattaaaagttgtctttatttctgttataatttccaaaatgaacataacgaatacataaatggaaccatcttacaatttacaaaaaagaaaaaatgataagaactatcactatatcacgtaacacagtttcacggacgtcaaatcaaaaactgcactaaaaatatttacaactctaatgaaattatgaagaggctccttggagcttcttgtcgtagagccattcgccaagggctccgtgttctcccatcatcttttgtaaattggagacttttccagctaagtcccgttgtccatggtattgttcttccaagaagtcgccagtcaggtaatcaacaagatggtaatcgttgaagttggagccgtcttcgcaaacttggatgacatctctgatctttctggtaactgaagcttccagtttaagggcgtgtttgagagcactcacaccgttttcccatgtggtttgagcaggtgcaagatttcttttgatgagatcactgatgctagaagtaagttctcctctcatgagcaaataatggatcaatttgatggcatgttccctttcttcactagctgatttgaaaaataaatcagcaaaaccgggtctgttcactgtgtctcttgcgaaatatgcacccatggccatgtattgcattgaagctttaagttcctcttcaacttggcctctcatctttttcacacaaacgttgttcatgtcgatccaatcttttgggatatccagttcttggtgggcacatttcagctggacagcctgtaaacctgcgaagcaggccaaaaatacgaataccgctacggacttcatgttgtttttggtatgatggtttgattgatgttataaatataacgaaagtttattcaatacgtaagtaatcactgtagtctgcctttacactcactggtgcagaaggtggactatgacaatacaacttgaaaaagttagattatacgtaaatataatattttgcgcacagcactatcatgacatttatctctttctcatacttgtt

SEQ ID NO: 2110 - DNA, 1997 bp, Diabrotica virgifera
  SmartBlast Evalue=1E-65; Info=Ferritin n=1 Tax=Leptinotarsa decemlineata RepID=Q7Z161_LEPDE
gcaactttttggctgaaagaagtatgctgctgcaaatattccggacaataacctcaaaataaataggaagtagacttgtaatagacggccggagtgtgacgtcacggctaacggcggctatattcagtgttatgatcactttccaaacaaacattgtgaacacgttgaaaagatagggatagatatttaccgaatctcaagactttttaattagtataaagttaaaatgtcgcttcctgtgccattttttatgtttaattatagtgtttatttaatttcactatcttacttcagtctcctaaaccttacttcacccatacatacattttattgctatttatataaaacatcatgctttattatttacacaaccttgtaaaattgttgtagtaactataacaatacttaaatattgcaaaaaacggaaatattctctgcaaaaactgaaaaaacaataaaaaaatacaaatttgccacactaaacaacgtttgtttggaaaagtttgaaaaaatctgacatatatgtcaatgaaaattgacactttacgtcatcactccggccgtctattcgtgcatttgtcggctcccagctcccccttcacttatcacaactagtcaccaattgaactacttacatttttaaaaattcgtgtaaaataccaacttttcgaatatgtaaaatgattttttccacggacaatatttttaaagttattcttacttacttactagccaacgcccacccttggcatgttagccatttggcggcgcgctgaccagtatagacgagccgtttctcgtaggcgatcttcatcctcctcgggtgggtctgttatcagggctgggcactctgggaggtgagcagcatccatctggggctgattacatagtggacagttgtcattttcacggacgccgatgcgatgtagatgggagaccaggtagtctttttttttttttttaagcttttttaattaaaagttgtctttatttctgttataatttccaaaatgaacataacgaatacataaatggaaccatcttacaatttacaaaaaagaaaaaatgataagaactatcactatatcacgtaacacagtttcacggacgtcaaatcaaaaactgcactaaaaatatttacaactctaatgaaattatgaagaggctccttggagcttcttgtcgtagagccattcgccaagggctccgtgttctcccatcatcttttgtaaattggagacttttccagctaagtcccgttgtccatggtattgttcttccaagaagtcgccagtcaggtaatcaacaagatggtaatcgttgaagtttgagccgtcttcgcaaacttggatcacatctctgatctttctggtaactgaagcttccagtttaagggcgtgtttgagggcactcacaccgttttcccatgtggtttgagcaggtgcaagatttcttttgatgagatcactgatgctagaagtaagttctcctctcatgagcaaataatggatcaatttgatggcatgttccctttcttcactagctgatttgaaaaataaatcagcaaaaccgggtctgttcactgtgtctcttgcgaaatatgcacccatggccatgtattgcatgaagctttaagttcctcttcaacttggcctctcatctttttcacacaaacgttgttcatgtcgatccaatcttttgggatatccagttcttggtgggcacatttcagctggacagcctgtaaacctgcgaagcaggccaaaaatacgaataccgctacggacttcatgttgtttttggtatgatggtttgattgatgttataaatataacgaaagtttattcaatacgtaagtaatcactgtagtctgcctttacactcactggtgcagaaggtggactatgacaatacaacttgaaaaagttagattatacgtaaatataatattttgcgcacagcactatcatgacatttatctctttctcatacttgtt

SEQ ID NO: 2111 - DNA, 1129 bp, Diabrotica virgifera
atcaaacacacgctaaacatatcaaaatagcatgtaccaaaatatacagtcactgcgcacgctaaataataacgtcactggcttgatgaagtttaattcgcgtgtacatacctaacttttttatttgcgtacacgttagcgtgtacctagacacagcgaaatataaccataataataactaatgtaaaactatgtgacgtcacgggtcgtttgaactattttataccgctgaagactttaaatacgtatttctaagttattacgagtttttgaagcgtgaaattttggaaatctcatttttaaacaaaactgaacattattatgtaataaaaaaattgtgcaagttccctattcggtctcctaaaccttacttcacccatacatacattttattgctatttatataaaacatcatgctttattatttacacaaccttgtaaaattgttgtagtaactataacaatacttaaatattgcaaaaaacggaaatattctctgcaaaaactgaaaaaacaataaaaaaatacaaatttgccacactaaacaacgtttgtttggaaaagtttgaaaaaatctgacatatatgtcaatgaaaattgacactttacgtcatcactccggccgtctattcgtgcatttgtcggctcccagctcccccttcacttatcacaactagtcaccaattgaactacttacatttttaaaaattcgtgtaaaataccaacttttcgaatatgtaaaatgattttttccacggacaatatttttaaagttattcttacttacttactagccaacgcccacccttggcatgttagccatttggcggcgcgctgaccagtatagacgagccgtttctcgtaggcgatcttcatcctcctcgggtgggtctgttatcagggctgggcactctgggaggtgagcagcatccatctggggctgattacatagtggacagttgtcattttcacggacgccgatgcgatgtagatgggagaccaggtagtcatgccccgtagttgttctgaacgcggctacactgatgggtcacggcaagttgtgagggattggtgactctattaggtgggcccaagattttccagcaccggcttgtatttgctggtcttt

SEQ ID NO: 2112 - DNA, 1067 bp, Diabrotica virgifera
gcaactttttggctgaaagaagtatgctgctgcaaatattccggacaataacctcaaaataaataggaagtagacttgtaatagacggccggagtgtgacgtcacggctaacggcggctatattcagtgttatgatcactttccaaacaaacattgtgaacacgttgaaaagatagggatagatatttaccgaatctcaagactttttaattagtataaagttaaaatgtcgcttcctgtgccattttttatgtttaattatagtgtttatttaatttcactatcttacttcagtctcctaaaccttacttcacccatacatacattttattgctatttatataaaacatcatgctttattatttacacaaccttgtaaaattgttgtagtaactataacaatacttaaatattgcaaaaaacggaaatattctctgcaaaaactgaaaaaacaataaaaaaatacaaatttgccacactaaacaacgtttgtttggaaaagtttgaaaaaatctgacatatatgtcaatgaaaattgacactttacgtcatcactccggccgtctattcgtgcatttgtcggctcccagctcccccttcacttatcacaactagtcaccaattgaactacttacatttttaaaaattcgtgtaaaataccaacttttcgaatatgtaaaatgattttttccacggacaatatttttaaagttattcttacttacttactagccaacgcccacccttggcatgttagccatttggcggcgcgctgaccagtatagacgagccgtttctcgtaggcgatcttcatcctcctcgggtgggtctgttatcagggctgggcactctgggaggtgagcagcatccatctggggctgattacatagtggacagttgtcattttcacggacgccgatgcgatgtagatgggagaccaggtagtcatgccccgtagttgttctgaacgcggctacactgatgggtcacggcaagttgtgagggattggtgactctattaggtgggcccaagattttccagcaccggcttgtatttgctggtcttt

SEQ ID NO: 2113 - DNA, 5060 bp, Diabrotica virgifera
atgaaaacttggtttattttcaacaataactggtttaaaaaagtacaaaaaatacgaacaattttacaccaaaaaattacatatatttcgtgaatagtaatgtatgcttaacaaagttgcaactcaaagacaatattttcctataaatacgaaaaaagcaccaaaaaattccaaatgaaatacactattattacctatttactagaaatgttctacgttgtttttgaaaacataaccctcatctggaagaaaagtgacacaactaaaaaaactcataattccagtttcttattaaattgactccaaaaattctatacttttaccaggaaaagtacaaaaataacatgtcgttatttatcacgagaaccggtgcatttcgagaaatgccctaggtatttttctttaatttttaaaaaaattaccaatattttaaaagagaagtgacataacttaaaattttgatccttttttctttgttaaagcagttatatcagtttttttgttttgccttttacacaattagaaacattatccatattcttcgtttttaaattataaattttagcagttaccgtttaacttaaagttaaattaatatctaaaaaatccatatttgtctcccctgaaaaaaagttgttttttgagttgtgacacttttcttcgggatgagcgaataagttattgtattcaaataagttaaaaataaatattctatagatattaaacaaaacaatattattaatatattattatattctggcatgtacgtttcttttagttcaattttttaaactatatttgagaatgtgtgcatttatctagaagtggaatgatatatgtatacaatcacaaagtataaattaaatcacaggctatatggaattattagaataaacaatagtttcagacaagaatgagttactactgattttgcatgtcaatctaatgacatacatttgtggaatctacatcaaagtttaatgtatatttactggcaacttataatgagcttataatctacaagattcctatgcaggggttgcccccaaaatctcaactgtcaacacgcctaacttcacgcgcaactttgatacatcattaaatcaaattctataatattctatatattaatttttcttaatattatgtacgcgagttgctgtgaatatgatagggtcatatccaacttggtacctatgcattttggatgtatcaaagttgcgcgtgaagttaggcgtgttgatgacagttgatcttttgggctgcaccccctagggggattattattccccctaggggaaattatttctaacttaaatcacaaggtggcgatggtgaatatctttctcgacaaaaagataacatatttcccctttttacagcaaaaaactagtataataaatcaacaccttccacagataagactagacacctatgtaggtatcacagtggagcaagaactacatgtaaagatgaaactaatgctttatatacaaatcgattaaatccttttcaaaatcttcacttatcgcaatgcttgaagtagaagaaaatatatggattgaaagaggtctcctcttctactgaaaaattttgtcaatgaccagagagtagtattgggaccgtgcaagttcggaaaagcgacacctggtttcatagttcggcaacttttttcacacttttaattatattggccaatcatattagtcctggttgctggataattaattgtcaaggccgaagcccaaaaaaattataagaagagaaagtaagatttaggttatgttattaaaaggtaaacaattgtatgtagtaaataaaattaaattattaaaatgcagtactgcaagcaaaatacaattaataaatttacttttatataataattgcatatcatatcaatattgtggagtaacatataatttttcttcttcaatgacagtaggtatgaaatatacgtcaatttgacaatttcaattgacaagatgaattatttaagaaagttgcaacatttttccgctattcgcgcacgatcgtttctcgtatcccctccaagtacttgcacatcgcgaatacaacaaaacatctatatgaaatctctagcacgcagattttcaagatagaaaaataagatcgttgataattgcgaatgctagtacttacataatgaaagttttcgttaccactaggttagaacacataagttttcttatccatttaagagatttaaacagttacatagattaaagagtaaccgacaaatctggacaagattctactgttaagctactaccaaataactcaaaggaaatattttggtggtttaaaaacccacgcaatgttagcttttagtaacatcaaatgtatgactacaatatgatgaggagagtattaatagtattaaactaggaactatacattgtaatcatttagtcctactcttatgtgaaaatttagttactacattagcagttctgatcatctaacacaaggtaaagtattcattttttttttctatttggcccagcttaagatcgaacggatcaattcaattctgtcaattcgagttcgtattgtgaagtttagtcaatatattaaccaaaaacacaaacaattggtatacatatttataaaaatggttttaaataaaaagataattggtaaaaatgatatgctacactttttatcattacttaatatcaaaaacaattgccaaacacaaaggaataggaaggaatggtatgtgcagtatgcacattgatcaaggcatcagttaagaagctaagacatttgaaacgtagctgtatagacgtattttgagaatatcttgggtggtatttcaaaaggggaagtactttgtaaaaagaagtaaagtctatttagcagtaaatggttgacttcaattaaaacatcctgggttaaccgataatagtataaaaggcccggtttcaagtaaaatttaaatgtttcatttacatatttcaggtaaaaattttgtggatcctttgctttattataggagtaccgtctagtcagtgttaattgtcaaaagaccatctctggctacctcgttcgcttatcgctccggaccggtcttaacaatgggccaagtcagataaatttaataatatttacgaccgcactatttgaagttaaccattttctgctaaacaaactttaccgcaaatcttatttttatccaatattgcagtgaataacattttcttttagttgtttgaggtttgtgaaaaaactgcgctgtatataaccaacaagttacagacttgtgcttttttaaactaccgagaaaaaactatttattaagatttaaagaaaaattcaccaagtgataaacataacgtaatacgcatcgttgtacatagtactttgtatcagtacggaagattttacacaaaacatctactatataaacatctgtaacaaatgttctaggatctaaaacaattatagtttaatttaaaaaacataaaggaattatttactgtactaatcaacttaacacattgcgtgccacgtcgctctgtacgagagacactgatgttctgccaggggccacatcgctcatttttgatatacacgtacgtttattgccgtggcccccgagagtattatcccgattaaggcgtggcacgcaatgaattaagatattcccaagcttacacaaagaatatgtgcataaggttggctgtaagccaacatactacttggcaacatggctattatacagacaggtaaatgccaaacacggtaaagtattgttcgtaccaaacccttctttcagtgcgtcatagtttatcgaattctcgcgaaagttagaagtgacagaaaaaaaggtacgttcgtgagtattattgttgttgcatattaaagcaacttctacttatggatgcataagtggttgacgtatagaatacgctaaatagataactaattaatgatgcgaataaagataatttgacgcaaaagtactcgatcgtgacagtactttcacattgtcaacgggtaaaattacaattgttattctaggttagtattttccgacattgtatagtgaacattttattttatatttatttattttgcattaaaatattttaaataataatattttggcaactgccagagggtttggtttgaactttagaaatgacacaatgccacggttacagttaacaacaaataaaactttgcagttacgtcactgcatgattgacaagcttgtaaaacaaaaacacattcgcgtagccggatgctgtgaataaacgcattctaccgtgtaatggttttcaaaaaataggctgtgatatggctgtgttttaaaattaaaacaaatttgtagaatgataacgcacctccgctcagtgtcataagtcaaaaaagcaaaatatcgagaaaacgtttaaaatttgtgctagaaattttccgggtttaattcaaaaactgttaaaattaatataataactattttagtcagttacaaaggtttatgaagctctacaaaatagtgtattaattgtgcaaataatatattaaaaaaatatatttgtttgagttgtgacactatacagataaaataacgaaaaatgtacgaaacattatttatcaaaagtgggtcttgcaatacagaatataataatcatcattattataatctggttaacatactttttaatgatgtaactttaaatataagtaacagcattaaacaaaaaatactgcaaaaagaaagataaataagtgataaatgtgtcacttttcttgagcacatacgcagattgttttgaataaagtaatcacatatactgtcttaattagacaaacgccgctttatatacattttaaatggacaaatgccgtgcacaagtcgatatgtgacactgtttatgttcggtgcaccgttgattttggttaatcatataatgactctagtgttatctaaaggtacgattccgacatcgacggcagttgcagttgtcgccatgacagacgtcactactttgcactattaatttgtatgagactgattccgacatctaact

SEQ ID NO: 2114 - DNA, 5048 bp, Diabrotica virgifera
atgaaaacttggtttattttcaacaataactggtttaaaaaagtacaaaaaatacgaacaattttacaccaaaaaattacatatatttcgtgaatagtaatgtatgcttaacaaagttgcaactcaaagacaatattttcctataaatacgaaaaaagcaccaaaaaattccaaatgaaatacactattattacctatttactagaaatgttctacgttgtttttgaaaacataaccctcatctggaagaaaagtgacacaactaaaaaaactcataattccagtttcttattaaattgactccaaaaattctatacttttaccaggaaaagtacaaaaataacatgtcgttatttatcacgagaaccggtgcatttcgagaaatgccctaggtatttttctttaatttttaaaaaaattaccaatattttaaaagagaagtgacataacttaaaattttgatccttttttctttgttaaagcagttatatcagtttttttgttttgccttttacacaattagaaacattatccatattcttcgtttttaaattataaattttagcagttaccgtttaacttaaagttaaattaatatctaaaaaatccatatttgtctcccctgaaaaaaagttgttttttgagttgtgacacttttcttcgggatgagcgaataagttattgtattcaaataagttaaaaataaatattctatagatattaaacaaaacaatattattaatatattattatattctggcatgtacgtttcttttagttcaattttttaaactatatttgagaatgtgtgcatttatctagaagtggaatgatatatgtatacaatcacaaagtataaattaaatcacaggctatatggaattattagaataaacaatagtttcagacaagaatgagttactactgattttgcatgtcaatctaatgacatacatttgtggaatctacatcaaagtttaatgtatatttactggcaacttataatgagcttataatctacaagattcctatgcaggggttgcccccaaaatctcaactgtcaacacgcctaacttcacgcgcaactttgatacatcattaaatcaaattctataatattctatatattaatttttcttaatattatgtacgcgagttgctgtgaatatgatagggtcatatccaacttggtacctatgcattttggatgtatcaaagttgcgcgtgaagttaggcgtgttgatgacagttgatcttttgggctgcaccccctagggggattattattccccctaggggaaattatttctaacttaaatcacaaggtggcgatggtgaatatctttctcgacaaaaagataacatatttcccctttttacagcaaaaaactagtataataaatcaacaccttccacagataagactagacacctatgtaggtatcacagtggagcaagaactacatgtaaagatgaaactaatgctttatatacaaatcgattaaatccttttcaaaatcttcacttatcgcaatgcttgaagtagaagaaaatatatggattgaaagaggtctcctcttctactgaaaaattttgtcaatgaccagagagtagtattgggaccgtgcaagttcggaaaagcgacacctggtttcatagttcggcaacttttttcacacttttaattatattggccaatcatattagtcctggttgctggataattaattgtcaaggccgaagcccaaaaaaattataagaagagaaagtaagatttaggttatgttattaaaaggtaaacaattgtatgtagtaaataaaattaaattattaaaatgcagtactgcaagcaaaatacaattaataaatttacttttatataataattgcatatcatatcaatattgtggagtaacatataatttttcttcttcaatgacagtaggtatgaaatatacgtcaatttgacaatttcaattgacaagatgaattatttaagaaagttgcaacatttttccgctattcgcgcacgatcgtttctcgtatcccctccaagtacttgcacatcgcgaatacaacaaaacatctatatgaaatctctagcacgcagattttcaagatagaaaaataagatcgttgataattgcgaatgctagtacttacataatgaaagttttcgttaccactaggttagaacacataagttttcttatccatttaagagatttaaacagttacatagattaaagagtaaccgacaaatctggacaagattctactgttaagctactaccaaataactcaaaggaaatattttggtggtttaaaaacccacgcaatgttagcttttagtaacatcaaatgtatgactacaatatgatgaggagagtattaatagtattaaactaggaactatacattgtaatcatttagtcctactcttatgtgaaaatttagttactacattagcagttctgatcatctaacacaaggtaaagtattcattttttttttctatttggcccagcttaagatcgaacggatcaattcaattctgtcaattcgagttcgtattgtgaagtttagtcaatatattaaccaaaaacacaaacaattggtatacatatttataaaaatggttttaaataaaaagataattggtaaaaatgatatgctacactttttatcattacttaatatcaaaaacaattgccaaacacaaaggaataggaaggaatggtatgtgcagtatgcacattgatcaaggcatcagttaagaagctaagacatttgaaacgtagctgtatagacgtattttgagaatatcttgggtggtatttcaaaaggggaagtactttgtaaaaagaagtaaagtctatttagcagtaaatggttgacttcaattaaaacatcctgggttaaccgataatagtataaaaggcccggtttcaagtaaaatttaaatgtttcatttacatatttcaggtaaaaattttgtggatcctttgctttattataggagtaccgtctagtcagtgttaattgtcaaaagaccatctctggctacctcgttcgcttatcgctccggaccggtcttaacaatgggccaagtcagataaatttaataatatttacgaccgcactatttgaagttaaccattttctgctaaacaaactttaccgcaaatcttatttttatccaataacattttcttttagttgtttgaggtttgtgaaaaaactgcgctgtatataaccaacaagttacagacttgtgcttttttaaactaccgagaaaaaactatttattaagatttaaagaaaaattcaccaagtgataaacataacgtaatacgcatcgttgtacatagtactttgtatcagtacggaagattttacacaaaacatctactatataaacatctgtaacaaatgttctaggatctaaaacaattatagtttaatttaaaaaacataaaggaattatttactgtactaatcaacttaacacattgcgtgccacgtcgctctgtacgagagacactgatgttctgccaggggccacatcgctcatttttgatatacacgtacgtttattgccgtggcccccgagagtattatcccgattaaggcgtggcacgcaatgaattaagatattcccaagcttacacaaagaatatgtgcataaggttggctgtaagccaacatactacttggcaacatggctattatacagacaggtaaatgccaaacacggtaaagtattgttcgtaccaaacccttctttcagtgcgtcatagtttatcgaattctcgcgaaagttagaagtgacagaaaaaaaggtacgttcgtgagtattattgttgttgcatattaaagcaacttctacttatggatgcataagtggttgacgtatagaatacgctaaatagataactaattaatgatgcgaataaagataatttgacgcaaaagtactcgatcgtgacagtactttcacattgtcaacgggtaaaattacaattgttattctaggttagtattttccgacattgtatagtgaacattttattttatatttatttattttgcattaaaatattttaaataataatattttggcaactgccagagggtttggtttgaactttagaaatgacacaatgccacggttacagttaacaacaaataaaactttgcagttacgtcactgcatgattgacaagcttgtaaaacaaaaacacattcgcgtagccggatgctgtgaataaacgcattctaccgtgtaatggttttcaaaaaataggctgtgatatggctgtgttttaaaattaaaacaaatttgtagaatgataacgcacctccgctcagtgtcataagtcaaaaaagcaaaatatcgagaaaacgtttaaaatttgtgctagaaattttccgggtttaattcaaaaactgttaaaattaatataataactattttagtcagttacaaaggtttatgaagctctacaaaatagtgtattaattgtgcaaataatatattaaaaaaatatatttgtttgagttgtgacactatacagataaaataacgaaaaatgtacgaaacattatttatcaaaagtgggtcttgcaatacagaatataataatcatcattattataatctggttaacatactttttaatgatgtaactttaaatataagtaacagcattaaacaaaaaatactgcaaaaagaaagataaataagtgataaatgtgtcacttttcttgagcacatacgcagattgttttgaataaagtaatcacatatactgtcttaattagacaaacgccgctttatatacattttaaatggacaaatgccgtgcacaagtcgatatgtgacactgtttatgttcggtgcaccgttgattttggttaatcatataatgactctagtgttatctaaaggtacgattccgacatcgacggcagttgcagttgtcgccatgacagacgtcactactttgcactattaatttgtatgagactgattccgacatctaact

SEQ ID NO: 2115 - DNA, 3862 bp, Diabrotica virgifera
atgaaaacttggtttattttcaacaataactggtttaaaaaagtacaaaaaatacgaacaattttacaccaaaaaattacatatatttcgtgaatagtaatgtatgcttaacaaagttgcaactcaaagacaatattttcctataaatacgaaaaaagcaccaaaaaattccaaatgaaatacactattattacctatttactagaaatgttctacgttgtttttgaaaacataaccctcatctggaagaaaagtgacacaactaaaaaaactcataattccagtttcttattaaattgactccaaaaattctatacttttaccaggaaaagtacaaaaataacatgtcgttatttatcacgagaaccggtgcatttcgagaaatgccctaggtatttttctttaatttttaaaaaaattaccaatattttaaaagagaagtgacataacttaaaattttgatccttttttctttgttaaagcagttatatcagtttttttgttttgccttttacacaattagaaacattatccatattcttcgtttttaaattataaattttagcagttaccgtttaacttaaagttaaattaatatctaaaaaatccatatttgtctcccctgaaaaaaagttgttttttgagttgtgacacttttcttcgggatgagcgaataagttattgtattcaaataagttaaaaataaatattctatagatattaaacaaaacaatattattaatatattattatattctggcatgtacgtttcttttagttcaattttttaaactatatttgagaatgtgtgcatttatctagaagtggaatgatatatgtatacaatcacaaagtataaattaaatcacaggctatatggaattattagaataaacaatagtttcagacaagaatgagttactactgattttgcatgtcaatctaatgacatacatttgtggaatctacatcaaagtttaatgtatatttactggcaacttataatgagcttataatctacaagattcctatgcaggggttgcccccaaaatctcaactgtcaacacgcctaacttcacgcgcaactttgatacatcattaaatcaaattctataatattctatatattaatttttcttaatattatgtacgcgagttgctgtgaatatgatagggtcatatccaacttggtacctatgcattttggatgtatcaaagttgcgcgtgaagttaggcgtgttgatgacagttgatcttttgggctgcaccccctagggggattattattccccctaggggaaattatttctaacttaaatcacaaggtggcgatggtgaatatctttctcgacaaaaagataacatatttcccctttttacagcaaaaaactagtataataaatcaacaccttccacagataagactagacacctatgtaggtatcacagtggagcaagaactacatgtaaagatgaaactaatgctttatatacaaatcgattaaatccttttcaaaatcttcacttatcgcaatgcttgaagtagaagaaaatatatggattgaaagaggtctcctcttctactgaaaaattttgtcaatgaccagagagtagtattgggaccgtgcaagttcggaaaagcgacacctggtttcatagttcggcaacttttttcacacttttaattatattggccaatcatattagtcctggttgctggataattaattgtcaaggccgaagcccaaaaaaattataagaagagaaagtaagatttaggttatgttattaaaaggtaaacaattgtatgtagtaaataaaattaaattattaaaatgcagtactgcaagcaaaatacaattaataaatttacttttatataataattgcatatcatatcaatattgtggagtaacatataatttttcttcttcaatgacagtaggtatgaaatatacgtcaatttgacaatttcaattgacaagatgaattatttaagaaagttgcaacatttttccgctattcgcgcacgatcgtttctcgtatcccctccaagtacttgcacatcgcgaatacaacaaaacatctatatgaaatctctagcacgcagattttcaagatagaaaaataagatcgttgataattgcgaatgctagtacttacataatgaaagttttcgttaccactaggttagaacacataagttttcttatccatttaagagatttaaacagttacatagattaaagagtaaccgacaaatctggacaagattctactgttaagctactaccaaataactcaaaggaaatattttggtggtttaaaaacccacgcaatgttagcttttagtaacatcaaatgtatgactacaatatgatgaggagagtattaatagtattaaactaggaactatacattgtaatcatttagtcctactcttatgtgaaaatttagttactacattagcagttctgatcatctaacacaaggtaaagtattcattttttttttctatttggcccagcttaagatcgaacggatcaattcaattctgtcaattcgagttcgtattgtgaagtttagtcaatatattaaccaaaaacacaaacaattggtatacatatttataaaaatggttttaaataaaaagataattggtaaaaatgatatgctacactttttatcattacttaatatcaaaaacaattgccaaacacaaaggaataggaaggaatggtatgtgcagtatgcacattgatcaaggcatcagttaagaagctaagacatttgaaacgtagctgtatagacgtattttgagaatatcttgggtggtatttcaaaaggggaagtactttgtaaaaagaagtaaagtctatttagcagtaaatggttgacttcaattaaaacatcctgggttaaccgataatagtataaaaggcccggtttcaagtaaaatttaaatgtttcatttacatatttcaggtaaaaattttgtggatcctttgctttattataggagtaccgtctagtcagtgttaattgtcaaaagaccatctctggctacctcgttcgcttatcgctccggaccggtcttaacaatgggccaagtcagataaatttaataatatttacgaccgcactatttgaagttaaccattttctgctaaacaaactttaccgcaaatcttatttttatccaatattgcagtgaataacattttcttttagttgtttgaggtttgtgaaaaaactgcgctgtatataaccaacaagttaccgacttgtgcttttttaaactaccgagaaaaaactatttattaagatttaaagaaaaattcaccaagtgataaacataacgtaatacgcatcgttgtacatagtactttgtatcagtacggaagattttacacaaaacatctactatataaacatctgtaacaaatgttctaggatctaaaacaattatagtttaatttaaaaaacataaaggaattatttactgtactaatcaacttaacacattgcgtgccacgtcgctcatatatgagagacactgatgttctgtcagggggcacgtcgctcatttttgatatacacgtacgttcattgccgtggcccccgagagtattattccgattaaggcgtggcacgcaatgtgttaagagattcccaagcttacacaaagaataggtgcataaggttggctgtaagccaacatactacttggcaacatggctattatagtagagaatattatacagacaggcaaattccaaacacggtaaagtattgttcgtaccaaacccttctttcagtgcgtcatagtttatcgaattctcgcgaaagttagaagtgacag

SEQ ID NO: 2116 - DNA, 3850 bp, Diabrotica virgifera
atgaaaacttggtttattttcaacaataactggtttaaaaaagtacaaaaaatacgaacaattttacaccaaaaaattacatatatttcgtgaatagtaatgtatgcttaacaaagttgcaactcaaagacaatattttcctataaatacgaaaaaagcaccaaaaaattccaaatgaaatacactattattacctatttactagaaatgttctacgttgtttttgaaaacataaccctcatctggaagaaaagtgacacaactaaaaaaactcataattccagtttcttattaaattgactccaaaaattctatacttttaccaggaaaagtacaaaaataacatgtcgttatttatcacgagaaccggtgcatttcgagaaatgccctaggtatttttctttaatttttaaaaaaattaccaatattttaaaagagaagtgacataacttaaaattttgatccttttttctttgttaaagcagttatatcagtttttttgttttgccttttacacaattagaaacattatccatattcttcgtttttaaattataaattttagcagttaccgtttaacttaaagttaaattaatatctaaaaaatccatatttgtctcccctgaaaaaaagttgttttttgagttgtgacacttttcttcgggatgagcgaataagttattgtattcaaataagttaaaaataaatattctatagatattaaacaaaacaatattattaatatattattatattctggcatgtacgtttcttttagttcaattttttaaactatatttgagaatgtgtgcatttatctagaagtggaatgatatatgtatacaatcacaaagtataaattaaatcacaggctatatggaattattagaataaacaatagtttcagacaagaatgagttactactgattttgcatgtcaatctaatgacatacatttgtggaatctacatcaaagtttaatgtatatttactggcaacttataatgagcttataatctacaagattcctatgcaggggttgcccccaaaatctcaactgtcaacacgcctaacttcacgcgcaactttgatacatcattaaatcaaattctataatattctatatattaatttttcttaatattatgtacgcgagttgctgtgaatatgatagggtcatatccaacttggtacctatgcattttggatgtatcaaagttgcgcgtgaagttaggcgtgttgatgacagttgatcttttgggctgcaccccctagggggattattattccccctaggggaaattatttctaacttaaatcacaaggtggcgatggtgaatatctttctcgacaaaaagataacatatttcccctttttacagcaaaaaactagtataataaatcaacaccttccacagataagactagacacctatgtaggtatcacagtggagcaagaactacatgtaaagatgaaactaatgctttatatacaaatcgattaaatccttttcaaaatcttcacttatcgcaatgcttgaagtagaagaaaatatatggattgaaagaggtctcctcttctactgaaaaattttgtcaatgaccagagagtagtattgggaccgtgcaagttcggaaaagcgacacctggtttcatagttcggcaacttttttcacacttttaattatattggccaatcatattagtcctggttgctggataattaattgtcaaggccgaagcccaaaaaaattataagaagagaaagtaagatttaggttatgttattaaaaggtaaacaattgtatgtagtaaataaaattaaattattaaaatgcagtactgcaagcaaaatacaattaataaatttacttttatataataattgcatatcatatcaatattgtggagtaacatataatttttcttcttcaatgacagtaggtatgaaatatacgtcaatttgacaatttcaattgacaagatgaattatttaagaaagttgcaacatttttccgctattcgcgcacgatcgtttctcgtatcccctccaagtacttgcacatcgcgaatacaacaaaacatctatatgaaatctctagcacgcagattttcaagatagaaaaataagatcgttgataattgcgaatgctagtacttacataatgaaagttttcgttaccactaggttagaacacataagttttcttatccatttaagagatttaaacagttacatagattaaagagtaaccgacaaatctggacaagattctactgttaagctactaccaaataactcaaaggaaatattttggtggtttaaaaacccacgcaatgttagcttttagtaacatcaaatgtatgactacaatatgatgaggagagtattaatagtattaaactaggaactatacattgtaatcatttagtcctactcttatgtgaaaatttagttactacattagcagttctgatcatctaacacaaggtaaagtattcattttttttttctatttggcccagcttaagatcgaacggatcaattcaattctgtcaattcgagttcgtattgtgaagtttagtcaatatattaaccaaaaacacaaacaattggtatacatatttataaaaatggttttaaataaaaagataattggtaaaaatgatatgctacactttttatcattacttaatatcaaaaacaattgccaaacacaaaggaataggaaggaatggtatgtgcagtatgcacattgatcaaggcatcagttaagaagctaagacatttgaaacgtagctgtatagacgtattttgagaatatcttgggtggtatttcaaaaggggaagtactttgtaaaaagaagtaaagtctatttagcagtaaatggttgacttcaattaaaacatcctgggttaaccgataatagtataaaaggcccggtttcaagtaaaatttaaatgtttcatttacatatttcaggtaaaaattttgtggatcctttgctttattataggagtaccgtctagtcagtgttaattgtcaaaagaccatctctggctacctcgttcgcttatcgctccggaccggtcttaacaatgggccaagtcagataaatttaataatatttacgaccgcactatttgaagttaaccattttctgctaaacaaactttaccgcaaatcttatttttatccaataacattttcttttagttgtttgaggtttgtgaaaaaactgcgctgtatataaccaacaagttaccgacttgtgcttttttaaactaccgagaaaaaactatttattaagatttaaagaaaaattcaccaagtgataaacataacgtaatacgcatcgttgtacatagtactttgtatcagtacggaagattttacacaaaacatctactatataaacatctgtaacaaatgttctaggatctaaaacaattatagtttaatttaaaaaacataaaggaattatttactgtactaatcaacttaacacattgcgtgccacgtcgctcatatatgagagacactgatgttctgtcagggggcacgtcgctcatttttgatatacacgtacgttcattgccgtggcccccgagagtattattccgattaaggcgtggcacgcaatgtgttaagagattcccaagcttacacaaagaataggtgcataaggttggctgtaagccaacatactacttggcaacatggctattatagtagagaatattatacagacaggcaaattccaaacacggtaaagtattgttcgtaccaaacccttctttcagtgcgtcatagtttatcgaattctcgcgaaagttagaagtgacag

SEQ ID NO: 2117 - DNA, 716 bp, Diabrotica virgifera
ggcgcatgtccgacatatcgcacctccgttcaaagaggtcataagtcaaaaatgaaaagtttcgagaaaacgacgtttaaagtttgtcctacaacattttcgggtttaattcaaaatctattaaaattagaataactattttagttagttgcaatggtatttgaagctgtataaaatagcgtattaaatatattaaaaatattgaaaaaaatcaatttctttttgagttgtgacactatacagataaaataacgaaaaatttacgaaatattatttatcaaaagtgacacttgcagtacagaatataatatcattattattatctggttaacagacttataccttttaatgatgtaactttaaatacaagtaacaacattaaacacaaaatactgcaaaatgaaagataaataagtgataaatgtgtcacttttcttgagcacatacgcagattgttttgaataaagtaatcacatatactgtcttaattagacaaacgccgctttatatacattttaaatggacaaatgccgtgcacaagtcgatatgtgacactgtttatgttcggtgcaccgttgattttggttaatcatataatgactctagtgttatctaaaggtacgattccgacatcgacggcagttgcagttgtcgccatgacagacgtcactactttgcactattaatttgtatgagactgattccgacatctaact

SEQ ID NO: 2118 - DNA, 722 bp, Diabrotica virgifera
atgaaaacttggtttattttcaacaataactggtttaaaaaagtacaaaaaatacgaacaattttacaccaaaaaattacatatatttcgtgaatagtaatgtatgcttaacaaagttgcaactcaaagacaatattttcctataaatacgaaaaaagcaccaaaaaattccaaatgaaatacactattattacctatttactagaaatgttctacgttgtttttgaaaacataaccctcatctggaagaaaagtgacacaactaaaaaaactcataattccagtttcttattaaattgactccaaaaattctatacttttaccaggaaaagtggaaaatttggcagtaaaatgaatatgtatgtttattccgcaacactgacacttttcagttattctctgacgttcgacgtgaacatgtcgttatttatcacgagaaccgttgcatttcgagaaatgccctaggtatttttctttaattttaaaaaattaccaatatttaaaagaaaagtgacataacttaaaattttgatccttttttccttgttaaagcagatatcgcagttttttgttttgccttttacacaattagaaacagttaccgtttaaaacttaacagttaaattaagatctaaaaaatccatatttgtctcccctgaataaaaggtgttttttgagttgtgacacttttcttcgggatgagcgaataagttattgtattc

SEQ ID NO: 2119 - DNA, 2238 bp, Diabrotica virgifera
catattaatgtctaactcttggagagtacagggaatgtatcttttttatttatgcacgtgccctagtattgtatagggcgcaaaagtcgaggtctcgaaaaatgatggcggacagttgatctcaggattgggatatctgaaacaaagtaatcgtgctgcatttgaaaagggaaggtttcttacatgacaatttaccacaatttgaccaaacaataaaaaataagtatttttaacaatgaaaaactgaagaaaaacggatgattttttcacaaaaatcactaactggggtaacttgtcacgtaggaagcccttcttttcaaatgccgtgcgatttttttgtttcagagatcccaatcctgagattaactgtccgccatcggaatacttttttcgaggcctcgactttggcgccctctacaatattggtggacgtgcataagtgaaggaagatatattttttgtattctttaagagttggatattaatatgtatgtaaaaagttttatgttcatttttaataaaggttctgagagggaagatcttgaaaaattgcttatttttggtcttctaaagtgcactagtaccttaaccaacggtgaaaccaagtccttgattcttatataatgtatttaatcaaaaaaagcatgcgaaatgcacgaataccgcctgatttttcctatgacctattcattttttgtaggattgtaataatggtacagaaagtgagaggtgagtagtaccactgtttattcgcgtttgtaattcgaaatcaggtgatgttcacatgtcattgtttaggaggactatttctttgcagtacatacattatagtgatagccgttttacagctactctgcgcttttaatttattaaaaactgaattgaacactcaaaatgttgtccaaaactattatccaaccaaattcgaaaatatttagttttggcgagatgatataatatcaatgggagtattctgggtatctgggttgcagtcaacaatatagtgatgttgattatagttactttcgagtattctttctgtgaatttatttcttttcattctgtgaatttgtgaattatctactatctaatctccatcggcaaatcgcttagatctagataaaatcttagatctttgttaatgacatacattacataatttacgtataccattatacctccctctgtttcatcttctaccttctcctcaccctcacacccttaaaacgcttcataccaataacgatattcgctaacactcgtaaaatacctgtccctctactggttgtagatacaatagtcgttactcgctctgatacgattggtacgaattattcaaagtagatacaatagtcgttactcgctctgatacgattggtacgaagttatcagagtaatcaaagtaacgatttgcctctctgtatagtaatcgttactttcggtattcgtaagtaacgagtactttgtaacgaatagttacttttcaacatctctacaacaataatctaacattatgtatgttcgaggagactgtcagggagtccacgacaagtggagcatatacaaggtatatttactattaattaattattaactattaatatactggtatatttatcaatcaagggtaatacattaaatacatttatggaattaaagtgcgcatgcgattttgtcgtggactagttcctgattgttaccgcgaacatacttaatattgacacttgatacttgacacttttcatcctttctacacatctctcaggtcatctttcggacacggtatgaactaatttcatggccttagcatttatgtgttgtgcagagtttattttttcaagtctgacttgatgattttggtttaagttgtttattgatgcccagtgtcatttgttatagaagttttaaagttatttccagttaccacattttaccaaaaattaacacgacctatgataatgtttcattacgtctaaattaaaaagtatattattcatttattttccatatttattctttctacattctaaacaaactgcgatagacattagctctttaataaatatgtcaggggtcttgttgtcctcaatactgttgataatttagcagggctatattggttatacaagtttatacagagttattgattatggaaaatccattgattcactttgcagtacagactatcattgaaatttgtgattttatagactagttcctgttttgacgatttgatgt

SEQ ID NO: 2120 - DNA, 1472 bp, Diabrotica virgifera
catattaatgtctaactcttggagagtacagggaatgtatcttttttatttatgcacgtgccctagtattgtatagggcgcaaaagtcgaggtctcgaaaaatgatggcggacagttgatctcaggattgggatatctgaaacaaagtaatcgtgctgcatttgaaaagggaaggtttcttacatgacaatttaccacaatttgaccaaacaataaaaaataagtatttttaacaatgaaaaactgaagaaaaacggatgattttttcacaaaaatcactaactggggtaacttgtcacgtaggaagcccttcttttcaaatgccgtgcgatttttttgtttcagagatcccaatcctgagattaactgtccgccatcggaatacttttttcgaggcctcgactttggcgccctctacaatattggtggacgtgcataagtgaaggaagatatattttttgtattctttaagagttggatattaatatgtatgtaaaaagttttatgttcatttttaataaaggttctgagagggaagatcttgaaaaattgcttatttttggtcttctaaagtgcactagtaccttaaccaacggtgaaaccaagtccttgattcttatataatgtatttaatcaaaaaaagcatgcgaaatgcacgaataccgcctgatttttcctatgacctattcattttttgtaggattgtaataatggtacagaaagtgagaggtgagtagtaccactgtttattcgcgtttgtaattcgaaatcaggtgatgttcacatgtcattgtttaggaggactatttctttgcagtacatacattatagtgatagccgttttacagctactctgcgcttttaatttattaaaaactgaattgaacactcaaaatgttgtccaaaactattatccaaccaaattcgaaaatatttagttttggcgagatgatataatatcaatgggagtattctgggtatctgggtcgcagtcaacaatatagtgatgttgattatagttactttcgagtattcgttacaaatcgttacttttgtataaagtaatcatttacagtattcgttactttgattactatgattacttttgtatttgagtaccggtaatcatatcgagaatcgtatttctcggtaggtaggtattttgtataggtattccgatataacaacgaccttcaccgatctgtttaatggataaaaatgatgtgataggtatgtaaaatctaaaatgcccggctttatttttcttttcattctgtgaatttgtgaattatctactatctaatctccatcggcaaatcgcgtagatctagataaaaatacagggttctcgcattcgatctttgttaatgacatacattacataatttacgtataccattatacctccctctgtttcatcttctaccttctcctcgccctcacactcttaaaacgcttcataccaataacga

SEQ ID NO: 2121 - DNA, 1257 bp, Diabrotica virgifera
attgcccatttttggtcttttaaagttagtcctgtcgccaggggggaacggcctccttaattcagatggacccactcaagctttccccatgtatttcgacccgtagaacacgaattctttgggcaacagtcgatctgaaccaaggaggccgttgtacccctactggcgacaggaccaagtgtactaagccaagttttttaaccaagaggagtgattcaaatttaccgcgctgtattgcttgtttgtaattggtccaaccgcaggcaagtttactccactgttataaaattttgacactaatgacatttatcaaattttgacactagtgacatttcataggttaattaagttatatcggcgatttttgtgttttctgtgttattcctttaatttttagattgttagtctgcttttatataaaaagcagttgtttttggaactctttagcgacgtattaatttaatataatatttatggattaccgttgagggccgactagatcaaccaaaaaagaagatgtatttggttattattctagtgactttcttgggtgtgaatctgtctttttagtttactcctcctggttaaaaaataaactataattaattattaactattaatatactggtatatttatcaatcaagggtaatacattaaatacatttatggaattaaagtgcgcatgcgattttgtcgtggactagttcctgattgttaccgcgaacatacttaatattgacacttgatacttgacacttttcatcctttctacacatctctcaggtcatctttcggacacggtatgaactaatttcatggccttagcatttatgtgttgtgcagagtttattttttcaagtctgacttgatgattttggtttaagttgtttattgatgcccagtgtcatttgttatagaagttttaaagttatttccagttaccacattttaccaaaaattaacacgacctatgataatgtttcattacgtctaaattaaaaagtatattattcatttattttccatatttattctttctacattctaaacaaactgcgatagacattagctctttaataaatatgtcaggggtcttgttgtcctcaatactgttgataatttagcagggctatattggttatacaagtttatacagagttattgattatggaaaatccattgattcactttgcagtacagactatcattgaaatttgtgattttatagactagttcctgttttgacgatttgatgt

SEQ ID NO: 2122 - DNA, 1202 bp, Diabrotica virgifera
tggattttgaggtagacatcagaaacatgtgaaacaaaaaattcaaaaagattttattaccttatgaattcctcgaagtaatgctatggattttgttagtttaaacgatttttgactttctggtatcactatggtttgttttttaaccaagaggagtgattcaaatttaccgcgctgtattgcttgtttgtaattggtccaaccgcaggcaagtttactccactgttataaaattttgacactaatgacatttatcaaattttgacactagtgacatttcataggttaattaagttatatcggcgatttttgtgttttctgtgttattcctttaatttttagattgttagtctgcttttatataaaaagcagttgtttttggaactctttagcgacgtattaatttaatataatatttatggattaccgttgagggccgactagatcaaccaaaaaagaagatgtatttggttattattctagtgactttcttgggtgtgaatctgtctttttagtttactcctcctggttaaaaaataaactataattaattattaactattaatatactggtatatttatcaatcaagggtaatacattaaatacatttatggaattaaagtgcgcatgcgattttgtcgtggactagttcctgattgttaccgcgaacatacttaatattgacacttgatacttgacacttttcatcctttctacacatctctcaggtcatctttcggacacggtatgaactaatttcatggccttagcatttatgtgttgtgcagagtttattttttcaagtctgacttgatgattttggtttaagttgtttattgatgcccagtgtcatttgttatagaagttttaaagttatttccagttaccacattttaccaaaaattaacacgacctatgataatgtttcattacgtctaaattaaaaagtatattattcatttattttccatatttattctttctacattctaaacaaactgcgatagacattagctctttaataaatatgtcaggggtcttgttgtcctcaatactgttgataatttagcagggctatattggttatacaagtttatacagagttattgattatggaaaatccattgattcactttgcagtacagactatcattgaaatttgtgattttatagactagttcctgttttgacgatttgatgt

SEQ ID NO: 2123 - DNA, 1168 bp, Diabrotica virgifera
aacatctctacaacaataatctaacattatgtatgttcgaggagactgtcagggagtccacgacaagtggagcatatacaaggtatatttactattaaagtttgttttttaaccaagaggagtgattcaaatttaccgcgctgtattgcttgtttgtaattggtccaaccgcaggcaagtttactccactgttataaaattttgacactaatgacatttatcaaattttgacactagtgacatttcataggttaattaagttatatcggcgatttttgtgttttctgtgttattcctttaatttttagattgttagtctgcttttatataaaaagcagttgtttttggaactctttagcgacgtattaatttaatataatatttatggattaccgttgagggccgactagatcaaccaaaaaagaagatgtatttggttattattctagtgactttcttgggtgtgaatctgtctttttagtttactcctcctggttaaaaaataaactataattaattattaactattaatatactggtatatttatcaatcaagggtaatacattaaatacatttatggaattaaagtgcgcatgcgattttgtcgtggactagttcctgattgttaccgcgaacatacttaatattgacacttgatacttgacacttttcatcctttctacacatctctcaggtcatctttcggacacggtatgaactaatttcatggccttagcatttatgtgttgtgcagagtttattttttcaagtctgacttgatgattttggtttaagttgtttattgatgcccagtgtcatttgttatagaagttttaaagttatttccagttaccacattttaccaaaaattaacacgacctatgataatgtttcattacgtctaaattaaaaagtatattattcatttattttccatatttattctttctacattctaaacaaactgcgatagacattagctctttaataaatatgtcaggggtcttgttgtcctcaatactgttgataatttagcagggctatattggttatacaagtttatacagagttattgattatggaaaatccattgattcactttgcagtacagactatcattgaaatttgtgattttatagactagttcctgttttgacgatttgatgt

SEQ ID NO: 2124 - DNA, 676 bp, Diabrotica virgifera
catattaatgtctaactcttggagagtacagggaatgtatcttttttatttatgcacgtgccctagtattgtatagggcgcaaaagtcgaggtctcgaaaaatgatggcggacagttgatctcaggattgggatatctgaaacaaagtaatcgtgctgcatttgaaaagggaaggtttcttacatgacaatttaccacaatttgaccaaacaataaaaaataagtatttttaacaatgaaaaactgaagaaaaacggatgattttttcacaaaaatcactaactggggtaacttgtcacgtaggaagcccttcttttcaaatgccgtgcgatttttttgtttcagagatcccaatcctgagattaactgtccgccatcggaatacttttttcgaggcctcgactttggcgccctctacaatattagtgtacgtgcataaatgcaaaaagatatattttttgtattctcattctgtaagagttagatattaatatgtaaaaactttcatgttcatctttaataaagattctgagaaaaaaatcttgaaaaaatgctcattttttggtctaaaagttagtcctgtcgccaggggggtacaacggcctccccaattcagatggacctactcaagccctccttatgcatttcgacccgtagaacacgaatccttcgggca

SEQ ID NO: 2125 - DNA, 1527 bp, Diabrotica virgifera
  SmartBlast Evalue=2E-92; Info="Cathepsin L-like proteinase"" n= 1 Tax=Diabrotica virgifera virgifera RepID=Q70EX2_DIAVI"
aggaacattgaataacaacaggcgtattttgccccattaccttgtacctattgctataccgcagaaaaggtaatatcttaagacatctttgaccagtcgtatatcattcaaaattcaattatctctattttacttctctaagactatgttccaaaacgaatcgttttaaagttataagcaaagaaagcagaaaaagatcgatgtggttcaaaatttttaaagactatgttccaaaacgaatcgttttaaagttataagcaaagaaagcagaaaaagatcgatgtggttcaaaatttttaaacattttaattcctttatcaatgttccggggatatttgagaaggagcataagtcaattattattactgaaggtgtcacctaactttctctgcaaaaatccgaatgccaactctcacatccaaaaatagacgtttttttacagattattcctggtctatttgtacctacactttgtatacacatcatatttatttacaaaattttatatgacaatacctaacaagtttgtgtttaaaatttataaagtgggatatgaattatctacgttaatttggcacgtattttgtcctcttgctagcttcatgtatccatcttcaccccaatctgctccccatgaatttttgataacaatgtactcatcagtgtaacctgtagcaagtatggcatggtttatattttttccacattcttcgtcatcaaaaactcctcctccatataatgaccatttagttgcatcagcggaaacagcgattgggccaacggtagcgagagctgaaattaaagattcttccgttgcattcagatgtgtgtatcccgagatgggaccgagcgacattttgacatcttctcggcaaacatcatctttcatagtatatggataatcctcttcggagggcatacggttatgtttaagaaacctgaaagctaacctttggtctccaccaccacatccatcgttttcctcagaacagtcgacaagatattgaggactcaaaggaactctttggttgtagttgattgctagttgtccctctagagctccaacgctactgaatgcccaacacgacccacaggatccttggtcccttacaggcagtactgcattctcggtcctccaatcaacagacgaaggcaccttaacgtttggatcggcagtatacactcccaaactcttgtcaagtttgggttttgaagcagattggcgttttaatagagcctcgaattcttctttggtccaatcggcgaatttagtgacccccttgaaccatcccacctctcctttggcgtatcttgcgttgtgctcttcgatttcgcgaaggttgtcttggaaaatttggaatcttagtttatcttctagtagtttgtattgttttgaatgtttagccttgaaagagacccagtgatcataattgttcaattgggcagtaattgccacaataagacaagcaataacaacaatcactttcattgtgtattatcttattcttgacaacaactacagaaatt

SEQ ID NO: 2126 - DNA, 1527 bp, Diabrotica virgifera
  SmartBlast Evalue=2E-92; Info="Cathepsin L-like proteinase"" n= 1 Tax=Diabrotica virgifera virgifera RepID=Q70EX2_DIAVI"
aggaacattgaataacaacaggcgtattttgccccattaccttgtacctattgctataccgcagaaaaggtaatatcttaagacatctttgaccagtcgtatatcattcaaaattcaattatctctattttacttctctaagactatgttccaaaacgaatcgttttaaagttataagcaaagaaagcagaaaaagatcgatgtggttcaaaatttttaaagactatgttccaaaacgaatcgttttaaagttataagcaaagaaagcagaaaaagatcgatgtggttcaaaatttttaaacattttaattcctttatcaatgttccggggatatttgagaaggagcataagtcaattattattactgaaggtgtcacctaactttctctgcaaaaatccgaatgccaactctcacatccaaaaatagacgtttttttacagattattcctggtctatttgtacctacactttgtatacacatcatatttatttacaaaattttatatgacaatacctaacaagtttgtgtttaaaatttataaagtgggatatgaattatctacgttaatttggcacgtattttgtcctcttgctagcttcatgtatccatcttcaccccaatctgctccccatgaatttttgataacaatgtactcatcagtgtaacctgtagcaagtatggcatggtttatattttttccacattcttcgtcatcaaaaactcctcctccatataatgaccatttagttgcatcagcggaaacagcgattgggccaacggtagcgagagctgaaattaaagattcttccgttgcattcagatgtgtgtatcccgagatgggaccgagcgacattttgacatcttctcggcaaacatcatctttcatagtatatggataatcctcttcggagggcatacggttatgtttaagaaacctgaaagctaacctttggtctccaccaccacatccatcgttttcctcagaacagtcgacaagatattgaggactcaaaggaactctttggttgtagttgattgctagttgtccctctagagctccaacggaactgaatgcccaacacgacccacaggatccttggtcccttacaggcagtactgcattctcggtcctccaatcaacagacgaaggcaccttaacgtttggatcggcagtatacactcccaaactcttgtcaagtttgggttttgaagcagattggcgttttaatagagcctcgaattcttctttggtccaatcggcgaatttagtgacccccttgaaccatcccacctctcctttggcgtatcttgcgttgtgctcttcgatttcgcgaaggttgtcttggaaaatttggaatcttagtttatcttctagtagtttgtattgttttgaatgtttagccttgaaagagacccagtgatcataattgttcaattgggcagtaattgccacaataagacaagcaataacaacaatcactttcattgtgtattatcttattcttgacaacaactacagaaatt

SEQ ID NO: 2127 - DNA, 1349 bp, Diabrotica virgifera
  SmartBlast Evalue=2E-92; Info="Cathepsin L-like proteinase"" n= 1 Tax=Diabrotica virgifera virgifera RepID=Q70EX2_DIAVI"
tatatcattcaaaattcaattatctctattttacttccctaagactatgttccaaaacgaatcgttttaaagttataagcaaagaaagcagaaaaagatcgagtgtggttcaaaatttttaaacattttaatccctttatcaatgttccggggatatttgagaaggagcataagtcaattattattactgaaggtgtcacctaactttctctgcaaaaatccgaatgccaactctcacatccaaaaatagacgtttttttacagattattcctggtctatttgtacctacactttgtatacacatcatatttatttacaaaattttatatgacaatacctaacaagtttgtgtttaaaatttataaagtgggatatgaattatctacgttaatttggcacgtattttgtcctcttgctagcttcatgtatccatcttcaccccaatctgctccccatgaatttttgataacaatgtactcatcagtgtaacctgtagcaagtatggcatggtttatattttttccacattcttcgtcatcaaaaactcctcctccatataatgaccatttagttgcatcagcggaaacagcgattgggccaacggtagcgagagctgaaattaaagattcttccgttgcattcagatgtgtgtatcccgagatgggaccgagcgacattttgacatcttctcggcaaacatcatctttcatagtatatggataatcctcttcggagggcatacggttatgtttaagaaacctgaaagctaacctttggtctccaccaccacatccatcgttttcctcagaacagtcgacaagatattgaggactcaaaggaactctttggttgtagttgattgctagttgtccctctagagctccaacgctactgaatgcccaacacgacccacaggatccttggtcccttacaggcagtactgcattctcggtcctccaatcaacagacgaaggcaccttaacgtttggatcggcagtatacactcccaaactcttgtcaagtttgggttttgaagcagattggcgttttaatagagcctcgaattcttctttggtccaatcggcgaatttagtgacccccttgaaccatcccacctctcctttggcgtatcttgcgttgtgctcttcgatttcgcgaaggttgtcttggaaaatttggaatcttagtttatcttctagtagtttgtattgttttgaatgtttagccttgaaagagacccagtgatcataattgttcaattgggcagtaattgccacaataagacaagcaataacaacaatcactttcattgtgtattatcttattcttgacaacaactacagaaatt

SEQ ID NO: 2128 - DNA, 1349 bp, Diabrotica virgifera
  SmartBlast Evalue=2E-92; Info="Cathepsin L-like proteinase"" n= 1 Tax=Diabrotica virgifera virgifera RepID=Q70EX2_DIAVI"
tatatcattcaaaattcaattatctctattttacttccctaagactatgttccaaaacgaatcgttttaaagttataagcaaagaaagcagaaaaagatcgagtgtggttcaaaatttttaaacattttaatccctttatcaatgttccggggatatttgagaaggagcataagtcaattattattactgaaggtgtcacctaactttctctgcaaaaatccgaatgccaactctcacatccaaaaatagacgtttttttacagattattcctggtctatttgtacctacactttgtatacacatcatatttatttacaaaattttatatgacaatacctaacaagtttgtgtttaaaatttataaagtgggatatgaattatctacgttaatttggcacgtattttgtcctcttgctagcttcatgtatccatcttcaccccaatctgctccccatgaatttttgataacaatgtactcatcagtgtaacctgtagcaagtatggcatggtttatattttttccacattcttcgtcatcaaaaactcctcctccatataatgaccatttagttgcatcagcggaaacagcgattgggccaacggtagcgagagctgaaattaaagattcttccgttgcattcagatgtgtgtatcccgagatgggaccgagcgacattttgacatcttctcggcaaacatcatctttcatagtatatggataatcctcttcggagggcatacggttatgtttaagaaacctgaaagctaacctttggtctccaccaccacatccatcgttttcctcagaacagtcgacaagatattgaggactcaaaggaactctttggttgtagttgattgctagttgtccctctagagctccaacggaactgaatgcccaacacgacccacaggatccttggtcccttacaggcagtactgcattctcggtcctccaatcaacagacgaaggcaccttaacgtttggatcggcagtatacactcccaaactcttgtcaagtttgggttttgaagcagattggcgttttaatagagcctcgaattcttctttggtccaatcggcgaatttagtgacccccttgaaccatcccacctctcctttggcgtatcttgcgttgtgctcttcgatttcgcgaaggttgtcttggaaaatttggaatcttagtttatcttctagtagtttgtattgttttgaatgtttagccttgaaagagacccagtgatcataattgttcaattgggcagtaattgccacaataagacaagcaataacaacaatcactttcattgtgtattatcttattcttgacaacaactacagaaatt

SEQ ID NO: 2129 - DNA, 921 bp, Diabrotica virgifera
attaacgacgttctacaccttcggcaaagaattaaggatttgcatgaaattttagtatgttatagtttacttcaaaaaactaagacttgattttttaaaaattgttttaccgtgccgtttaattactattaagggtcaaagttaagttttaacatgggctcttatgggaattcttaaaaagttaataacttttgacccaaatttacgatttttaattatttgtgcttaaattaaaggttttttgtaaggaataacatatctattaaaaaatgaggattgtttaccgtaccatttatttttaatttatttattataattaattccgtaatttccgtaatttattataaattgtttttataaagtattcaatactgaaaaatatgatttgagtattctgctataaatgcattgttaccaactttcgcttgcatataagtttcccccctttcctctgagaggcataccccgcaacgaaggtgtagaacgtcgttaatccacgatcccaactttttttaattcaagatatttattgcaaccatctgactaatgcccataactctttcgaaacgtgtcttttctttttgaaatcttccatcagccatttcgaggtaacaatactatcagatagagcagccaagctaaaattgaaacgtgttaccaaagatctgaagaaacatatagaaagtccgaccaaaggcagaaacaaaaaaaaacagattaagatttagagataacatgaaatattttgagagtattttgtgaatgttatattatctaaaaatttattgtatttggaagttggtagtcgaaaccctaaatatgaaatatagtagttaataggataataattttacatgaaactttttacccctaaaatagttaatgtcttgttagaaacataggctgtaatcttgtccaatc

SEQ ID NO: 2130 - DNA, 556 bp, Diabrotica virgifera
attaacgacgttctacaccttcggcaaagaattaaggatttgcatgaaattttagtatgttatagtttacttcaaaaaactaagacttgattttttaaaaattgttttaccgtgccgtttaattactattaagggtcaaagttaagttttaacatgggctcttatgggaattcttaaaaagttaataacttttgacccaaatttacgatttttaattatttgtgcttaaattaaaggttttttttgtacgaaataacatattaaaaaatgaggattgtttaccgtaccatttatttttaatttatttattataattaattccgtaatttattataatttatttttataaagtattcaatactgaaacatatgatttaagtattctgctagaaatgcattattaccaactttcgcttgcatataagtttccccccctttcctccccgaggcataccccgcaacgaaggtgtagagcgtcgttaaatcgaagagttcagcaagagtctataccggtttcggaggtcttttccccatcagtagtcccatatcctcttct

SEQ ID NO: 2131 - DNA, 538 bp, Diabrotica virgifera
attaacgacgttctacaccttcggcaaagaattaaggatttgcatgaaattttagtatgttatagtttacttcaaaaaactaagacttgattttttaaaaattgttttaccgtgccgtttaattactattaagggtcaaagttaagttttaacatgggctcttatgggaattcttaaaaagttaataacttttgacccaaatttacgatttttaattatttgtgcttaaattaaaggttttttgtaaggaataccatattaaaaaatgaggattgtttaccgtaccatttatttttaatttatttattataattaattccgtaatttattataatttatttttacaaagtattcaatactgaaacatatgatttaagtattctgctataggctgtgagctcgtacgtagaggggatatttacaaattcgcgagcgccagtagtggtaagtctgtaagcgtttaccggaaatttgacataaaagctgtggtatatatttttaccttaaatatacttacgttttaaatactgaatttaag

SEQ ID NO: 2132 - DNA, 464 bp, Diabrotica virgifera
attaacgacgttctacaccttcggcaaagaattaaggatttgcatgaaattttagtatgttatagtttacttcaaaaaactaagacttgattttttaaaaattgttttaccgtgccgtttaattactattaagggtcaaagttaagttttaacatgggctcttatgggaattcttaaaaagttaataacttttgacccaaatttacgatttttaattatttgtgcttaaattaaaggttttttgtaaggaataacatattaaaaaatgaggattgtttaccgtaccattattaaataaaagtgaaaatactgtttcgaaatttgacaaagttggtagtagtgagatcagctgcactcataattatatccgaaacgtacgtgtcaatcacatgacctcggtggtctagttgttgagcgttcggtcagagttcgaaacgtcccgggttccaatcctctacgattca

SEQ ID NO: 2133 - DNA, 1327 bp, Diabrotica virgifera
  SmartBlast Evalue=2E-14; Info=Mucin-like peritrophin n=19 Tax= Aedes aegypti RepID=Q8ISH0_AEDAE
aaatattagtaattattttattaagctcattataacaacagacaaaattatattacaatataacaagtaaagtcttcggttgtaatgtcaaattcattttatgtgttaatatcttctctcgttaatgtttattgcaatctgactgcgctagtactacacatcgtttatttgcttggctccagtaaagatcagctggacattggaaaggacctacccatctattgttttggcattcaaaaaatctgtggcaatcaggtatatactcatttcgatcaccttcttggcaaacgctactagttgtactttcggtgggtgctgcagttggagcatctgttttttcagtggaaactaatagttgagaacaatcagagttttcatcgcatcctggaatgtgtacgttccacagaagaccttcgttacaaaattcgtgctgcttaattccgttaaggcattgatagtatccctgacaattgtaaggatcggcgaaatattcaaggtctatgtcacaatgtaaatctgggttaacagttgaaggattgggaacagcagttgaaggttcggtgacatcagttgaaggttggggggcgacagaagttgagtcaggttcagggataatgtgagctgggaatggtattatgttggagcagtctacgtcttcttttacgtcgcatgctttaactttatcgttccaatatagcccattgtcacaagtatttacctgaggtgctcccttactacaagagtaatatttttgacagtcataaggatagtattcgaatgtctctaaaccatttttgcagtcttcaactatatctcttattaaattaatagcagagtaatcgaatttagattttgcatgtctagcagtcgtgtatggaataacacctaatacacaagccagtactaaaataaaatttattgtatttctcattttactttttcaaaatactgatcaaattagttgctcgttataaaggacaaaaattttatagcttctttaccggatgaagcaaataatcaaacaatttttatcagtaataattgcttaggataaacagatttgaacagaaaaaaacaatgaaaattgaattattatacattagttcttcaaatcgatgtacacttaaccttgaagccttgattgattctttgattgaaatatttgataacagtcttagtgattgtttttgtggatattttttatctgttaatgcaactttgatattttaagtctacctgatgacaagtataatcacataaaacattgcgttggttgttgactacatctgatttacactagataatattataaaatgaaaagtctaac

SEQ ID NO: 2134 - DNA, 1253 bp, Diabrotica virgifera
  SmartBlast Evalue=2E-14; Info=Mucin-like peritrophin n=19 Tax= Aedes aegypti RepID=Q8ISH0_AEDAE
aataattaaatattagtaattattttattaagctcattataacaacagacaaaattatattacaatataacaagtaaagtcttcggttgtaatgtcaaattcattttatgtgttaatatcttctctcgttaatgtttattgcaatctgactgcgctagtactacacatcgtttatttgcttggctccagtaaagatcagctggacattggaaaggacctacccatctattgttttggcattcaaaaaatctgtggcaatcaggtatatactcatttcgatcaccttcttggcaaacgctactagttgtactttcggtgggtgctgcagttggagcatctgttttttcagtggaaactaatagttgagaacaatcagagttttcatcgcatcctggaatgtgtacgttccacagaagaccttcgttacaaaattcgtgctgcttaattccgttaaggcattgatagtatccctgacaattgtaaggatcggcgaaatattcaaggtctatgtcacaatgtaaatctgggttaacagttgaaggattgggaacagcagttgaaggttcggtgacatcagttgaaggttggggggcgacagaagttgagtcaggttcagggataatgtgagctgggaatggtattatgttggagcagtctacgtcttcttttacgtcgcatgctttaactttatcgttccaatatagcccattgtcacaagtatttacctgaggtgctcccttactacaagagtaatatttttgacagtcataaggatagtattcgaatgtctctaaaccatttttgcagtcttcaactatatctcttattaaattaatagcagagtaatcgaatttagattttgcatgtctagcagtcgtgtatggaataacacctaatacacaagccagtactaaaataaaattaattgtatttctcattttactttttcaaaatactgatcaaattagctgctcgttgtaaaagacaaaaattttatagcctctttaccggatgaagcaaataatcaaacaatttttatcagtaataattgcttcggataaacagatttgaacagaaaaaaacaatgaaaattgaattattatacattagttctttaaatcgatgtacacttaaccttgaagccttgattgattctttgattgaaatatttgataacagccttagtgatttatttttgtggatattttttatttgtttatgcaactttggtattttaagtctacgtgatacaa

SEQ ID NO: 2135 - DNA, 1246 bp, Diabrotica virgifera
  SmartBlast Evalue=2E-14; Info=Mucin-like peritrophin n=19 Tax= Aedes aegypti RepID=Q8ISH0_AEDAE
aaatattagtaattattttattaagctcattataacaacagacaaaattatattacaatataacaagtaaagtcttcggttgtaatgtcaaattcattttatgtgttaatatcttctctcgttaatgtttattgcaatctgactgcgctagtactacacatcgtttatttgcttggctccagtaaagatcagctggacattggaaaggacctacccatctattgttttggcattcaaaaaatctgtggcaatcaggtatatactcatttcgatcaccttcttggcaaacgctactagttgtactttcggtgggtgctgcagttggagcatctgttttttcagtggaaactaatagttgagaacaatcagagttttcatcgcatcctggaatgtgtacgttccacagaagaccttcgttacaaaattcgtgctgcttaattccgttaaggcattgatagtatccctgacaattgtaaggatcggcgaaatattcaaggtctatgtcacaatgtaaatctgggttaacagttgaaggattgggaacagcagttgaaggttcggtgacatcagttgaaggttggggggcgacagaagttgagtcaggttcagggataatgtgagctgggaatggtattatgttggagcagtctacgtcttcttttacgtcgcatgctttaactttatcgttccaatatagcccattgtcacaagtatttacctgaggtgctcccttactacaagagtaatatttttgacagtcataaggatagtattcgaatgtctctaaaccatttttgcagtcttcaactatatctcttattaaattaatagcagagtaatcgaatttagattttgcatgtctagcagtcgtgtatggaataacacctaatacacaagccagtactaaaataaaattaattgtatttctcattttactttttcaaaatactgatcaaattagctgctcgttgtaaaagacaaaaattttatagcctctttaccggatgaagcaaataatcaaacaatttttatcagtaataattgcttcggataaacagatttgaacagaaaaaaacaatgaaaattgaattattatacattagttctttaaatcgatgtacacttaaccttgaagccttgattgattctttgattgaaatatttgataacagccttagtgatttatttttgtggatattttttatttgtttatgcaactttggtattttaagtctacgtgatacaa

SEQ ID NO: 2136 - DNA, 1334 bp, Diabrotica virgifera
  SmartBlast Evalue=2E-14; Info=Mucin-like peritrophin n=19 Tax= Aedes aegypti RepID=Q8ISH0_AEDAE
aataattaaatattagtaattattttattaagctcattataacaacagacaaaattatattacaatataacaagtaaagtcttcggttgtaatgtcaaattcattttatgtgttaatatcttctctcgttaatgtttattgcaatctgactgcgctagtactacacatcgtttatttgcttggctccagtaaagatcagctggacattggaaaggacctacccatctattgttttggcattcaaaaaatctgtggcaatcaggtatatactcatttcgatcaccttcttggcaaacgctactagttgtactttcggtgggtgctgcagttggagcatctgttttttcagtggaaactaatagttgagaacaatcagagttttcatcgcatcctggaatgtgtacgttccacagaagaccttcgttacaaaattcgtgctgcttaattccgttaaggcattgatagtatccctgacaattgtaaggatcggcgaaatattcaaggtctatgtcacaatgtaaatctgggttaacagttgaaggattgggaacagcagttgaaggttcggtgacatcagttgaaggttggggggcgacagaagttgagtcaggttcagggataatgtgagctgggaatggtattatgttggagcagtctacgtcttcttttacgtcgcatgctttaactttatcgttccaatatagcccattgtcacaagtatttacctgaggtgctcccttactacaagagtaatatttttgacagtcataaggatagtattcgaatgtctctaaaccatttttgcagtcttcaactatatctcttattaaattaatagcagagtaatcgaatttagattttgcatgtctagcagtcgtgtatggaataacacctaatacacaagccagtactaaaataaaattaattgtatttctcattttactttttcaaaatactgatcaaattagttgctcgttataaaggacaaaaattttatagcttctttaccggatgaagcaaataatcaaacaatttttatcagtaataattgcttaggataaacagatttgaacagaaaaaaacaatgaaaattgaattattatacattagttcttcaaatcgatgtacacttaaccttgaagccttgattgattctttgattgaaatatttgataacagtcttagtgattgtttttgtggatattttttatctgttaatgcaactttgatattttaagtctacctgatgacaagtataatcacataaaacattgcgttggttgttgactacatctgatttacactagataatattataaaatgaaaagtctaac

SEQ ID NO: 2137 - DNA, 1327 bp, Diabrotica virgifera
  SmartBlast Evalue=2E-14; Info=Mucin-like peritrophin n=19 Tax= Aedes aegypti RepID=Q8ISH0_AEDAE
aaatattagtaattattttattaagctcattataacaacagacaaaattatattacaatataacaagtaaagtcttcggttgtaatgtcaaattcattttatgtgttaatatcttctctcgttaatgtttattgcaatctgactgcgctagtactacacatcgtttatttgcttggctccagtaaagatcagctggacattggaaaggacctacccatctattgttttggcattcaaaaaatctgtggcaatcaggtatatactcatttcgatcaccttcttggcaaacgctactagttgtactttcggtgggtgctgcagttggagcatctgttttttcagtggaaactaatagttgagaacaatcagagttttcatcgcatcctggaatgtgtacgttccacagaagaccttcgttacaaaattcgtgctgcttaattccgttaaggcattgatagtatccctgacaattgtaaggatcggcgaaatattcaaggtctatgtcacaatgtaaatctgggttaacagttgaaggattgggaacagcagttgaaggttcggtgacatcagttgaaggttggggggcgacagaagttgagtcaggttcagggataatgtgagctgggaatggtattatgttggagcagtctacgtcttcttttacgtcgcatgctttaactttatcgttccaatatagcccattgtcacaagtatttacctgaggtgctcccttactacaagagtaatatttttgacagtcataaggatagtattcgaatgtctctaaaccatttttgcagtcttcaactatatctcttattaaattaatagcagagtaatcgaatttagattttgcatgtctagcagtcgtgtatggaataacacctaatacacaagccagtactaaaataaaattaattgtatttctcattttactttttcaaaatactgatcaaattagttgctcgttataaaggacaaaaattttatagcttctttaccggatgaagcaaataatcaaacaatttttatcagtaataattgcttaggataaacagatttgaacagaaaaaaacaatgaaaattgaattattatacattagttcttcaaatcgatgtacacttaaccttgaagccttgattgattctttgattgaaatatttgataacagtcttagtgattgtttttgtggatattttttatctgttaatgcaactttgatattttaagtctacctgatgacaagtataatcacataaaacattgcgttggttgttgactacatctgatttacactagataatattataaaatgaaaagtctaac

SEQ ID NO: 2138 - DNA, 1253 bp, Diabrotica virgifera; identical to SEQ ID NO: 2134
  SmartBlast Evalue=2E-14; Info=Mucin-like peritrophin n=19 Tax= Aedes aegypti RepID=Q8ISH0_AEDAE

SEQ ID NO: 2139 - DNA, 1246 bp, Diabrotica virgifera; identical to SEQ ID NO: 2135
  SmartBlast Evalue=2E-14; Info=Mucin-like peritrophin n=19 Tax= Aedes aegypti RepID=Q8ISH0_AEDAE

SEQ ID NO: 2140 - DNA, 1498 bp, Diabrotica virgifera
  SmartBlast Evalue=3E-18; Info=Peritrophic matrix protein 5-A n= 1 Tax=Tribolium castaneum RepID=D1MAJ5_TRICA
aataattaaatattagtaattattttattaagctcattataacaacagacaaaattatattacaatataacaagtaaagtcttcggttgtaatgtcaaattcattttatgtgttaatatcttctctcgttaatgtttattgcaatctgactgcgctagtactacacatcgtttatttgcttggctccagtaaagatcagctggacattggaaaggacctacccatctattgttttggcattcaaaaaatctgtggcaatcaggtatatactcatttcgatcaccttcttggcaaacgctactagttgtactttcggtgggtgctgcagttggagcatctgttttttcagtggaaactaatagttgagaacaatcagagttttcatcgcatcctggaatgtgtacgttccacagaagaccttcgttacaaaattcgtgctgcttaattccgttaaggcattgatagtatccctgacaattgtaaggatcggcgaaatattcaaggtctatgtcacaatgtaaatctgggttaacagttgaaggattgggaacagcagttgaaggttcggtgacatcagttgaaggttggggggcgacagaagttgagtcaggttcagggataatgtgagaacaatcaactgtgtctttgtcgtcgcatttattgagtttttcgttccacaggaaatcccctggacatgatagaatgtaacgtatggaatcaagacattcgtagaattttttacaatcgtatggtatgggtaatatgtatttttaccatccttacaatcaggatctgggaatggtattatgttggagcagtctacgtcttcttttacgtcgcatgctttaactttatcgttccaatatagcccattgtcacaagtatttacctgaggtgctcccttactacaagagtaatatttttgacagtcataaggatagtattcgaatgtctctaaaccatttttgcagtcttcaactatatctcttattaaattaatagcagagtaatcgaatttagattttgcatgtctagcagtcgtgtatggaataacacctaatacacaagccagtactaaaataaaatttattgtatttctcattttactttttcaaaatactgatcaaattagttgctcgttataaaggacaaaaattttatagcttctttaccggatgaagcaaataatcaaacaatttttatcagtaataattgcttaggataaacagatttgaacagaaaaaaacaatgaaaattgaattattatacattagttcttcaaatcgatgtacacttaaccttgaagccttgattgattctttgattgaaatatttgataacagtcttagtgattgtttttgtggatattttttatctgttaatgcaactttgatattttaagtctacctgatgacaagtataatcacataaaacattgcgttggttgttgactacatctgatttacactagataatattataaaatgaaaagtctaac

SEQ ID NO: 2141 - DNA, 1491 bp, Diabrotica virgifera
  SmartBlast Evalue=3E-18; Info=Peritrophic matrix protein 5-A n= 1 Tax=Tribolium castaneum RepID=D1MAJ5_TRICA
aaatattagtaattattttattaagctcattataacaacagacaaaattatattacaatataacaagtaaagtcttcggttgtaatgtcaaattcattttatgtgttaatatcttctctcgttaatgtttattgcaatctgactgcgctagtactacacatcgtttatttgcttggctccagtaaagatcagctggacattggaaaggacctacccatctattgttttggcattcaaaaaatctgtggcaatcaggtatatactcatttcgatcaccttcttggcaaacgctactagttgtactttcggtgggtgctgcagttggagcatctgttttttcagtggaaactaatagttgagaacaatcagagttttcatcgcatcctggaatgtgtacgttccacagaagaccttcgttacaaaattcgtgctgcttaattccgttaaggcattgatagtatccctgacaattgtaaggatcggcgaaatattcaaggtctatgtcacaatgtaaatctgggttaacagttgaaggattgggaacagcagttgaaggttcggtgacatcagttgaaggttggggggcgacagaagttgagtcaggttcagggataatgtgagaacaatcaactgtgtctttgtcgtcgcatttattgagtttttcgttccacaggaaatcccctggacatgatagaatgtaacgtatggaatcaagacattcgtagaattttttacaatcgtatggtatgggtaatatgtatttttaccatccttacaatcaggatctgggaatggtattatgttggagcagtctacgtcttcttttacgtcgcatgctttaactttatcgttccaatatagcccattgtcacaagtatttacctgaggtgctcccttactacaagagtaatatttttgacagtcataaggatagtattcgaatgtctctaaaccatttttgcagtcttcaactatatctcttattaaattaatagcagagtaatcgaatttagattttgcatgtctagcagtcgtgtatggaataacacctaatacacaagccagtactaaaataaaatttattgtatttctcattttactttttcaaaatactgatcaaattagttgctcgttataaaggacaaaaattttatagcttctttaccggatgaagcaaataatcaaacaatttttatcagtaataattgcttaggataaacagatttgaacagaaaaaaacaatgaaaattgaattattatacattagttcttcaaatcgatgtacacttaaccttgaagccttgattgattctttgattgaaatatttgataacagtcttagtgattgtttttgtggatattttttatctgttaatgcaactttgatattttaagtctacctgatgacaagtataatcacataaaacattgcgttggttgttgactacatctgatttacactagataatattataaaatgaaaagtctaac

SEQ ID NO: 2142 - DNA, 1417 bp, Diabrotica virgifera
  SmartBlast Evalue=3E-18; Info=Peritrophic matrix protein 5-A n= 1 Tax=Tribolium castaneum RepID=D1MAJ5_TRICA
aataattaaatattagtaattattttattaagctcattataacaacagacaaaattatattacaatataacaagtaaagtcttcggttgtaatgtcaaattcattttatgtgttaatatcttctctcgttaatgtttattgcaatctgactgcgctagtactacacatcgtttatttgcttggctccagtaaagatcagctggacattggaaaggacctacccatctattgttttggcattcaaaaaatctgtggcaatcaggtatatactcatttcgatcaccttcttggcaaacgctactagttgtactttcggtgggtgctgcagttggagcatctgttttttcagtggaaactaatagttgagaacaatcagagttttcatcgcatcctggaatgtgtacgttccacagaagaccttcgttacaaaattcgtgctgcttaattccgttaaggcattgatagtatccctgacaattgtaaggatcggcgaaatattcaaggtctatgtcacaatgtaaatctgggttaacagttgaaggattgggaacagcagttgaaggttcggtgacatcagttgaaggttggggggcgacagaagttgagtcaggttcagggataatgtgagaacaatcaactgtgtctttgtcgtcgcatttattgagtttttcgttccacaggaaatcccctggacatgatagaatgtaacgtatggaatcaagacattcgtagaattttttacaatcgtatggtatgggtaatatgtatttttaccatccttacaatcaggatctgggaatggtattatgttggagcagtctacgtcttcttttacgtcgcatgctttaactttatcgttccaatatagcccattgtcacaagtatttacctgaggtgctcccttactacaagagtaatatttttgacagtcataaggatagtattcgaatgtctctaaaccatttttgcagtcttcaactatatctcttattaaattaatagcagagtaatcgaatttagattttgcatgtctagcagtcgtgtatggaataacacctaatacacaagccagtactaaaataaaattaattgtatttctcattttactttttcaaaatactgatcaaattagctgctcgttgtaaaagacaaaaattttatagcctctttaccggatgaagcaaataatcaaacaatttttatcagtaataattgcttcggataaacagatttgaacagaaaaaaacaatgaaaattgaattattatacattagttctttaaatcgatgtacacttaaccttgaagccttgattgattctttgattgaaatatttgataacagccttagtgatttatttttgtggatattttttatttgtttatgcaactttggtattttaagtctacgtgatacaa

SEQ ID NO: 2143 - DNA, 1410 bp, Diabrotica virgifera
  SmartBlast Evalue=3E-18; Info=Peritrophic matrix protein 5-A n= 1 Tax=Tribolium castaneum RepID=D1MAJ5_TRICA
aaatattagtaattattttattaagctcattataacaacagacaaaattatattacaatataacaagtaaagtcttcggttgtaatgtcaaattcattttatgtgttaatatcttctctcgttaatgtttattgcaatctgactgcgctagtactacacatcgtttatttgcttggctccagtaaagatcagctggacattggaaaggacctacccatctattgttttggcattcaaaaaatctgtggcaatcaggtatatactcatttcgatcaccttcttggcaaacgctactagttgtactttcggtgggtgctgcagttggagcatctgttttttcagtggaaactaatagttgagaacaatcagagttttcatcgcatcctggaatgtgtacgttccacagaagaccttcgttacaaaattcgtgctgcttaattccgttaaggcattgatagtatccctgacaattgtaaggatcggcgaaatattcaaggtctatgtcacaatgtaaatctgggttaacagttgaaggattgggaacagcagttgaaggttcggtgacatcagttgaaggttggggggcgacagaagttgagtcaggttcagggataatgtgagaacaatcaactgtgtctttgtcgtcgcatttattgagtttttcgttccacaggaaatcccctggacatgatagaatgtaacgtatggaatcaagacattcgtagaattttttacaatcgtatggtatgggtaatatgtatttttaccatccttacaatcaggatctgggaatggtattatgttggagcagtctacgtcttcttttacgtcgcatgctttaactttatcgttccaatatagcccattgtcacaagtatttacctgaggtgctcccttactacaagagtaatatttttgacagtcataaggatagtattcgaatgtctctaaaccatttttgcagtcttcaactatatctcttattaaattaatagcagagtaatcgaatttagattttgcatgtctagcagtcgtgtatggaataacacctaatacacaagccagtactaaaataaaattaattgtatttctcattttactttttcaaaatactgatcaaattagctgctcgttgtaaaagacaaaaattttatagcctctttaccggatgaagcaaataatcaaacaatttttatcagtaataattgcttcggataaacagatttgaacagaaaaaaacaatgaaaattgaattattatacattagttctttaaatcgatgtacacttaaccttgaagccttgattgattctttgattgaaatatttgataacagccttagtgatttatttttgtggatattttttatttgtttatgcaactttggtattttaagtctacgtgatacaa

SEQ ID NO: 2144 - DNA, 1498 bp, Diabrotica virgifera
  SmartBlast Evalue=3E-18; Info=Peritrophic matrix protein 5-A n= 1 Tax=Tribolium castaneum RepID=D1MAJ5_TRICA
aataattaaatattagtaattattttattaagctcattataacaacagacaaaattatattacaatataacaagtaaagtcttcggttgtaatgtcaaattcattttatgtgttaatatcttctctcgttaatgtttattgcaatctgactgcgctagtactacacatcgtttatttgcttggctccagtaaagatcagctggacattggaaaggacctacccatctattgttttggcattcaaaaaatctgtggcaatcaggtatatactcatttcgatcaccttcttggcaaacgctactagttgtactttcggtgggtgctgcagttggagcatctgttttttcagtggaaactaatagttgagaacaatcagagttttcatcgcatcctggaatgtgtacgttccacagaagaccttcgttacaaaattcgtgctgcttaattccgttaaggcattgatagtatccctgacaattgtaaggatcggcgaaatattcaaggtctatgtcacaatgtaaatctgggttaacagttgaaggattgggaacagcagttgaaggttcggtgacatcagttgaaggttggggggcgacagaagttgagtcaggttcagggataatgtgagaacaatcaactgtgtctttgtcgtcgcatttattgagtttttcgttccacaggaaatcccctggacatgatagaatgtaacgtatggaatcaagacattcgtagaattttttacaatcgtatggtatgggtaatatgtatttttaccatccttacaatcaggatctgggaatggtattatgttggagcagtctacgtcttcttttacgtcgcatgctttaactttatcgttccaatatagcccattgtcacaagtatttacctgaggtgctcccttactacaagagtaatatttttgacagtcataaggatagtattcgaatgtctctaaaccatttttgcagtcttcaactatatctcttattaaattaatagcagagtaatcgaatttagattttgcatgtctagcagtcgtgtatggaataacacctaatacacaagccagtactaaaataaaattaattgtatttctcattttactttttcaaaatactgatcaaattagttgctcgttataaaggacaaaaattttatagcttctttaccggatgaagcaaataatcaaacaatttttatcagtaataattgcttaggataaacagatttgaacagaaaaaaacaatgaaaattgaattattatacattagttcttcaaatcgatgtacacttaaccttgaagccttgattgattctttgattgaaatatttgataacagtcttagtgattgtttttgtggatattttttatctgttaatgcaactttgatattttaagtctacctgatgacaagtataatcacataaaacattgcgttggttgttgactacatctgatttacactagataatattataaaatgaaaagtctaac

SEQ ID NO: 2145 - DNA, 1491 bp, Diabrotica virgifera
  SmartBlast Evalue=3E-18; Info=Peritrophic matrix protein 5-A n= 1 Tax=Tribolium castaneum RepID=D1MAJ5_TRICA
aaatattagtaattattttattaagctcattataacaacagacaaaattatattacaatataacaagtaaagtcttcggttgtaatgtcaaattcattttatgtgttaatatcttctctcgttaatgtttattgcaatctgactgcgctagtactacacatcgtttatttgcttggctccagtaaagatcagctggacattggaaaggacctacccatctattgttttggcattcaaaaaatctgtggcaatcaggtatatactcatttcgatcaccttcttggcaaacgctactagttgtactttcggtgggtgctgcagttggagcatctgttttttcagtggaaactaatagttgagaacaatcagagttttcatcgcatcctggaatgtgtacgttccacagaagaccttcgttacaaaattcgtgctgcttaattccgttaaggcattgatagtatccctgacaattgtaaggatcggcgaaatattcaaggtctatgtcacaatgtaaatctgggttaacagttgaaggattgggaacagcagttgaaggttcggtgacatcagttgaaggttggggggcgacagaagttgagtcaggttcagggataatgtgagaacaatcaactgtgtctttgtcgtcgcatttattgagtttttcgttccacaggaaatcccctggacatgatagaatgtaacgtatggaatcaagacattcgtagaattttttacaatcgtatggtatgggtaatatgtatttttaccatccttacaatcaggatctgggaatggtattatgttggagcagtctacgtcttcttttacgtcgcatgctttaactttatcgttccaatatagcccattgtcacaagtatttacctgaggtgctcccttactacaagagtaatatttttgacagtcataaggatagtattcgaatgtctctaaaccatttttgcagtcttcaactatatctcttattaaattaatagcagagtaatcgaatttagattttgcatgtctagcagtcgtgtatggaataacacctaatacacaagccagtactaaaataaaattaattgtatttctcattttactttttcaaaatactgatcaaattagttgctcgttataaaggacaaaaattttatagcttctttaccggatgaagcaaataatcaaacaatttttatcagtaataattgcttaggataaacagatttgaacagaaaaaaacaatgaaaattgaattattatacattagttcttcaaatcgatgtacacttaaccttgaagccttgattgattctttgattgaaatatttgataacagtcttagtgattgtttttgtggatattttttatctgttaatgcaactttgatattttaagtctacctgatgacaagtataatcacataaaacattgcgttggttgttgactacatctgatttacactagataatattataaaatgaaaagtctaac

SEQ ID NO: 2146 - DNA, 1417 bp, Diabrotica virgifera; identical to SEQ ID NO: 2142
  SmartBlast Evalue=3E-18; Info=Peritrophic matrix protein 5-A n= 1 Tax=Tribolium castaneum RepID=D1MAJ5_TRICA

SEQ ID NO: 2147 - DNA, 1410 bp, Diabrotica virgifera; identical to SEQ ID NO: 2143
  SmartBlast Evalue=3E-18; Info=Peritrophic matrix protein 5-A n= 1 Tax=Tribolium castaneum RepID=D1MAJ5_TRICA

SEQ ID NO: 2148 - DNA, 1334 bp, Diabrotica virgifera
  SmartBlast Evalue=2E-14; Info=Mucin-like peritrophin n=19 Tax= Aedes aegypti RepID=Q8ISH0_AEDAE
aataattaaatattagtaattattttattaagctcattataacaacagacaaaattatattacaatataacaagtaaagtcttcggttgtaatgtcaaattcattttatgtgttaatatcttctctcgttaatgtttattgcaatctgactgcgctagtactacacatcgtttatttgcttggctccagtaaagatcagctggacattggaaaggacctacccatctattgttttggcattcaaaaaatctgtggcaatcaggtatatactcatttcgatcaccttcttggcaaacgctactagttgtactttcggtgggtgctgcagttggagcatctgttttttcagtggaaactaatagttgagaacaatcagagttttcatcgcatcctggaatgtgtacgttccacagaagaccttcgttacaaaattcgtgctgcttaattccgttaaggcattgatagtatccctgacaattgtaaggatcggcgaaatattcaaggtctatgtcacaatgtaaatctgggttaacagttgaaggattgggaacagcagttgaaggttcggtgacatcagttgaaggttggggggcgacagaagttgagtcaggttcagggataatgtgagctgggaatggtattatgttggagcagtctacgtcttcttttacgtcgcatgctttaactttatcgttccaatatagcccattgtcacaagtatttacctgaggtgctcccttactacaagagtaatatttttgacagtcataaggatagtattcgaatgtctctaaaccatttttgcagtcttcaactatatctcttattaaattaatagcagagtaatcgaatttagattttgcatgtctagcagtcgtgtatggaataacacctaatacacaagccagtactaaaataaaatttattgtatttctcattttactttttcaaaatactgatcaaattagttgctcgttataaaggacaaaaattttatagcttctttaccggatgaagcaaataatcaaacaatttttatcagtaataattgcttaggataaacagatttgaacagaaaaaaacaatgaaaattgaattattatacattagttcttcaaatcgatgtacacttaaccttgaagccttgattgattctttgattgaaatatttgataacagtcttagtgattgtttttgtggatattttttatctgttaatgcaactttgatattttaagtctacctgatgacaagtataatcacataaaacattgcgttggttgttgactacatctgatttacactagataatattataaaatgaaaagtctaac

SEQ ID NO: 2149 - DNA, 1865 bp, Diabrotica virgifera
  SmartBlast Evalue=6E-34; Info=Endonuclease-reverse transcriptase n=1 Tax=Bombyx mori RepID=D7F160_BOMMO
tacggaggagatagacttcacaaagaactgaatatccttataagtaaaataataaatacaggaagaattccagaagaatggagaaccactcaaatgatagcgttatttaagaaaggtgatgggcagaccccagtaactatagagggataaatttactgagcactatactgaaactcacaacaaaaatacttatggagaaaataatggcgtgcataaatatatcggatgaacaacaaggatttagaagtggaagatcatgtaacgatgcagtttttgtgataaggcaaatagcggagaaatcattagaatataacaaaccagcctttttctgtttcatagacctagagaaagcgtttgatagaatccaattaaaagatgtgatacacctactatatgacaaaaatttaccactggatatcataaaactgatagaaaacatttatgtacgaaataaaatagaaatgaagtcaatggaataataacagaacccatagaagcaaacacaggaatcggcaaggagattcactaagccctctactgtttaacataatattggatgcaataataaaacaagtgaagaaaaaaagagggtacaaaatgggcaatagagagataaaaatactctgttacgctgatgacaccgtgttagtagcagagtgcgaagacgacctacaaagattattgcacgagttcaacattaacgcaaaagaaatgaatatgaaaatatcagtccaaaaaacaaaaagcttagtaattgccaaagaaccaataagatgcaaattggagttagacaatcaaattatacaacaagtaatgactttcaaatatctgggaattaatctatcagccgacaacaatatcgaagaagaggtaaaagaccaaataattaaagccagtagaacggccggatgcctaaacgacacaatttggaaaaacaaacacctaagattggaaacaaaggcccgaatatataagtcagttattaggccagttatgacttacacggccgaaacaagaccagatacaagcaaaacacgaagacatctggaaaccaacgaaatgaagatcttaagaaggattgctggaaaaggactacaggatagggtaagaagtgaggaaatcagacgcatatgtggaggtagacaatataaatacctgggtaaagaacagaaaagaagagtggaatgagcacataagcaggatgtctgaatcaaggatagtaagaatagccagggacaagtcaccgttaggcaggagaagtataggacgcccaaggaaaagatggaatgacaacttaggggcagaatgaaaggcaccgttgaagaaaaacaggcagtactgcctatataaaagaagaagagttaaaagccgtccagcgattaactactgattaatcgctgagccgtttcttaccggccgagtattgattgacctgtctcatcgatcagttgagttcccaaaccaattatacggtagaacttttatgcctttctgttgcggcgaagcatcctttcacatcattctcggtgatccatttcctaacactcgtcaatggtggttggggtatggtgggactgcgcgcttacgatgcgctaccgttagaatatgtgtaatcttaattttggtgtaaggatgcgctagtttgtaaaaattatacgtcagaatacttttttgtgacacaaattgcgtttttccctttaacaatctactcttaaacctccagcttctgccaatcggaagtttttttatcaacctgataaatgcaaatgcagtaatactacaagaaattcgaagaaacaactaaaccaaatatttcaagctggtaaaatttttattttttacatactccaataactactacagat

SEQ ID NO: 2150 - DNA, 1472 bp, Diabrotica virgifera
  SmartBlast Evalue=5E-34; Info=Endonuclease-reverse transcriptase n=1 Tax=Bombyx mori RepID=D7F160_BOMMO
tacggaggagatagacttcacaaagaactgaatatccttataagtaaaataataaatacaggaagaattccagaagaatggagaaccactcaaatgatagcgttatttaagaaaggtgatgggcagaccccagtaactatagagggataaatttactgagcactatactgaaactcacaacaaaaatacttatggagaaaataatggcgtgcataaatatatcggatgaacaacaaggatttagaagtggaagatcatgtaacgatgcagtttttgtgataaggcaaatagcggagaaatcattagaatataacaaaccagcctttttctgtttcatagacctagagaaagcgtttgatagaatccaattaaaagatgtgatacacctactatatgacaaaaatttaccactggatatcataaaactgatagaaaacatttatgtacgaaataaaatagaaatgaagtcaatggaataataacagaacccatagaagcaaacacaggaatcggcaaggagattcactaagccctctactgtttaacataatattggatgcaataataaaacaagtgaagaaaaaaagagggtacaaaatgggcaatagagagataaaaatactctgttacgctgatgacaccgtgttagtagcagagtgcgaagacgacctacaaagattattgcacgagttcaacattaacgcaaaagaaatgaatatgaaaatatcagtccaaaaaacaaaaagcttagtaattgccaaagaaccaataagatgcaaattggagttagacaatcaaattatacaacaagtaatgactttcaaatatctgggaattaatctatcagccgacaacaatatcgaagaagaggtaaaagaccaaataattaaagccagtagaacggccggatgcctaaacgacacaatttggaaaaacaaacacctaagattggaaacaaaggcccgaatatataagtcagttattaggccagttatgacttacacggccgaaacaagaccagatacaagcaaaacacgaagacatctggaaaccaacgaaatgaagatcttaagaaggattgctggaaaaggactacaggatagggtaagaagtgaggaaatcagacgcatatgtggaggtagacaatataaatacctgggtaaagaacagaaaagaagagtggaatgagcacataagcaggatgtctgaatcaaggatagtaagaatagccagggacaagtcaccgttaggcaggagaagtataggacgcccaaggaaaagatggaatgacaacttaggggcagaatgaaaggcaccgttgaagaaaaacaggcagtactgcctatataaaagaagaagaagaaaataatgaattaaattattatataaaataaatgtatacaccgttcttaggcgtcaacgcccttcggtagggatctatgggggagtatcaccgagccgcaagcccgtat

SEQ ID NO: 2151 - DNA, 1483 bp, Diabrotica virgifera
  SmartBlast Evalue=2E-17; Info=Endonuclease-reverse transcriptase n=1 Tax=Bombyx mori RepID=D5LB38_BOMMO
tattgagccaaaatgtcgaataacgtaaaagattttctagaaaaacatgtttttgattttaaaggaggttacttattagaccaccttgtagctacattttgtttttctttccttaattttgaggaactggtttaagatcatttggcaattttgtactgtttaacataatattggatgcaataataaaacaagtgaagaaaaaaagagggtacaaaatgggcaatagagagataaaaatactctgttacgctgatgacaccgtgttagtagcagagtgcgaagacgacctacaaagattattgcacgagttcaacattaacgcaaaagaaatgaatatgaaaatatcagtccaaaaaacaaaaagcttagtaattgccaaagaaccaataagatgcaaattggagttagacaatcaaattatacaacaagtaatgactttcaaatatctgggaattaatctatcagccgacaacaatatcgaagaagaggtaaaagaccaaataattaaagccagtagaacggccggatgcctaaacgacacaatttggaaaaacaaacacctaagattggaaacaaaggcccgaatatataagtcagttattaggccagttatgacttacacggccgaaacaagaccagatacaagcaaaacacgaagacatctggaaaccaacgaaatgaagatcttaagaaggattgctggaaaaggactacaggatagggtaagaagtgaggaaatcagacgcatatgtggaggtagacaatataaatacctgggtaaagaacagaaaagaagagtggaatgagcacataagcaggatgtctgaatcaaggatagtaagaatagccagggacaagtcaccgttaggcaggagaagtataggacgcccaaggaaaagatggaatgacaacttaggggcagaatgaaaggcaccgttgaagaaaaacaggcagtactgcctatataaaagaagaagagttaaaagccgtccagcgattaactactgattaatcgctgagccgtttcttaccggccgagtattgattgacctgtctcatcgatcagttgagttcccaaaccaattatacggtagaacttttatgcctttctgttgcggcgaagcatcctttcacatcattctcggtgatccatttcctaacactcgtcaatggtggttggggtatggtgggactgcgcgcttacgatgcgctaccgttagaatatgtgtaatcttaattttggtgtaaggatgcgctagtttgtaaaaattatacgtcagaatacttttttgtgacacaaattgcgtttttccctttaacaatctactcttaaacctccagcttctgccaatcggaagtttttttatcaacctgataaatgcaaatgcagtaatactacaagaaattcgaagaaacaactaaaccaaatatttcaagctggtaaaatttttattttttacatactccaataactactacagat

SEQ ID NO: 2152 - DNA, 1437 bp, Diabrotica virgifera
  SmartBlast Evalue=0.000000001; Info=Endonuclease-reverse transcriptase n=1 Tax=Bombyx mori RepID=D7F170_BOMMO
tttttgatgcttagtttaatttaatagttaatttcaaaatagagattaaaatttctatcgatttctattactttttttcgtactaaaaaacttgaaaaatggatatttttgacccaagacctttttacttagtacagaattatactttcaaattttctattaactttgtttagattgatcatttttttttttgtttttctttcgagaaatttctttgaatgtctattgacctccaacaccaccatattctcgctgcacgaggaaactctgcggcggaggctagaatgactttattcaccttcgatttctttctgtacatctgaggtttctggaaactctggttgtactgtaccaaattcaactcgcctggatatatctcatcacatctagcatctaatacttgggaattaatctatcagctgacaacaatatcgaagaagaggtaaaagaccaaataattaaagccagtagaacggccggatgcctaaacgacacaatttggaaaaacaaacacctaagattggaaacaaaggcccgaatatataagtcagttattaggccagttatgacttacacggccgaaacaagaccagatacaagcaaaacacgaagacatctggaaaccaacgaaatgaagatcttaagaaggattgctggaaaaggactacaggatagggtaagaagtgaggaaatcagacgcatatgtggaggtagacaatataaatacctgggtaaagaacagaaaagaagagtggaatgagcacataagcaggatgtctgaatcaaggatagtaagaatagccagggacaagtcaccgttaggcaggagaagtataggacgcccaaggaaaagatggaatgacaacttaggggcagaatgaaaggcaccgttgaagaaaaacaggcagtactgcctatataaaagaagaagagttaaaagccgtccagcgattaactactgattaatcgctgagccgtttcttaccggccgagtattgattgacctgtctcatcgatcagttgagttcccaaaccaattatacggtagaacttttatgcctttctgttgcggcgaagcatcctttcacatcattctcggtgatccatttcctaacactcgtcaatggtggttggggtatggtgggactgcgcgcttacgatgcgctaccgttagaatatgtgtaatcttaattttggtgtaaggatgcgctagtttgtaaaaattatacgtcagaatacttttttgtgacacaaattgcgtttttccctttaacaatctactcttaaacctccagcttctgccaatcggaagtttttttatcaacctgataaatgcaaatgcagtaatactacaagaaattcgaagaaacaactaaaccaaatatttcaagctggtaaaatttttattttttacatactccaataactactacagat

SEQ ID NO: 2153 - DNA, 1364 bp, Diabrotica virgifera
  SmartBlast Evalue=8E-33; Info=Endonuclease-reverse transcriptase n=1 Tax=Schistosoma japonicum RepID=C7C208_SCHJA
tacggaggagatagacttcacaaagaactgaatatccttataagtaaaataataaatacaggaagaattccagaagaatggagaaccactcaaatgatagcgttatttaagaaaggtgatgggcagaccccagtaactatagagggataaatttactgagcactatactgaaactcacaacaaaaatacttatggagaaaataatggcgtgcataaatatatcggatgaacaacaaggatttagaagtggaagatcatgtaacgatgcagtttttgtgataaggcaaatagcggagaaatcattagaatataacaaaccagcctttttctgtttcatagacctagagaaagcgtttgatagaatccaattaaaagatgtgatacacctactatatgacaaaaatttaccactggatatcataaaactgatagaaaacatttatgtacgaaataaaatagaaatgaagtcaatggaataataacagaacccatagaagcaaacacaggaatcggcaaggagattcactaagccctctactgtttaacataatattggatgcaataataaaacaagtgaagaaaaaaagagggtacaaaatgggcaatagagagataaaaatactctgttacgctgatgacaccgtgttagtagcagagtgcgaagacgacctacaaagattattgcacgagttcaacattaacgcaaaagaaatgaatatgaaaatatcagtccaaaaaacaaaaagcttagtaattgccaaagaaccaataagatgcaaattggagttagacaatcaaattatacaacaagtaatgactttcaaatatctgggaattaatctatcagccgacaacaatatcgaagaagaggtaaaagaccaaataattaaagccagtagaacggccggatgcctaaacgacacaatttggaaaaacaaacacctaagattggaaacaaaggcccgaatatataagtcagttattaggccagttatgacttacacggccgaaacaagaccagatacaagcaaaacacgaagacatctggaaaccaacgaaatgaagatcttaagaaggattgctggaaaaggactacaggatagggtaagaagtgaggaaatcagacgcatatgtggaggtagacaatataaatacctgggtaaagaagagtggattaaacatataagcaggatgtttgaatcaaggatagtaagggacaagtcaccgttaggcagaagaagtataggacgcccaaggaaaagctgtaatgacaatttagggacagaatgaaatgcaccgttgaagaaaacaggcagaactgcctatataaaaggaagaagacatcagatctagcatctagccac

SEQ ID NO: 2154 - DNA, 1090 bp, Diabrotica virgifera
  SmartBlast Evalue=1E-17; Info=Endonuclease-reverse transcriptase n=1 Tax=Bombyx mori RepID=D5LB38_BOMMO
tattgagccaaaatgtcgaataacgtaaaagattttctagaaaaacatgtttttgattttaaaggaggttacttattagaccaccttgtagctacattttgtttttctttccttaattttgaggaactggtttaagatcatttggcaattttgtactgtttaacataatattggatgcaataataaaacaagtgaagaaaaaaagagggtacaaaatgggcaatagagagataaaaatactctgttacgctgatgacaccgtgttagtagcagagtgcgaagacgacctacaaagattattgcacgagttcaacattaacgcaaaagaaatgaatatgaaaatatcagtccaaaaaacaaaaagcttagtaattgccaaagaaccaataagatgcaaattggagttagacaatcaaattatacaacaagtaatgactttcaaatatctgggaattaatctatcagccgacaacaatatcgaagaagaggtaaaagaccaaataattaaagccagtagaacggccggatgcctaaacgacacaatttggaaaaacaaacacctaagattggaaacaaaggcccgaatatataagtcagttattaggccagttatgacttacacggccgaaacaagaccagatacaagcaaaacacgaagacatctggaaaccaacgaaatgaagatcttaagaaggattgctggaaaaggactacaggatagggtaagaagtgaggaaatcagacgcatatgtggaggtagacaatataaatacctgggtaaagaacagaaaagaagagtggaatgagcacataagcaggatgtctgaatcaaggatagtaagaatagccagggacaagtcaccgttaggcaggagaagtataggacgcccaaggaaaagatggaatgacaacttaggggcagaatgaaaggcaccgttgaagaaaaacaggcagtactgcctatataaaagaagaagaagaaaataatgaattaaattattatataaaataaatgtatacaccgttcttaggcgtcaacgcccttcggtagggatctatgggggagtatcaccgagccgcaagcccgtat

SEQ ID NO: 2155 - DNA, 1044 bp, Diabrotica virgifera
  SmartBlast Evalue=8E-10; Info=Endonuclease-reverse transcriptase n=1 Tax=Bombyx mori RepID=D7F170_BOMMO
tttttgatgcttagtttaatttaatagttaatttcaaaatagagattaaaatttctatcgatttctattactttttttcgtactaaaaaacttgaaaaatggatatttttgacccaagacctttttacttagtacagaattatactttcaaattttctattaactttgtttagattgatcatttttttttttgtttttctttcgagaaatttctttgaatgtctattgacctccaacaccaccatattctcgctgcacgaggaaactctgcggcggaggctagaatgactttattcaccttcgatttctttctgtacatctgaggtttctggaaactctggttgtactgtaccaaattcaactcgcctggatatatctcatcacatctagcatctaatacttgggaattaatctatcagctgacaacaatatcgaagaagaggtaaaagaccaaataattaaagccagtagaacggccggatgcctaaacgacacaatttggaaaaacaaacacctaagattggaaacaaaggcccgaatatataagtcagttattaggccagttatgacttacacggccgaaacaagaccagatacaagcaaaacacgaagacatctggaaaccaacgaaatgaagatcttaagaaggattgctggaaaaggactacaggatagggtaagaagtgaggaaatcagacgcatatgtggaggtagacaatataaatacctgggtaaagaacagaaaagaagagtggaatgagcacataagcaggatgtctgaatcaaggatagtaagaatagccagggacaagtcaccgttaggcaggagaagtataggacgcccaaggaaaagatggaatgacaacttaggggcagaatgaaaggcaccgttgaagaaaaacaggcagtactgcctatataaaagaagaagaagaaaataatgaattaaattattatataaaataaatgtatacaccgttcttaggcgtcaacgcccttcggtagggatctatgggggagtatcaccgagccgcaagcccgtat

SEQ ID NO: 2156 - DNA, 982 bp, Diabrotica virgifera
  SmartBlast Evalue=3E-18; Info=Endonuclease-reverse transcriptase n=1 Tax=Schistosoma japonicum RepID=C7C208_SCHJA
tattgagccaaaatgtcgaataacgtaaaagattttctagaaaaacatgtttttgattttaaaggaggttacttattagaccaccttgtagctacattttgtttttctttccttaattttgaggaactggtttaagatcatttggcaattttgtactgtttaacataatattggatgcaataataaaacaagtgaagaaaaaaagagggtacaaaatgggcaatagagagataaaaatactctgttacgctgatgacaccgtgttagtagcagagtgcgaagacgacctacaaagattattgcacgagttcaacattaacgcaaaagaaatgaatatgaaaatatcagtccaaaaaacaaaaagcttagtaattgccaaagaaccaataagatgcaaattggagttagacaatcaaattatacaacaagtaatgactttcaaatatctgggaattaatctatcagccgacaacaatatcgaagaagaggtaaaagaccaaataattaaagccagtagaacggccggatgcctaaacgacacaatttggaaaaacaaacacctaagattggaaacaaaggcccgaatatataagtcagttattaggccagttatgacttacacggccgaaacaagaccagatacaagcaaaacacgaagacatctggaaaccaacgaaatgaagatcttaagaaggattgctggaaaaggactacaggatagggtaagaagtgaggaaatcagacgcatatgtggaggtagacaatataaatacctgggtaaagaagagtggattaaacatataagcaggatgtttgaatcaaggatagtaagggacaagtcaccgttaggcagaagaagtataggacgcccaaggaaaagctgtaatgacaatttagggacagaatgaaatgcaccgttgaagaaaacaggcagaactgcctatataaaaggaagaagacatcagatctagcatctagccac

SEQ ID NO: 2157 - DNA, 936 bp, Diabrotica virgifera
  SmartBlast Evalue=0.000000003; Info=Endonuclease-reverse transcriptase n=1 Tax=Schistosoma japonicum RepID=C7C208_SCHJA
tttttgatgcttagtttaatttaatagttaatttcaaaatagagattaaaatttctatcgatttctattactttttttcgtactaaaaaacttgaaaaatggatatttttgacccaagacctttttacttagtacagaattatactttcaaattttctattaactttgtttagattgatcatttttttttttgtttttctttcgagaaatttctttgaatgtctattgacctccaacaccaccatattctcgctgcacgaggaaactctgcggcggaggctagaatgactttattcaccttcgatttctttctgtacatctgaggtttctggaaactctggttgtactgtaccaaattcaactcgcctggatatatctcatcacatctagcatctaatacttgggaattaatctatcagctgacaacaatatcgaagaagaggtaaaagaccaaataattaaagccagtagaacggccggatgcctaaacgacacaatttggaaaaacaaacacctaagattggaaacaaaggcccgaatatataagtcagttattaggccagttatgacttacacggccgaaacaagaccagatacaagcaaaacacgaagacatctggaaaccaacgaaatgaagatcttaagaaggattgctggaaaaggactacaggatagggtaagaagtgaggaaatcagacgcatatgtggaggtagacaatataaatacctgggtaaagaagagtggattaaacatataagcaggatgtttgaatcaaggatagtaagggacaagtcaccgttaggcagaagaagtataggacgcccaaggaaaagctgtaatgacaatttagggacagaatgaaatgcaccgttgaagaaaacaggcagaactgcctatataaaaggaagaagacatcagatctagcatctagccac

SEQ ID NO: 2158 - DNA, 6597 bp, Diabrotica virgifera
  SmartBlast Evalue=1E-115; Info="6PF-2-K/Fru-2,6-P2ASE liver/muscle isozymes n=1 Tax=Harpegnathos saltator RepID= E2BPQ1_9HYME"
gtaggaaagttgtgcaaaccaataagtgtacagtgaatccctattcacgcggttttgaattttcttctggcgttgaaaccaatttcatttctgaaaggggcagtcagctgttaagagaaaacattttctaaatttacattttcctttttcgggtaatgtaaccacattacctttatagtgatttttattgaacgtcttcatagatagtaaatctggcgactgaaattagatatcggattggaatgagactgatcttaaaaaaattcatcattcatacatcttcagatcatttttcagaggactttaggagcgccgtgatttagctttttatgggtatgttctagtttttccattttcttttcaaaattctattccataccgctttggggtttttgtttatattctgtgccgttaaagcttttgcctaaccaggaaatacagatattgctcagttttaaatttgaacaaagatttgattgaaaaccatgtcttcaaggacccagtacaacgagaaacagacggaagaatgcaaaggtgcccaagcgccgaagacgaagctgctgaggcagttcggacctctgttggtggccatggtcggattgccgggaagaggaaagagcttgctggccaggagattgtccagatatctcaatttcaccggtgataacaccaaagtatatgacattagcgagtaccgtcgcaaacacatcaagcaatatggttctcacgaaatgttccgagcagataacttgccagcttggaagattcgtcaacagagcttccgtgaagctttggaagacgccgcagcttatttgcacagttcgaataccagcgtcgccattttggatggaccgaacgtctccagaggacagagacaagaaatctacgatctcatctacactcaaatgggcttcagggtcatgttcatagagtgcgtctgcgaagatcctgttctgctggaaagaaactttaaggagatcttacaatacagcgccgattaccacgacatggccacggaagaggcactgaaggatttgacacataagatggctcattaccaagcgcagtacgaatctccgacacttggaagtttgtgggaacttccgtgccccatggtcaaaattttggatggaggtgatggtggtattattgctcatggcatcaacggacaaaaggagagcaagatccttgcttacatctccacacagaagcagatcaaacagactctatatttcagtcgacacggagaaagtgaatacaacgtcattggaaagatcggcggcaacgcaaggctctctcccagaggcaggatgtatgccaaagcgctaacgaagcatgtgcgcgcgcttaatctacccagcctccaagtttggacctccactcttcaaagaacaaaagaaactgcagccagtattcaagcccctcaacaacatttgtccgaattagatgaaatttggtcgggcgaatgtgaaagtctgtcatacgaagaacttcaagagcacttccccaaagaattagctctacgcgaccgcgagaagcttaagtaccgttaccctcaaggcgaatcctacattgacgtcatgactcgtctgatgccagtacttacccaactcgagtgcgaaaccaacgtactaaccgtatcccaccaggctgtccttcgctgcgtgctcggctatttcttggaaacgcccccagaagaaatcccctacatccacgtccccctccacaccatcatcaagcttacccttaagggccacagttacaacatggaaaccatcaagatgcctatcgagtgtgtggatactaacagagccaagcctctcaactgctccgaagatagaaccgcggaagatgctttgctcacgttgcctaaacactatgattctttgtccagtttaagtaacatgatgccctgtacttagcttacttttggaaagtgctcttttatttaggggctgacggtaatgctatggtttttggatgtcgttttagataagtgacgaggatgcaattttgcggtgttgatactatttctattttgtacaaggttagtcctaaaagtacctgacctaacaaaacaaaaagaaaaaaaaatatattatagtgagaacttttgaactgacataatgtgcgcaagatggagaaattcgagttttttaatgtttttgatcattgtagtaaaattaagcagaattttcttgatttcttcacttatacgctacaaagagttcttttactatttatatccatcaacgaaagttacttcaccagaggagctgttttctctggcctttgaagtgagttctaatagctttctagttttgcggaataatagaccaagaaaccatggtcagtgattagggttatatgttaataaggttttgaggttatattaaggttaatagtttaatgtagtaaacataaccttattggcctaatcgacagtattcattattgacagctgtcaaacaagtgtctttaaacttaattttgtaaggatggtacaattgttcaggcgcttctaggactaaccctcttatagtagctttagacgttagtcgtttattattttgatccattatagatggcgcaaaattgaattctagttttagaaacatgttgtattgttaatatttttgatgaaacttacaaaaaaagccttggaaaggttcctttttgaaacaaatacagtcaactccagtttatccctagggttgggtagcacggttgtcgcggataagctgtaactggaattcaaatacataaatgtaaaaaataaaaatgtagtttcacctaaagctttaataacttatattttcaatgtgtacttatatttttactttttttgaaattaatctctcacttgtttctgcttctttgaatggaaaacgtgtttctctattttttccattgctacgcagcatcagtttttcagcaagtagcgcgtcgcccttgtcctctaggtattctattaggaagttcatttacgtgaccaccaaatccaagctcctcttctttttcatcactttcctcgttttctccccagcattttattaggaatgtcttcatccgttagatgctcaaatcccgggtcggtagcatcgaagtctaaccactcttgcaggtttcctgcgaccacattctctcgtttgtaacgttcctgttttctttgagaaaaatttctcacttgtgttcaaaatttttctgatgggtgagaggagtgtgtaacgttacaaacgtcacatctttgatgttttatttttaaataatttcttaaaaataaaatatcaaagataataattatttaaaaataaaatatcaaagatgcttcgagccccacgttgggcgccagtgaaacgaaataagcgatggactaccccagctaattgaaataatattcgaaaatattacctcaatcatccaagatagccatcgttcacccttgcttagctcagtctctcaggtgtgtgttcgtcttgtcctaatcttagaaatgaactatgaaaattcagaatggaagcaaacaaaacaatatttttaactaatcatgtttattgttcataaaatacattaaaaatgtgacttattaagttcattaacaaatatattcaaattcttgccaaaaactaacaattcttggattatacttctgcatggcttgtggtgttggttcgatggtaacttcttgatgtcgaatagtactgctgctggttcttcaacgggctctgggattctaaaggctgtattccaccaggcctacagatgttggtcgttgcagtctaggtgatgtggttgcagtatggatgacatgtccctcgttcttgtatcgccggcgatttgaggattcttgaagctcccagagggaggacggtgatctttatcccaaaaactagaagagtaaaacacatatcaatcatcaagaagataaaccaaagtgtgccagtctgccaatcttttaagaaataattgtcagaaagagtagcagatgacaagaataaattaaatggaatgaagatgaggagaatagttaaaatttgatgactaaacgtgcatatatgtaaattaaaaagatatatttaaaactaaaatatcagaaaccatgcttttagatgggaggttaggttagatataaaaaaatattagaaaaactgctagatgcagaaatgtaattaaaatatgataatatgtattcttaccccaagagaatgataagtctggaaatagctattgtcagctctgtaattgccttttattagattaccaccaccattttgagaattgaaatgacagcgtgaagagaaaataattatttaaaaataaaatatcaaagatgtgatgtttataacgttagaagttcattaagcttgtaagagcactaagagcaggctgttcattttcatcttctccaactgctagtttgacacaattctcgatgttttgtaacagttttctttatgacttcacaattgttgaaatactttacagactcccacgcagatgtgatttcgtagagtcgagaatagtgaatgacttccaaaacaacttcgtcatatccttcaatttttgagctaagtaattttgttctgtagtttctcttcatagacgcaatgacgccttggtccataggctgaactagcgcagtggtgtttgggggcaaacatttttccgtcagcagacttaaacataaatatgtgattcaagatgtgagtgaacgttgtcaatcaaaaacacagctttttgtggcaaattgtttccttttaaatgttttttgacttctggtacaaatttgactttgtaaagataatacagtggactctctctataacgaacacggatattacgagggttcgcttataacgaggtacactagatttctcatgaaattcctattgaactataacacctctgtaacgaggcatatttggttataacgagaaaaaatgaaatcgaagaatatgtttctttacctgaatggctatgaataaataccctcaactgcctgtatatagaaatgcccaacatctgtgttattatcgaggccgttgctataataaactccaccgcctgtaataaacttcatctgtttatctatcgaccgatattgaatattgtaggaaatttacgatggctataatccgttccgcggataatccgctcgcggataaacgggaattgactgtatcgtagaaaaatatttatgtcattcaattattgtagttgttgcgtaggtgttggcttccatttgactgattttgaggatattagtataactaacgtaaaccataagtactgttaaactgatttttgcatcgtattgaatatctaaggagtattagcttaaaaaatctgtttgatattaacataagtcacaaaacatcacgatgattttgtttctttttggggacaaaatgatgcaattttaaacgaaagcacaaaaaggaagaagacatataggaacgtagactaaaaccccttataacttcatgccactccacaatcactagctcgtagattagttagtaaatgcagcgactgaatgtagagtggtagggatgttttgagtaaacagggttgccgcaatcccttgattccttaaactaacatgctctttaaacaattgtagcaataagttgacgcaaagagcgagataacatacctacagcattattcaatgaaattcggaactgctttcctgaatatttttgatctgacaatctgatgaaaacgttaagaaatatagcaaaattattaaaaaaaaaccttggaaaaatacgtccactctttctttacaattgaagcgtttatttgaaaaacaacagatgttcatttttcgcaaattcgactttatgtacctattcctctcaaggaatagtagtttctttatccatctgacatatccagttgtgtaaaaatctcagttgtccggagaaaactacatagaacatttggatagtattagaaaaacaccagatgtgtgggaagtttttcttgatttgccaaaattttaatttttggacaagtgttgtttttcaaataaacgcttcaattatactgtgaaaaggaaggcagttacaagtaatgacaaataaatggtcattgatttattcgagatataacttgtttttttgcatggacagatttcatagatgacatatgtcaaaactgacatctgtaaacttagacaagtgacaactgaagaattctacacaacaatacttttacacaatactgttgtattttatacctttatacctttcacctatactcacttttatcctggcagccctgtttagcaataagcctagtagtagtagcaaaaaataggcttaagatttgccttaattgcccaatatattcaagtctgcattaatttttagtattttttatttgtggttgtatgtattttaatggaaagttaaagtttgaaggtattttgatgactaaacttttcgtgtgtgtaatactatattagtaacttttgttcacgagtagtaaggttttgtgctatagttttttatgatttttatagtgtgtaggacattttaagaatgtatacctcttgacggttttttagaactgtaataaatatatgtttgg

SEQ ID NO: 2159 - DNA, 6549 bp, Diabrotica virgifera
  SmartBlast Evalue=1E-115; Info="6PF-2-K/Fru-2,6-P2ASE liver/muscle isozymes n=1 Tax=Harpegnathos saltator RepID= E2BPQ1_9HYME"
gtaggaaagttgtgcaaaccaataagtgtacagtgaatccctattcacgcggttttgaattttcttctggcgttgaaaccaatttcatttctgaaaggggcagtcagctgttaagagaaaacattttctaaatttacattttcctttttcgggtaatgtaaccacattacctttatagtgatttttattgaacgtcttcatagatagtaaatctggcgactgaaattagatatcggattggaatgagactgatcttaaaaaaattcatcattcatacatcttcagatcatttttcagaggactttaggagcgccgtgatttagctttttatgggtatgttctagtttttccattttcttttcaaaattctattccataccgctttggggtttttgtttatattctgtgccgttaaagcttttgcctaaccaggaaatacagatattgctcagttttaaatttgaacaaagatttgattgaaaaccatgtcttcaaggacccagtacaacgagaaacagacggaagaatgcaaaggtgcccaagcgccgaagacgaagctgctgaggcagttcggacctctgttggtggccatggtcggattgccgggaagaggaaagagcttgctggccaggagattgtccagatatctcaatttcaccggtgataacaccaaagtatatgacattagcgagtaccgtcgcaaacacatcaagcaatatggttctcacgaaatgttccgagcagataacttgccagcttggaagattcgtcaacagagcttccgtgaagctttggaagacgccgcagcttatttgcacagttcgaataccagcgtcgccattttggatggaccgaacgtctccagaggacagagacaagaaatctacgatctcatctacactcaaatgggcttcagggtcatgttcatagagtgcgtctgcgaagatcctgttctgctggaaagaaactttaaggagatcttacaatacagcgccgattaccacgacatggccacggaagaggcactgaaggatttgacacataagatggctcattaccaagcgcagtacgaatctccgacacttggaagtttgtgggaacttccgtgccccatggtcaaaattttggatggaggtgatggtggtattattgctcatggcatcaacggacaaaaggagagcaagatccttgcttacatctccacacagaagcagatcaaacagactctatatttcagtcgacacggagaaagtgaatacaacgtcattggaaagatcggcggcaacgcaaggctctctcccagaggcaggatgtatgccaaagcgctaacgaagcatgtgcgcgcgcttaatctacccagcctccaagtttggacctccactcttcaaagaacaaaagaaactgcagccagtattcaagcccctcaacaacatttgtccgaattagatgaaatttggtcgggcgaatgtgaaagtctgtcatacgaagaacttcaagagcacttccccaaagaattagctctacgcgaccgcgagaagcttaagtaccgttaccctcaaggcgaatcctacattgacgtcatgactcgtctgatgccagtacttacccaactcgagtgcgaaaccaacgtactaaccgtatcccaccaggctgtccttcgctgcgtgctcggctatttcttggaaacgcccccagaagaaatcccctacatccacgtccccctccacaccatcatcaagcttacccttaagggccacagttacaacatggaaaccatcaagatgcctatcgagtgtgtggatactaacagagccaagcctctcaactgctccgaagatagaaccgcggaagatgctttgctcacgttgcctaaacactatgattctttgtccagtttaagtaacatgatgccctgtacttagcttacttttggaaagtgctcttttatttaggggctgacggtaatgctatggtttttggatgtcgttttagataagtgacgaggatgcaattttgcggtgttgatactatttctattttgtacaaggttagtcctaaaagtacctgacctaacaaaacaaaaagaaaaaaaaatatattatagtgagaacttttgaactgacataatgtgcgcaagatggagaaattcgagttttttaatgtttttgatcattgtagtaaaattaagcagaattttcttgatttcttcacttatacgctacaaagagttcttttactatttatatccatcaacgaaagttacttcaccagaggagctgttttctctggcctttgaagtgagttctaatagctttctagttttgcggaataatagaccaagaaaccatggtcagtgattagggttatatgttaataaggttttgaggttatattaaggttaatagtttaatgtagtaaacataaccttattggcctaatcgacagtattcattattgacagctgtcaaacaagtgtctttaaacttaattttgtaaggatggtacaattgttcaggcgcttctaggactaaccctcttatagtagctttagacgttagtcgtttattattttgatccattatagatggcgcaaaattgaattctagttttagaaacatgttgtattgttaatatttttgatgaaacttacaaaaaaagccttggaaaggttcctttttgaaacaaatacagtcaactccagtttatccctagggttgggtagcacggttgtcgcggataagctgtaactggaattcaaatacataaatgtaaaaaataaaaatgtagtttcacctaaagctttaataacttatattttcaatgtgtacttatatttttactttttttgaaattaatctctcacttgtttctgcttctttgaatggaaaacgtgtttctctattttttccattgctacgcagcatcagtttttcagcaagtagcgcgtcgcccttgtcctctaggtattctattaggaagttcatttacgtgaccaccaaatccaagctcctcttctttttcatcactttcctcgttttctccccagcattttattaggaatgtcttcatccgttagatgctcaaatcccgggtcggtagcatcgaagtctaaccactcttgcaggtttcctgcgaccacattctctcgtttgtaacgttcctgttttctttgagaaaaatttctcacttgtgttcaaaatttttctgatgggtgagaggagtgtgtaacgttacaaacgtcacatctttgatgttttatttttaaataatttcttaaaaataaaatatcaaagataataattatttaaaaataaaatatcaaagatgcttcgagccccacgttgggcgccagtgaaacgaaataagcgatggactaccccagctaattgaaataatattcgaaaatattacctcaatcatccaagatagccatcgttcacccttgcttagctcagtctctcaggtgtgtgttcgtcttgtcctaatcttagaaatgaactatgaaaattcagaatggaagcaaacaaaacaatatttttaactaatcatgtttattgttcataaaatacattaaaaatgtgacttattaagttcattaacaaatatattcaaattcttgccaaaaactaacaattcttggattatacttctgcatggcttgtggtgttggttcgatggtaacttcttgatgtcgaatagtactgctgctggttcttcaacgggctctgggattctaaaggctgtattccaccaggcctacagatgttggtcgttgcagtctaggtgatgtggttgcagtatggatgacatgtccctcgttcttgtatcgccggcgatttgaggattcttgaagctcccagagggaggacggtgatctttatcccaaaaactagaagagtaaaacacatatcaatcatcaagaagataaaccaaagtgtgccagtctgccaatcttttaagaaataattgtcagaaagagtagcagatgacaagaataaattaaatggaatgaagatgaggagaatagttaaaatttgatgactaaacgtgcatatatgtaaattaaaaagatatatttaaaactaaaatatcagaaaccatgcttttagatgggaggttaggttagatataaaaaaatattagaaaaactgctagatgcagaaatgtaattaaaatatgataatatgtattcttaccccaagagaatgataagtctggaaatagctattgtcagctctgtaattgccttttattagattaccaccaccattttgagaattgaaatgacagcgtgaagagaaaataattatttaaaaataaaatatcaaagatgtgatgtttataacgttagaagttcattaagcttgtaagagcactaagagcaggctgttcattttcatcttctccaactgctagtttgacacaattctcgatgttttgtaacagttttctccatgacttcacaattgttgaaatactttacagactcccacgcagatgtgatttcgtagagtcgagaatagtgaatgacttccaaaacaacttcaagtcatatccttcaatttttgagctaagtaattttgttctgtagtttctcttcatagacgcaatgacgccttggtccataggctgaactagcgcagtggtgtttgggggcaaacatttttccgtcagcagacttacagctttttgtggcaaattgtttccttttaaatgttttttgacttctggtacaaatttgacttagtaaagataatacagtggactctctctataacgaactcggatattacgaggtttcacttataacgaggtacactagatttctcatgaaattcctattgaactataacacctctgtaacgaggcatatttggttataacgagaaaaaatgaaatcgaagaatatgtttctttacctgaatggctatgaataaataccctcaactgcctgtatatagaaatgcccaacatctgtgttattatcgaggccgttgctataataaactccaccgcctgtaataaacttcatctgtttatctatcgaccgatattgaatattgtaggaaatttacgatggctataatccgttccgcggataatccgctcgcggataaacgggaattgactgtatcgtagaaaaatatttatgtcattcaattattgtagttgttgcgtaggtgttggcttccatttgactgattttgaggatattagtataactaacgtaaaccataagtactgttaaactgatttttgcatcgtattgaatatctaaggagtattagcttaaaaaatctgtttgatattaacataagtcacaaaacatcacgatgattttgtttctttttggggacaaaatgatgcaattttaaacgaaagcacaaaaaggaagaagacatataggaacgtagactaaaaccccttataacttcatgccactccacaatcactagctcgtagattagttagtaaatgcagcgactgaatgtagagtggtagggatgttttgagtaaacagggttgccgcaatcccttgattccttaaactaacatgctctttaaacaattgtagcaataagttgacgcaaagagcgagataacatacctacagcattattcaatgaaattcggaactgctttcctgaatatttttgatctgacaatctgatgaaaacgttaagaaatatagcaaaattattaaaaaaaaaccttggaaaaatacgtccactctttctttacaattgaagcgtttatttgaaaaacaacagatgttcatttttcgcaaattcgactttatgtacctattcctctcaaggaatagtagtttctttatccatctgacatatccagttgtgtaaaaatctcagttgtccggagaaaactacatagaacatttggatagtattagaaaaacaccagatgtgtgggaagtttttcttgatttgccaaaattttaatttttggacaagtgttgtttttcaaataaacgcttcaattatactgtgaaaaggaaggcagttacaagtaatgacaaataaatggtcattgatttattcgagatataacttgtttttttgcatggacagatttcatagatgacatatgtcaaaactgacatctgtaaacttagacaagtgacaactgaagaattctacacaacaatacttttacacaatactgttgtattttatacctttatacctttcacctatactcacttttatcctggcagccctgtttagcaataagcctagtagtagtagcaaaaaataggcttaagatttgccttaattgcccaatatattcaagtctgcattaatttttagtattttttatttgtggttgtatgtattttaatggaaagttaaagtttgaaggtattttgatgactaaacttttcgtgtgtgtaatactatattagtaacttttgttcacgagtagtaaggttttgtgctatagttttttatgatttttatagtgtgtaggacattttaagaatgtatacctcttgacggttttttagaactgtaataaatatatgtttgg

SEQ ID NO: 2160 - DNA, 6543 bp, Diabrotica virgifera
  SmartBlast Evalue=1E-115; Info="6PF-2-K/Fru-2,6-P2ASE liver/muscle isozymes n=1 Tax=Harpegnathos saltator RepID= E2BPQ1_9HYME"
gtaggaaagttgtgcaaaccaataagtgtacagtgaatccctattcacgcggttttgaattttcttctggcgttgaaaccaatttcatttctgaaaggggcagtcagctgttaagagaaaacattttctaaatttacattttcctttttcgggtaatgtaaccacattacctttatagtgatttttattgaacgtcttcatagatagtaaatctggcgactgaaattagatatcggattggaatgagactgatcttaaaaaaattcatcattcatacatcttcagatcatttttcagaggactttaggagcgccgtgatttagctttttatgggtatgttctagtttttccattttcttttcaaaattctattccataccgctttggggtttttgtttatattctgtgccgttaaagcttttgcctaaccaggaaatacagatattgctcagttttaaatttgaacaaagatttgattgaaaaccatgtcttcaaggacccagtacaacgagaaacagacggaagaatgcaaaggtgcccaagcgccgaagacgaagctgctgaggcagttcggacctctgttggtggccatggtcggattgccgggaagaggaaagagcttgctggccaggagattgtccagatatctcaatttcaccggtgataacaccaaagtatatgacattagcgagtaccgtcgcaaacacatcaagcaatatggttctcacgaaatgttccgagcagataacttgccagcttggaagattcgtcaacagagcttccgtgaagctttggaagacgccgcagcttatttgcacagttcgaataccagcgtcgccattttggatggaccgaacgtctccagaggacagagacaagaaatctacgatctcatctacactcaaatgggcttcagggtcatgttcatagagtgcgtctgcgaagatcctgttctgctggaaagaaactttaaggagatcttacaatacagcgccgattaccacgacatggccacggaagaggcactgaaggatttgacacataagatggctcattaccaagcgcagtacgaatctccgacacttggaagtttgtgggaacttccgtgccccatggtcaaaattttggatggaggtgatggtggtattattgctcatggcatcaacggacaaaaggagagcaagatccttgcttacatctccacacagaagcagatcaaacagactctatatttcagtcgacacggagaaagtgaatacaacgtcattggaaagatcggcggcaacgcaaggctctctcccagaggcaggatgtatgccaaagcgctaacgaagcatgtgcgcgcgcttaatctacccagcctccaagtttggacctccactcttcaaagaacaaaagaaactgcagccagtattcaagcccctcaacaacatttgtccgaattagatgaaatttggtcgggcgaatgtgaaagtctgtcatacgaagaacttcaagagcacttccccaaagaattagctctacgcgaccgcgagaagcttaagtaccgttaccctcaaggcgaatcctacattgacgtcatgactcgtctgatgccagtacttacccaactcgagtgcgaaaccaacgtactaaccgtatcccaccaggctgtccttcgctgcgtgctcggctatttcttggaaacgcccccagaagaaatcccctacatccacgtccccctccacaccatcatcaagcttacccttaagggccacagttacaacatggaaaccatcaagatgcctatcgagtgtgtggatactaacagagccaagcctctcaactgctccgaagatagaaccgcggaagatgctttgctcacgttgcctaaacactatgattctttgtccagtttaagtaacatgatgccctgtacttagcttacttttggaaagtgctcttttatttaggggctgacggtaatgctatggtttttggatgtcgttttagataagtgacgaggatgcaattttgcggtgttgatactatttctattttgtacaaggttagtcctaaaagtacctgacctaacaaaacaaaaagaaaaaaaaatatattatagtgagaacttttgaactgacataatgtgcgcaagatggagaaattcgagttttttaatgtttttgatcattgtagtaaaattaagcagaattttcttgatttcttcacttatacgctacaaagagttcttttactatttatatccatcaacgaaagttacttcaccagaggagctgttttctctggcctttgaagtgagttctaatagctttctagttttgcggaataatagaccaagaaaccatggtcagtgattagggttatatgttaataaggttttgaggttatattaaggttaatagtttaatgtagtaaacataaccttattggcctaatcgacagtattcattattgacagctgtcaaacaagtgtctttaaacttaattttgtaaggatggtacaattgttcaggcgcttctaggactaaccctcttatagtagctttagacgttagtcgtttattattttgatccattatagatggcgcaaaattgaattctagttttagaaacatgttgtattgttaatatttttgatgaaacttacaaaaaaagccttggaaaggttcctttttgaaacaaatacagtcaactccagtttatccctagggttgggtagcacggttgtcgcggataagctgtaactggaattcaaatacataaatgtaaaaaataaaaatgtagtttcacctaaagctttaataacttatattttcaatgtgtacttatatttttactttttttgaaattaatctctcacttgtttctgcttctttgaatggaaaacgtgtttctctattttttccattgctacgcagcatcagtttttcagcaagtagcgcgtcgcccttgtcctctaggtattctattaggaagttcatttacgtgaccaccaaatccaagctcctcttctttttcatcactttcctcgttttctccccagcattttattaggaatgtcttcatccgttagatgctcaaatcccgggtcggtagcatcgaagtctaaccactcttgcaggtttcctgcgaccacattctctcgtttgtaacgttcctgttttctttgagaaaaatttctcacttgtgttcaaaatttttctgatgggtgagaggagtgtgtaacgttacaaacgtcacatctttgatgttttatttttaaataatttcttaaaaataaaatatcaaagataataattatttaaaaataaaatatcaaagatgcttcgagccccacgttgggcgccagtgaaacgaaataagcgatggactaccccagctaattgaaataatattcgaaaatattacctcaatcatccaagatagccatcgttcacccttgcttagctcagtctctcaggtgtgtgttcgtcttgtcctaatcttagaaatgaactatgaaaattcagaatggaagcaaacaaaacaatatttttaactaatcatgtttattgttcataaaatacattaaaaatgtgacttattaagttcattaacaaatatattcaaattcttgccaaaaactaacaattcttggattatacttctgcatggcttgtggtgttggttcgatggtaacttcttgatgtcgaatagtactgctgctggttcttcaacgggctctgggattctaaaggctgtattccaccaggcctacagatgttggtcgttgcagtctaggtgatgtggttgcagtatggatgacatgtccctcgttcttgtatcgccggcgatttgaggattcttgaagctcccagagggaggacggtgatctttatcccaaaaactagaagagtaaaacacatatcaatcatcaagaagataaaccaaagtgtgccagtctgccaatcttttaagaaataattgtcagaaagagtagcagatgacaagaataaattaaatggaatgaagatgaggagaatagttaaaatttgatgactaaacgtgcatatatgtaaattaaaaagatatatttaaaactaaaatatcagaaaccatgcttttagatgggaggttaggttagatataaaaaaatattagaaaaactgctagatgcagaaatgtaattaaaatatgataatatgtattcttaccccaagagaatgataagtctggaaatagctattgtcagctctgtaattgccttttattagattaccaccaccattttgagaattgaaatgacagcgtgaagagaaaataattatttaaaaataaaatatcaaagatgtgatgtttataacgttagaagttcattaagcttgtaagagcactaagagcaggctgttcattttcatcttctccaactgctagtttgacacaattctcgatgttttgtaacagttttctttatgacttcacaattgttgaaatactttacagactcccacgcagatgtgatttcgtagagtcgagaatagtgaatgacttccaaaacaacttcgtcatatccttcaatttttgagctaagtaattttgttctgtagtttctcttcatagacgcaatgacgccttggtccataggctgaactagcgcagtggtgtttgggggcaaacatttttccgtcagcagacttaaacataaatatgtgattcaagatgtgagtgaacgttgtcaatcaaaaacacagctttttgtggcaaattgtttccttttaaatgttttttgacttctggtacaaatttgactttgtaaagataatacagtggactctctctataacgaacacggatattacgagggttcgcttataacgaggtacactagatttctcatgaaattcctattgaactataacacctctgtaacgaggcatatttggttataacgagaaaaaatgaaatcgaagaatatgtttctttacctgaatggctatgaataaataccctcaactgcctgtatatagaaatgcccaacatctgtgttattatcgaggccgttgctataataaactccaccgcctgtaataaacttcatctgtttatctatcgaccgatattgaatattgtaggaaatttacgatggctataatccgttccgcggataatccgctcgcggataaacgggaattgactgtatcgtagaaaaatatttatgtcattcaattattgtagttgttgcgtaggtgttggcttccatttgactgattttgaggatattagtataactaacgtaaaccataagtactgttaaactgatttttgcatcgtattgaatatctaaggagtattagcttaaaaaatctgtttgatattaacataagtcacaaaacatcacgatgattttgtttctttttggggacaaaatgatgcaattttaaacgaaagcacaaaaaggaagaagacatataggaacgtagactaaaaccccttataacttcatgccactccacaatcactagctcgtagattagttagtaaatgcagcgactgaatgtagagtggtagggatgttttgagtaaacagggttgccgcaatcccttgattccttaaactaacatgctctttaaacaattgtagcaataagttgacgcaaagagcgagataacatacctacagcattattcaatgaaattcggatagcaaaattattaaaaaaaaaccttgggaaaatacgtccactctttctttacaattgaagcgtttatttgaaaaacaacagatgttcatttttcgcaaattcgactttatgtacctattcctctcatggaatagtagtttctttatccatctgacatatccagttgtgtaaaaatctcagttgtccggagaaaactacatagaacatttggatagtattagaaaaacaccagatgtgtgggaagtttttcttgatttgccaaaattttaatttttggacaagtgttgtttttcaaataaacgcttcaattatactgtgaaaaggaaggcagttacaagtaatgacaaataaatggtcattgatttattcgagatataacttgtttttttgcatggacagatttcatagatgacatatgtcaaaactgacatctgtaaacttagacaagtgacaactgaagaattctacacaacaatacttttacacaatactgttgtattttatacctttatacctttcacctatactcacttttatcctggcagccctgtttagcaataagcctagtagtagtagcaaaaaataggcttaagatttgccttaattgcccaatatattcaagtctgcattaatttttagtattttttatttgtggttgtatgtattttaatggaaagttaaagtttgaaggtattttgatgactaaacttttcgtgtgtgtaatactatattagtaacttttgttcacgagtagtaaggttttgtgctatagttttttatgatttttatagtgtgtaggacattttaagaatgtatacctcttgacggttttttagaactgtaataaatatatgtttgg

SEQ ID NO: 2161 - DNA, 6495 bp, Diabrotica virgifera
  SmartBlast Evalue=1E-115; Info="6PF-2-K/Fru-2,6-P2ASE liver/muscle isozymes n=1 Tax=Harpegnathos saltator RepID= E2BPQ1_9HYME"
gtaggaaagttgtgcaaaccaataagtgtacagtgaatccctattcacgcggttttgaattttcttctggcgttgaaaccaatttcatttctgaaaggggcagtcagctgttaagagaaaacattttctaaatttacattttcctttttcgggtaatgtaaccacattacctttatagtgatttttattgaacgtcttcatagatagtaaatctggcgactgaaattagatatcggattggaatgagactgatcttaaaaaaattcatcattcatacatcttcagatcatttttcagaggactttaggagcgccgtgatttagctttttatgggtatgttctagtttttccattttcttttcaaaattctattccataccgctttggggtttttgtttatattctgtgccgttaaagcttttgcctaaccaggaaatacagatattgctcagttttaaatttgaacaaagatttgattgaaaaccatgtcttcaaggacccagtacaacgagaaacagacggaagaatgcaaaggtgcccaagcgccgaagacgaagctgctgaggcagttcggacctctgttggtggccatggtcggattgccgggaagaggaaagagcttgctggccaggagattgtccagatatctcaatttcaccggtgataacaccaaagtatatgacattagcgagtaccgtcgcaaacacatcaagcaatatggttctcacgaaatgttccgagcagataacttgccagcttggaagattcgtcaacagagcttccgtgaagctttggaagacgccgcagcttatttgcacagttcgaataccagcgtcgccattttggatggaccgaacgtctccagaggacagagacaagaaatctacgatctcatctacactcaaatgggcttcagggtcatgttcatagagtgcgtctgcgaagatcctgttctgctggaaagaaactttaaggagatcttacaatacagcgccgattaccacgacatggccacggaagaggcactgaaggatttgacacataagatggctcattaccaagcgcagtacgaatctccgacacttggaagtttgtgggaacttccgtgccccatggtcaaaattttggatggaggtgatggtggtattattgctcatggcatcaacggacaaaaggagagcaagatccttgcttacatctccacacagaagcagatcaaacagactctatatttcagtcgacacggagaaagtgaatacaacgtcattggaaagatcggcggcaacgcaaggctctctcccagaggcaggatgtatgccaaagcgctaacgaagcatgtgcgcgcgcttaatctacccagcctccaagtttggacctccactcttcaaagaacaaaagaaactgcagccagtattcaagcccctcaacaacatttgtccgaattagatgaaatttggtcgggcgaatgtgaaagtctgtcatacgaagaacttcaagagcacttccccaaagaattagctctacgcgaccgcgagaagcttaagtaccgttaccctcaaggcgaatcctacattgacgtcatgactcgtctgatgccagtacttacccaactcgagtgcgaaaccaacgtactaaccgtatcccaccaggctgtccttcgctgcgtgctcggctatttcttggaaacgcccccagaagaaatcccctacatccacgtccccctccacaccatcatcaagcttacccttaagggccacagttacaacatggaaaccatcaagatgcctatcgagtgtgtggatactaacagagccaagcctctcaactgctccgaagatagaaccgcggaagatgctttgctcacgttgcctaaacactatgattctttgtccagtttaagtaacatgatgccctgtacttagcttacttttggaaagtgctcttttatttaggggctgacggtaatgctatggtttttggatgtcgttttagataagtgacgaggatgcaattttgcggtgttgatactatttctattttgtacaaggttagtcctaaaagtacctgacctaacaaaacaaaaagaaaaaaaaatatattatagtgagaacttttgaactgacataatgtgcgcaagatggagaaattcgagttttttaatgtttttgatcattgtagtaaaattaagcagaattttcttgatttcttcacttatacgctacaaagagttcttttactatttatatccatcaacgaaagttacttcaccagaggagctgttttctctggcctttgaagtgagttctaatagctttctagttttgcggaataatagaccaagaaaccatggtcagtgattagggttatatgttaataaggttttgaggttatattaaggttaatagtttaatgtagtaaacataaccttattggcctaatcgacagtattcattattgacagctgtcaaacaagtgtctttaaacttaattttgtaaggatggtacaattgttcaggcgcttctaggactaaccctcttatagtagctttagacgttagtcgtttattattttgatccattatagatggcgcaaaattgaattctagttttagaaacatgttgtattgttaatatttttgatgaaacttacaaaaaaagccttggaaaggttcctttttgaaacaaatacagtcaactccagtttatccctagggttgggtagcacggttgtcgcggataagctgtaactggaattcaaatacataaatgtaaaaaataaaaatgtagtttcacctaaagctttaataacttatattttcaatgtgtacttatatttttactttttttgaaattaatctctcacttgtttctgcttctttgaatggaaaacgtgtttctctattttttccattgctacgcagcatcagtttttcagcaagtagcgcgtcgcccttgtcctctaggtattctattaggaagttcatttacgtgaccaccaaatccaagctcctcttctttttcatcactttcctcgttttctccccagcattttattaggaatgtcttcatccgttagatgctcaaatcccgggtcggtagcatcgaagtctaaccactcttgcaggtttcctgcgaccacattctctcgtttgtaacgttcctgttttctttgagaaaaatttctcacttgtgttcaaaatttttctgatgggtgagaggagtgtgtaacgttacaaacgtcacatctttgatgttttatttttaaataatttcttaaaaataaaatatcaaagataataattatttaaaaataaaatatcaaagatgcttcgagccccacgttgggcgccagtgaaacgaaataagcgatggactaccccagctaattgaaataatattcgaaaatattacctcaatcatccaagatagccatcgttcacccttgcttagctcagtctctcaggtgtgtgttcgtcttgtcctaatcttagaaatgaactatgaaaattcagaatggaagcaaacaaaacaatatttttaactaatcatgtttattgttcataaaatacattaaaaatgtgacttattaagttcattaacaaatatattcaaattcttgccaaaaactaacaattcttggattatacttctgcatggcttgtggtgttggttcgatggtaacttcttgatgtcgaatagtactgctgctggttcttcaacgggctctgggattctaaaggctgtattccaccaggcctacagatgttggtcgttgcagtctaggtgatgtggttgcagtatggatgacatgtccctcgttcttgtatcgccggcgatttgaggattcttgaagctcccagagggaggacggtgatctttatcccaaaaactagaagagtaaaacacatatcaatcatcaagaagataaaccaaagtgtgccagtctgccaatcttttaagaaataattgtcagaaagagtagcagatgacaagaataaattaaatggaatgaagatgaggagaatagttaaaatttgatgactaaacgtgcatatatgtaaattaaaaagatatatttaaaactaaaatatcagaaaccatgcttttagatgggaggttaggttagatataaaaaaatattagaaaaactgctagatgcagaaatgtaattaaaatatgataatatgtattcttaccccaagagaatgataagtctggaaatagctattgtcagctctgtaattgccttttattagattaccaccaccattttgagaattgaaatgacagcgtgaagagaaaataattatttaaaaataaaatatcaaagatgtgatgtttataacgttagaagttcattaagcttgtaagagcactaagagcaggctgttcattttcatcttctccaactgctagtttgacacaattctcgatgttttgtaacagttttctccatgacttcacaattgttgaaatactttacagactcccacgcagatgtgatttcgtagagtcgagaatagtgaatgacttccaaaacaacttcaagtcatatccttcaatttttgagctaagtaattttgttctgtagtttctcttcatagacgcaatgacgccttggtccataggctgaactagcgcagtggtgtttgggggcaaacatttttccgtcagcagacttacagctttttgtggcaaattgtttccttttaaatgttttttgacttctggtacaaatttgacttagtaaagataatacagtggactctctctataacgaactcggatattacgaggtttcacttataacgaggtacactagatttctcatgaaattcctattgaactataacacctctgtaacgaggcatatttggttataacgagaaaaaatgaaatcgaagaatatgtttctttacctgaatggctatgaataaataccctcaactgcctgtatatagaaatgcccaacatctgtgttattatcgaggccgttgctataataaactccaccgcctgtaataaacttcatctgtttatctatcgaccgatattgaatattgtaggaaatttacgatggctataatccgttccgcggataatccgctcgcggataaacgggaattgactgtatcgtagaaaaatatttatgtcattcaattattgtagttgttgcgtaggtgttggcttccatttgactgattttgaggatattagtataactaacgtaaaccataagtactgttaaactgatttttgcatcgtattgaatatctaaggagtattagcttaaaaaatctgtttgatattaacataagtcacaaaacatcacgatgattttgtttctttttggggacaaaatgatgcaattttaaacgaaagcacaaaaaggaagaagacatataggaacgtagactaaaaccccttataacttcatgccactccacaatcactagctcgtagattagttagtaaatgcagcgactgaatgtagagtggtagggatgttttgagtaaacagggttgccgcaatcccttgattccttaaactaacatgctctttaaacaattgtagcaataagttgacgcaaagagcgagataacatacctacagcattattcaatgaaattcggatagcaaaattattaaaaaaaaaccttgggaaaatacgtccactctttctttacaattgaagcgtttatttgaaaaacaacagatgttcatttttcgcaaattcgactttatgtacctattcctctcatggaatagtagtttctttatccatctgacatatccagttgtgtaaaaatctcagttgtccggagaaaactacatagaacatttggatagtattagaaaaacaccagatgtgtgggaagtttttcttgatttgccaaaattttaatttttggacaagtgttgtttttcaaataaacgcttcaattatactgtgaaaaggaaggcagttacaagtaatgacaaataaatggtcattgatttattcgagatataacttgtttttttgcatggacagatttcatagatgacatatgtcaaaactgacatctgtaaacttagacaagtgacaactgaagaattctacacaacaatacttttacacaatactgttgtattttatacctttatacctttcacctatactcacttttatcctggcagccctgtttagcaataagcctagtagtagtagcaaaaaataggcttaagatttgccttaattgcccaatatattcaagtctgcattaatttttagtattttttatttgtggttgtatgtattttaatggaaagttaaagtttgaaggtattttgatgactaaacttttcgtgtgtgtaatactatattagtaacttttgttcacgagtagtaaggttttgtgctatagttttttatgatttttatagtgtgtaggacattttaagaatgtatacctcttgacggttttttagaactgtaataaatatatgtttgg

SEQ ID NO: 2162 - DNA, 6174 bp, Diabrotica virgifera
  SmartBlast Evalue=1E-115; Info="6PF-2-K/Fru-2,6-P2ASE liver/muscle isozymes n=1 Tax=Harpegnathos saltator RepID= E2BPQ1_9HYME"
acgatatatacgtagcttttgcatcattccgattcagtctagttgaatctctcatgtagtgaacaaccattcattccgttatggatctaaaaaaccgtttttgtcgtgcaggtgcccaagcgccgaagacgaagctgctgaggcagttcggacctctgttggtggccatggtcggattgccgggaagaggaaagagcttgctggccaggagattgtccagatatctcaatttcaccggtgataacaccaaagtatatgacattagcgagtaccgtcgcaaacacatcaagcaatatggttctcacgaaatgttccgagcagataacttgccagcttggaagattcgtcaacagagcttccgtgaagctttggaagacgccgcagcttatttgcacagttcgaataccagcgtcgccattttggatggaccgaacgtctccagaggacagagacaagaaatctacgatctcatctacactcaaatgggcttcagggtcatgttcatagagtgcgtctgcgaagatcctgttctgctggaaagaaactttaaggagatcttacaatacagcgccgattaccacgacatggccacggaagaggcactgaaggatttgacacataagatggctcattaccaagcgcagtacgaatctccgacacttggaagtttgtgggaacttccgtgccccatggtcaaaattttggatggaggtgatggtggtattattgctcatggcatcaacggacaaaaggagagcaagatccttgcttacatctccacacagaagcagatcaaacagactctatatttcagtcgacacggagaaagtgaatacaacgtcattggaaagatcggcggcaacgcaaggctctctcccagaggcaggatgtatgccaaagcgctaacgaagcatgtgcgcgcgcttaatctacccagcctccaagtttggacctccactcttcaaagaacaaaagaaactgcagccagtattcaagcccctcaacaacatttgtccgaattagatgaaatttggtcgggcgaatgtgaaagtctgtcatacgaagaacttcaagagcacttccccaaagaattagctctacgcgaccgcgagaagcttaagtaccgttaccctcaaggcgaatcctacattgacgtcatgactcgtctgatgccagtacttacccaactcgagtgcgaaaccaacgtactaaccgtatcccaccaggctgtccttcgctgcgtgctcggctatttcttggaaacgcccccagaagaaatcccctacatccacgtccccctccacaccatcatcaagcttacccttaagggccacagttacaacatggaaaccatcaagatgcctatcgagtgtgtggatactaacagagccaagcctctcaactgctccgaagatagaaccgcggaagatgctttgctcacgttgcctaaacactatgattctttgtccagtttaagtaacatgatgccctgtacttagcttacttttggaaagtgctcttttatttaggggctgacggtaatgctatggtttttggatgtcgttttagataagtgacgaggatgcaattttgcggtgttgatactatttctattttgtacaaggttagtcctaaaagtacctgacctaacaaaacaaaaagaaaaaaaaatatattatagtgagaacttttgaactgacataatgtgcgcaagatggagaaattcgagttttttaatgtttttgatcattgtagtaaaattaagcagaattttcttgatttcttcacttatacgctacaaagagttcttttactatttatatccatcaacgaaagttacttcaccagaggagctgttttctctggcctttgaagtgagttctaatagctttctagttttgcggaataatagaccaagaaaccatggtcagtgattagggttatatgttaataaggttttgaggttatattaaggttaatagtttaatgtagtaaacataaccttattggcctaatcgacagtattcattattgacagctgtcaaacaagtgtctttaaacttaattttgtaaggatggtacaattgttcaggcgcttctaggactaaccctcttatagtagctttagacgttagtcgtttattattttgatccattatagatggcgcaaaattgaattctagttttagaaacatgttgtattgttaatatttttgatgaaacttacaaaaaaagccttggaaaggttcctttttgaaacaaatacagtcaactccagtttatccctagggttgggtagcacggttgtcgcggataagctgtaactggaattcaaatacataaatgtaaaaaataaaaatgtagtttcacctaaagctttaataacttatattttcaatgtgtacttatatttttactttttttgaaattaatctctcacttgtttctgcttctttgaatggaaaacgtgtttctctattttttccattgctacgcagcatcagtttttcagcaagtagcgcgtcgcccttgtcctctaggtattctattaggaagttcatttacgtgaccaccaaatccaagctcctcttctttttcatcactttcctcgttttctccccagcattttattaggaatgtcttcatccgttagatgctcaaatcccgggtcggtagcatcgaagtctaaccactcttgcaggtttcctgcgaccacattctctcgtttgtaacgttcctgttttctttgagaaaaatttctcacttgtgttcaaaatttttctgatgggtgagaggagtgtgtaacgttacaaacgtcacatctttgatgttttatttttaaataatttcttaaaaataaaatatcaaagataataattatttaaaaataaaatatcaaagatgcttcgagccccacgttgggcgccagtgaaacgaaataagcgatggactaccccagctaattgaaataatattcgaaaatattacctcaatcatccaagatagccatcgttcacccttgcttagctcagtctctcaggtgtgtgttcgtcttgtcctaatcttagaaatgaactatgaaaattcagaatggaagcaaacaaaacaatatttttaactaatcatgtttattgttcataaaatacattaaaaatgtgacttattaagttcattaacaaatatattcaaattcttgccaaaaactaacaattcttggattatacttctgcatggcttgtggtgttggttcgatggtaacttcttgatgtcgaatagtactgctgctggttcttcaacgggctctgggattctaaaggctgtattccaccaggcctacagatgttggtcgttgcagtctaggtgatgtggttgcagtatggatgacatgtccctcgttcttgtatcgccggcgatttgaggattcttgaagctcccagagggaggacggtgatctttatcccaaaaactagaagagtaaaacacatatcaatcatcaagaagataaaccaaagtgtgccagtctgccaatcttttaagaaataattgtcagaaagagtagcagatgacaagaataaattaaatggaatgaagatgaggagaatagttaaaatttgatgactaaacgtgcatatatgtaaattaaaaagatatatttaaaactaaaatatcagaaaccatgcttttagatgggaggttaggttagatataaaaaaatattagaaaaactgctagatgcagaaatgtaattaaaatatgataatatgtattcttaccccaagagaatgataagtctggaaatagctattgtcagctctgtaattgccttttattagattaccaccaccattttgagaattgaaatgacagcgtgaagagaaaataattatttaaaaataaaatatcaaagatgtgatgtttataacgttagaagttcattaagcttgtaagagcactaagagcaggctgttcattttcatcttctccaactgctagtttgacacaattctcgatgttttgtaacagttttctttatgacttcacaattgttgaaatactttacagactcccacgcagatgtgatttcgtagagtcgagaatagtgaatgacttccaaaacaacttcgtcatatccttcaatttttgagctaagtaattttgttctgtagtttctcttcatagacgcaatgacgccttggtccataggctgaactagcgcagtggtgtttgggggcaaacatttttccgtcagcagacttaaacataaatatgtgattcaagatgtgagtgaacgttgtcaatcaaaaacacagctttttgtggcaaattgtttccttttaaatgttttttgacttctggtacaaatttgactttgtaaagataatacagtggactctctctataacgaacacggatattacgagggttcgcttataacgaggtacactagatttctcatgaaattcctattgaactataacacctctgtaacgaggcatatttggttataacgagaaaaaatgaaatcgaagaatatgtttctttacctgaatggctatgaataaataccctcaactgcctgtatatagaaatgcccaacatctgtgttattatcgaggccgttgctataataaactccaccgcctgtaataaacttcatctgtttatctatcgaccgatattgaatattgtaggaaatttacgatggctataatccgttccgcggataatccgctcgcggataaacgggaattgactgtatcgtagaaaaatatttatgtcattcaattattgtagttgttgcgtaggtgttggcttccatttgactgattttgaggatattagtataactaacgtaaaccataagtactgttaaactgatttttgcatcgtattgaatatctaaggagtattagcttaaaaaatctgtttgatattaacataagtcacaaaacatcacgatgattttgtttctttttggggacaaaatgatgcaattttaaacgaaagcacaaaaaggaagaagacatataggaacgtagactaaaaccccttataacttcatgccactccacaatcactagctcgtagattagttagtaaatgcagcgactgaatgtagagtggtagggatgttttgagtaaacagggttgccgcaatcccttgattccttaaactaacatgctctttaaacaattgtagcaataagttgacgcaaagagcgagataacatacctacagcattattcaatgaaattcggaactgctttcctgaatatttttgatctgacaatctgatgaaaacgttaagaaatatagcaaaattattaaaaaaaaaccttggaaaaatacgtccactctttctttacaattgaagcgtttatttgaaaaacaacagatgttcatttttcgcaaattcgactttatgtacctattcctctcaaggaatagtagtttctttatccatctgacatatccagttgtgtaaaaatctcagttgtccggagaaaactacatagaacatttggatagtattagaaaaacaccagatgtgtgggaagtttttcttgatttgccaaaattttaatttttggacaagtgttgtttttcaaataaacgcttcaattatactgtgaaaaggaaggcagttacaagtaatgacaaataaatggtcattgatttattcgagatataacttgtttttttgcatggacagatttcatagatgacatatgtcaaaactgacatctgtaaacttagacaagtgacaactgaagaattctacacaacaatacttttacacaatactgttgtattttatacctttatacctttcacctatactcacttttatcctggcagccctgtttagcaataagcctagtagtagtagcaaaaaataggcttaagatttgccttaattgcccaatatattcaagtctgcattaatttttagtattttttatttgtggttgtatgtattttaatggaaagttaaagtttgaaggtattttgatgactaaacttttcgtgtgtgtaatactatattagtaacttttgttcacgagtagtaaggttttgtgctatagttttttatgatttttatagtgtgtaggacattttaagaatgtatacctcttgacggttttttagaactgtaataaatatatgtttgg

SEQ ID NO: 2163 - DNA, 6126 bp, Diabrotica virgifera
  SmartBlast Evalue=1E-115; Info="6PF-2-K/Fru-2,6-P2ASE liver/muscle isozymes n=1 Tax=Harpegnathos saltator RepID= E2BPQ1_9HYME"
acgatatatacgtagcttttgcatcattccgattcagtctagttgaatctctcatgtagtgaacaaccattcattccgttatggatctaaaaaaccgtttttgtcgtgcaggtgcccaagcgccgaagacgaagctgctgaggcagttcggacctctgttggtggccatggtcggattgccgggaagaggaaagagcttgctggccaggagattgtccagatatctcaatttcaccggtgataacaccaaagtatatgacattagcgagtaccgtcgcaaacacatcaagcaatatggttctcacgaaatgttccgagcagataacttgccagcttggaagattcgtcaacagagcttccgtgaagctttggaagacgccgcagcttatttgcacagttcgaataccagcgtcgccattttggatggaccgaacgtctccagaggacagagacaagaaatctacgatctcatctacactcaaatgggcttcagggtcatgttcatagagtgcgtctgcgaagatcctgttctgctggaaagaaactttaaggagatcttacaatacagcgccgattaccacgacatggccacggaagaggcactgaaggatttgacacataagatggctcattaccaagcgcagtacgaatctccgacacttggaagtttgtgggaacttccgtgccccatggtcaaaattttggatggaggtgatggtggtattattgctcatggcatcaacggacaaaaggagagcaagatccttgcttacatctccacacagaagcagatcaaacagactctatatttcagtcgacacggagaaagtgaatacaacgtcattggaaagatcggcggcaacgcaaggctctctcccagaggcaggatgtatgccaaagcgctaacgaagcatgtgcgcgcgcttaatctacccagcctccaagtttggacctccactcttcaaagaacaaaagaaactgcagccagtattcaagcccctcaacaacatttgtccgaattagatgaaatttggtcgggcgaatgtgaaagtctgtcatacgaagaacttcaagagcacttccccaaagaattagctctacgcgaccgcgagaagcttaagtaccgttaccctcaaggcgaatcctacattgacgtcatgactcgtctgatgccagtacttacccaactcgagtgcgaaaccaacgtactaaccgtatcccaccaggctgtccttcgctgcgtgctcggctatttcttggaaacgcccccagaagaaatcccctacatccacgtccccctccacaccatcatcaagcttacccttaagggccacagttacaacatggaaaccatcaagatgcctatcgagtgtgtggatactaacagagccaagcctctcaactgctccgaagatagaaccgcggaagatgctttgctcacgttgcctaaacactatgattctttgtccagtttaagtaacatgatgccctgtacttagcttacttttggaaagtgctcttttatttaggggctgacggtaatgctatggtttttggatgtcgttttagataagtgacgaggatgcaattttgcggtgttgatactatttctattttgtacaaggttagtcctaaaagtacctgacctaacaaaacaaaaagaaaaaaaaatatattatagtgagaacttttgaactgacataatgtgcgcaagatggagaaattcgagttttttaatgtttttgatcattgtagtaaaattaagcagaattttcttgatttcttcacttatacgctacaaagagttcttttactatttatatccatcaacgaaagttacttcaccagaggagctgttttctctggcctttgaagtgagttctaatagctttctagttttgcggaataatagaccaagaaaccatggtcagtgattagggttatatgttaataaggttttgaggttatattaaggttaatagtttaatgtagtaaacataaccttattggcctaatcgacagtattcattattgacagctgtcaaacaagtgtctttaaacttaattttgtaaggatggtacaattgttcaggcgcttctaggactaaccctcttatagtagctttagacgttagtcgtttattattttgatccattatagatggcgcaaaattgaattctagttttagaaacatgttgtattgttaatatttttgatgaaacttacaaaaaaagccttggaaaggttcctttttgaaacaaatacagtcaactccagtttatccctagggttgggtagcacggttgtcgcggataagctgtaactggaattcaaatacataaatgtaaaaaataaaaatgtagtttcacctaaagctttaataacttatattttcaatgtgtacttatatttttactttttttgaaattaatctctcacttgtttctgcttctttgaatggaaaacgtgtttctctattttttccattgctacgcagcatcagtttttcagcaagtagcgcgtcgcccttgtcctctaggtattctattaggaagttcatttacgtgaccaccaaatccaagctcctcttctttttcatcactttcctcgttttctccccagcattttattaggaatgtcttcatccgttagatgctcaaatcccgggtcggtagcatcgaagtctaaccactcttgcaggtttcctgcgaccacattctctcgtttgtaacgttcctgttttctttgagaaaaatttctcacttgtgttcaaaatttttctgatgggtgagaggagtgtgtaacgttacaaacgtcacatctttgatgttttatttttaaataatttcttaaaaataaaatatcaaagataataattatttaaaaataaaatatcaaagatgcttcgagccccacgttgggcgccagtgaaacgaaataagcgatggactaccccagctaattgaaataatattcgaaaatattacctcaatcatccaagatagccatcgttcacccttgcttagctcagtctctcaggtgtgtgttcgtcttgtcctaatcttagaaatgaactatgaaaattcagaatggaagcaaacaaaacaatatttttaactaatcatgtttattgttcataaaatacattaaaaatgtgacttattaagttcattaacaaatatattcaaattcttgccaaaaactaacaattcttggattatacttctgcatggcttgtggtgttggttcgatggtaacttcttgatgtcgaatagtactgctgctggttcttcaacgggctctgggattctaaaggctgtattccaccaggcctacagatgttggtcgttgcagtctaggtgatgtggttgcagtatggatgacatgtccctcgttcttgtatcgccggcgatttgaggattcttgaagctcccagagggaggacggtgatctttatcccaaaaactagaagagtaaaacacatatcaatcatcaagaagataaaccaaagtgtgccagtctgccaatcttttaagaaataattgtcagaaagagtagcagatgacaagaataaattaaatggaatgaagatgaggagaatagttaaaatttgatgactaaacgtgcatatatgtaaattaaaaagatatatttaaaactaaaatatcagaaaccatgcttttagatgggaggttaggttagatataaaaaaatattagaaaaactgctagatgcagaaatgtaattaaaatatgataatatgtattcttaccccaagagaatgataagtctggaaatagctattgtcagctctgtaattgccttttattagattaccaccaccattttgagaattgaaatgacagcgtgaagagaaaataattatttaaaaataaaatatcaaagatgtgatgtttataacgttagaagttcattaagcttgtaagagcactaagagcaggctgttcattttcatcttctccaactgctagtttgacacaattctcgatgttttgtaacagttttctccatgacttcacaattgttgaaatactttacagactcccacgcagatgtgatttcgtagagtcgagaatagtgaatgacttccaaaacaacttcaagtcatatccttcaatttttgagctaagtaattttgttctgtagtttctcttcatagacgcaatgacgccttggtccataggctgaactagcgcagtggtgtttgggggcaaacatttttccgtcagcagacttacagctttttgtggcaaattgtttccttttaaatgttttttgacttctggtacaaatttgacttagtaaagataatacagtggactctctctataacgaactcggatattacgaggtttcacttataacgaggtacactagatttctcatgaaattcctattgaactataacacctctgtaacgaggcatatttggttataacgagaaaaaatgaaatcgaagaatatgtttctttacctgaatggctatgaataaataccctcaactgcctgtatatagaaatgcccaacatctgtgttattatcgaggccgttgctataataaactccaccgcctgtaataaacttcatctgtttatctatcgaccgatattgaatattgtaggaaatttacgatggctataatccgttccgcggataatccgctcgcggataaacgggaattgactgtatcgtagaaaaatatttatgtcattcaattattgtagttgttgcgtaggtgttggcttccatttgactgattttgaggatattagtataactaacgtaaaccataagtactgttaaactgatttttgcatcgtattgaatatctaaggagtattagcttaaaaaatctgtttgatattaacataagtcacaaaacatcacgatgattttgtttctttttggggacaaaatgatgcaattttaaacgaaagcacaaaaaggaagaagacatataggaacgtagactaaaaccccttataacttcatgccactccacaatcactagctcgtagattagttagtaaatgcagcgactgaatgtagagtggtagggatgttttgagtaaacagggttgccgcaatcccttgattccttaaactaacatgctctttaaacaattgtagcaataagttgacgcaaagagcgagataacatacctacagcattattcaatgaaattcggaactgctttcctgaatatttttgatctgacaatctgatgaaaacgttaagaaatatagcaaaattattaaaaaaaaaccttggaaaaatacgtccactctttctttacaattgaagcgtttatttgaaaaacaacagatgttcatttttcgcaaattcgactttatgtacctattcctctcaaggaatagtagtttctttatccatctgacatatccagttgtgtaaaaatctcagttgtccggagaaaactacatagaacatttggatagtattagaaaaacaccagatgtgtgggaagtttttcttgatttgccaaaattttaatttttggacaagtgttgtttttcaaataaacgcttcaattatactgtgaaaaggaaggcagttacaagtaatgacaaataaatggtcattgatttattcgagatataacttgtttttttgcatggacagatttcatagatgacatatgtcaaaactgacatctgtaaacttagacaagtgacaactgaagaattctacacaacaatacttttacacaatactgttgtattttatacctttatacctttcacctatactcacttttatcctggcagccctgtttagcaataagcctagtagtagtagcaaaaaataggcttaagatttgccttaattgcccaatatattcaagtctgcattaatttttagtattttttatttgtggttgtatgtattttaatggaaagttaaagtttgaaggtattttgatgactaaacttttcgtgtgtgtaatactatattagtaacttttgttcacgagtagtaaggttttgtgctatagttttttatgatttttatagtgtgtaggacattttaagaatgtatacctcttgacggttttttagaactgtaataaatatatgtttgg

SEQ ID NO: 2164 - DNA, 6120 bp, Diabrotica virgifera
  SmartBlast Evalue=1E-115; Info="6PF-2-K/Fru-2,6-P2ASE liver/muscle isozymes n=1 Tax=Harpegnathos saltator RepID= E2BPQ1_9HYME"
acgatatatacgtagcttttgcatcattccgattcagtctagttgaatctctcatgtagtgaacaaccattcattccgttatggatctaaaaaaccgtttttgtcgtgcaggtgcccaagcgccgaagacgaagctgctgaggcagttcggacctctgttggtggccatggtcggattgccgggaagaggaaagagcttgctggccaggagattgtccagatatctcaatttcaccggtgataacaccaaagtatatgacattagcgagtaccgtcgcaaacacatcaagcaatatggttctcacgaaatgttccgagcagataacttgccagcttggaagattcgtcaacagagcttccgtgaagctttggaagacgccgcagcttatttgcacagttcgaataccagcgtcgccattttggatggaccgaacgtctccagaggacagagacaagaaatctacgatctcatctacactcaaatgggcttcagggtcatgttcatagagtgcgtctgcgaagatcctgttctgctggaaagaaactttaaggagatcttacaatacagcgccgattaccacgacatggccacggaagaggcactgaaggatttgacacataagatggctcattaccaagcgcagtacgaatctccgacacttggaagtttgtgggaacttccgtgccccatggtcaaaattttggatggaggtgatggtggtattattgctcatggcatcaacggacaaaaggagagcaagatccttgcttacatctccacacagaagcagatcaaacagactctatatttcagtcgacacggagaaagtgaatacaacgtcattggaaagatcggcggcaacgcaaggctctctcccagaggcaggatgtatgccaaagcgctaacgaagcatgtgcgcgcgcttaatctacccagcctccaagtttggacctccactcttcaaagaacaaaagaaactgcagccagtattcaagcccctcaacaacatttgtccgaattagatgaaatttggtcgggcgaatgtgaaagtctgtcatacgaagaacttcaagagcacttccccaaagaattagctctacgcgaccgcgagaagcttaagtaccgttaccctcaaggcgaatcctacattgacgtcatgactcgtctgatgccagtacttacccaactcgagtgcgaaaccaacgtactaaccgtatcccaccaggctgtccttcgctgcgtgctcggctatttcttggaaacgcccccagaagaaatcccctacatccacgtccccctccacaccatcatcaagcttacccttaagggccacagttacaacatggaaaccatcaagatgcctatcgagtgtgtggatactaacagagccaagcctctcaactgctccgaagatagaaccgcggaagatgctttgctcacgttgcctaaacactatgattctttgtccagtttaagtaacatgatgccctgtacttagcttacttttggaaagtgctcttttatttaggggctgacggtaatgctatggtttttggatgtcgttttagataagtgacgaggatgcaattttgcggtgttgatactatttctattttgtacaaggttagtcctaaaagtacctgacctaacaaaacaaaaagaaaaaaaaatatattatagtgagaacttttgaactgacataatgtgcgcaagatggagaaattcgagttttttaatgtttttgatcattgtagtaaaattaagcagaattttcttgatttcttcacttatacgctacaaagagttcttttactatttatatccatcaacgaaagttacttcaccagaggagctgttttctctggcctttgaagtgagttctaatagctttctagttttgcggaataatagaccaagaaaccatggtcagtgattagggttatatgttaataaggttttgaggttatattaaggttaatagtttaatgtagtaaacataaccttattggcctaatcgacagtattcattattgacagctgtcaaacaagtgtctttaaacttaattttgtaaggatggtacaattgttcaggcgcttctaggactaaccctcttatagtagctttagacgttagtcgtttattattttgatccattatagatggcgcaaaattgaattctagttttagaaacatgttgtattgttaatatttttgatgaaacttacaaaaaaagccttggaaaggttcctttttgaaacaaatacagtcaactccagtttatccctagggttgggtagcacggttgtcgcggataagctgtaactggaattcaaatacataaatgtaaaaaataaaaatgtagtttcacctaaagctttaataacttatattttcaatgtgtacttatatttttactttttttgaaattaatctctcacttgtttctgcttctttgaatggaaaacgtgtttctctattttttccattgctacgcagcatcagtttttcagcaagtagcgcgtcgcccttgtcctctaggtattctattaggaagttcatttacgtgaccaccaaatccaagctcctcttctttttcatcactttcctcgttttctccccagcattttattaggaatgtcttcatccgttagatgctcaaatcccgggtcggtagcatcgaagtctaaccactcttgcaggtttcctgcgaccacattctctcgtttgtaacgttcctgttttctttgagaaaaatttctcacttgtgttcaaaatttttctgatgggtgagaggagtgtgtaacgttacaaacgtcacatctttgatgttttatttttaaataatttcttaaaaataaaatatcaaagataataattatttaaaaataaaatatcaaagatgcttcgagccccacgttgggcgccagtgaaacgaaataagcgatggactaccccagctaattgaaataatattcgaaaatattacctcaatcatccaagatagccatcgttcacccttgcttagctcagtctctcaggtgtgtgttcgtcttgtcctaatcttagaaatgaactatgaaaattcagaatggaagcaaacaaaacaatatttttaactaatcatgtttattgttcataaaatacattaaaaatgtgacttattaagttcattaacaaatatattcaaattcttgccaaaaactaacaattcttggattatacttctgcatggcttgtggtgttggttcgatggtaacttcttgatgtcgaatagtactgctgctggttcttcaacgggctctgggattctaaaggctgtattccaccaggcctacagatgttggtcgttgcagtctaggtgatgtggttgcagtatggatgacatgtccctcgttcttgtatcgccggcgatttgaggattcttgaagctcccagagggaggacggtgatctttatcccaaaaactagaagagtaaaacacatatcaatcatcaagaagataaaccaaagtgtgccagtctgccaatcttttaagaaataattgtcagaaagagtagcagatgacaagaataaattaaatggaatgaagatgaggagaatagttaaaatttgatgactaaacgtgcatatatgtaaattaaaaagatatatttaaaactaaaatatcagaaaccatgcttttagatgggaggttaggttagatataaaaaaatattagaaaaactgctagatgcagaaatgtaattaaaatatgataatatgtattcttaccccaagagaatgataagtctggaaatagctattgtcagctctgtaattgccttttattagattaccaccaccattttgagaattgaaatgacagcgtgaagagaaaataattatttaaaaataaaatatcaaagatgtgatgtttataacgttagaagttcattaagcttgtaagagcactaagagcaggctgttcattttcatcttctccaactgctagtttgacacaattctcgatgttttgtaacagttttctttatgacttcacaattgttgaaatactttacagactcccacgcagatgtgatttcgtagagtcgagaatagtgaatgacttccaaaacaacttcgtcatatccttcaatttttgagctaagtaattttgttctgtagtttctcttcatagacgcaatgacgccttggtccataggctgaactagcgcagtggtgtttgggggcaaacatttttccgtcagcagacttaaacataaatatgtgattcaagatgtgagtgaacgttgtcaatcaaaaacacagctttttgtggcaaattgtttccttttaaatgttttttgacttctggtacaaatttgactttgtaaagataatacagtggactctctctataacgaacacggatattacgagggttcgcttataacgaggtacactagatttctcatgaaattcctattgaactataacacctctgtaacgaggcatatttggttataacgagaaaaaatgaaatcgaagaatatgtttctttacctgaatggctatgaataaataccctcaactgcctgtatatagaaatgcccaacatctgtgttattatcgaggccgttgctataataaactccaccgcctgtaataaacttcatctgtttatctatcgaccgatattgaatattgtaggaaatttacgatggctataatccgttccgcggataatccgctcgcggataaacgggaattgactgtatcgtagaaaaatatttatgtcattcaattattgtagttgttgcgtaggtgttggcttccatttgactgattttgaggatattagtataactaacgtaaaccataagtactgttaaactgatttttgcatcgtattgaatatctaaggagtattagcttaaaaaatctgtttgatattaacataagtcacaaaacatcacgatgattttgtttctttttggggacaaaatgatgcaattttaaacgaaagcacaaaaaggaagaagacatataggaacgtagactaaaaccccttataacttcatgccactccacaatcactagctcgtagattagttagtaaatgcagcgactgaatgtagagtggtagggatgttttgagtaaacagggttgccgcaatcccttgattccttaaactaacatgctctttaaacaattgtagcaataagttgacgcaaagagcgagataacatacctacagcattattcaatgaaattcggatagcaaaattattaaaaaaaaaccttgggaaaatacgtccactctttctttacaattgaagcgtttatttgaaaaacaacagatgttcatttttcgcaaattcgactttatgtacctattcctctcatggaatagtagtttctttatccatctgacatatccagttgtgtaaaaatctcagttgtccggagaaaactacatagaacatttggatagtattagaaaaacaccagatgtgtgggaagtttttcttgatttgccaaaattttaatttttggacaagtgttgtttttcaaataaacgcttcaattatactgtgaaaaggaaggcagttacaagtaatgacaaataaatggtcattgatttattcgagatataacttgtttttttgcatggacagatttcatagatgacatatgtcaaaactgacatctgtaaacttagacaagtgacaactgaagaattctacacaacaatacttttacacaatactgttgtattttatacctttatacctttcacctatactcacttttatcctggcagccctgtttagcaataagcctagtagtagtagcaaaaaataggcttaagatttgccttaattgcccaatatattcaagtctgcattaatttttagtattttttatttgtggttgtatgtattttaatggaaagttaaagtttgaaggtattttgatgactaaacttttcgtgtgtgtaatactatattagtaacttttgttcacgagtagtaaggttttgtgctatagttttttatgatttttatagtgtgtaggacattttaagaatgtatacctcttgacggttttttagaactgtaataaatatatgtttgg

SEQ ID NO: 2165 - DNA, 6072 bp, Diabrotica virgifera
  SmartBlast Evalue=1E-115; Info="6PF-2-K/Fru-2,6-P2ASE liver/muscle isozymes n=1 Tax=Harpegnathos saltator RepID= E2BPQ1_9HYME"
acgatatatacgtagcttttgcatcattccgattcagtctagttgaatctctcatgtagtgaacaaccattcattccgttatggatctaaaaaaccgtttttgtcgtgcaggtgcccaagcgccgaagacgaagctgctgaggcagttcggacctctgttggtggccatggtcggattgccgggaagaggaaagagcttgctggccaggagattgtccagatatctcaatttcaccggtgataacaccaaagtatatgacattagcgagtaccgtcgcaaacacatcaagcaatatggttctcacgaaatgttccgagcagataacttgccagcttggaagattcgtcaacagagcttccgtgaagctttggaagacgccgcagcttatttgcacagttcgaataccagcgtcgccattttggatggaccgaacgtctccagaggacagagacaagaaatctacgatctcatctacactcaaatgggcttcagggtcatgttcatagagtgcgtctgcgaagatcctgttctgctggaaagaaactttaaggagatcttacaatacagcgccgattaccacgacatggccacggaagaggcactgaaggatttgacacataagatggctcattaccaagcgcagtacgaatctccgacacttggaagtttgtgggaacttccgtgccccatggtcaaaattttggatggaggtgatggtggtattattgctcatggcatcaacggacaaaaggagagcaagatccttgcttacatctccacacagaagcagatcaaacagactctatatttcagtcgacacggagaaagtgaatacaacgtcattggaaagatcggcggcaacgcaaggctctctcccagaggcaggatgtatgccaaagcgctaacgaagcatgtgcgcgcgcttaatctacccagcctccaagtttggacctccactcttcaaagaacaaaagaaactgcagccagtattcaagcccctcaacaacatttgtccgaattagatgaaatttggtcgggcgaatgtgaaagtctgtcatacgaagaacttcaagagcacttccccaaagaattagctctacgcgaccgcgagaagcttaagtaccgttaccctcaaggcgaatcctacattgacgtcatgactcgtctgatgccagtacttacccaactcgagtgcgaaaccaacgtactaaccgtatcccaccaggctgtccttcgctgcgtgctcggctatttcttggaaacgcccccagaagaaatcccctacatccacgtccccctccacaccatcatcaagcttacccttaagggccacagttacaacatggaaaccatcaagatgcctatcgagtgtgtggatactaacagagccaagcctctcaactgctccgaagatagaaccgcggaagatgctttgctcacgttgcctaaacactatgattctttgtccagtttaagtaacatgatgccctgtacttagcttacttttggaaagtgctcttttatttaggggctgacggtaatgctatggtttttggatgtcgttttagataagtgacgaggatgcaattttgcggtgttgatactatttctattttgtacaaggttagtcctaaaagtacctgacctaacaaaacaaaaagaaaaaaaaatatattatagtgagaacttttgaactgacataatgtgcgcaagatggagaaattcgagttttttaatgtttttgatcattgtagtaaaattaagcagaattttcttgatttcttcacttatacgctacaaagagttcttttactatttatatccatcaacgaaagttacttcaccagaggagctgttttctctggcctttgaagtgagttctaatagctttctagttttgcggaataatagaccaagaaaccatggtcagtgattagggttatatgttaataaggttttgaggttatattaaggttaatagtttaatgtagtaaacataaccttattggcctaatcgacagtattcattattgacagctgtcaaacaagtgtctttaaacttaattttgtaaggatggtacaattgttcaggcgcttctaggactaaccctcttatagtagctttagacgttagtcgtttattattttgatccattatagatggcgcaaaattgaattctagttttagaaacatgttgtattgttaatatttttgatgaaacttacaaaaaaagccttggaaaggttcctttttgaaacaaatacagtcaactccagtttatccctagggttgggtagcacggttgtcgcggataagctgtaactggaattcaaatacataaatgtaaaaaataaaaatgtagtttcacctaaagctttaataacttatattttcaatgtgtacttatatttttactttttttgaaattaatctctcacttgtttctgcttctttgaatggaaaacgtgtttctctattttttccattgctacgcagcatcagtttttcagcaagtagcgcgtcgcccttgtcctctaggtattctattaggaagttcatttacgtgaccaccaaatccaagctcctcttctttttcatcactttcctcgttttctccccagcattttattaggaatgtcttcatccgttagatgctcaaatcccgggtcggtagcatcgaagtctaaccactcttgcaggtttcctgcgaccacattctctcgtttgtaacgttcctgttttctttgagaaaaatttctcacttgtgttcaaaatttttctgatgggtgagaggagtgtgtaacgttacaaacgtcacatctttgatgttttatttttaaataatttcttaaaaataaaatatcaaagataataattatttaaaaataaaatatcaaagatgcttcgagccccacgttgggcgccagtgaaacgaaataagcgatggactaccccagctaattgaaataatattcgaaaatattacctcaatcatccaagatagccatcgttcacccttgcttagctcagtctctcaggtgtgtgttcgtcttgtcctaatcttagaaatgaactatgaaaattcagaatggaagcaaacaaaacaatatttttaactaatcatgtttattgttcataaaatacattaaaaatgtgacttattaagttcattaacaaatatattcaaattcttgccaaaaactaacaattcttggattatacttctgcatggcttgtggtgttggttcgatggtaacttcttgatgtcgaatagtactgctgctggttcttcaacgggctctgggattctaaaggctgtattccaccaggcctacagatgttggtcgttgcagtctaggtgatgtggttgcagtatggatgacatgtccctcgttcttgtatcgccggcgatttgaggattcttgaagctcccagagggaggacggtgatctttatcccaaaaactagaagagtaaaacacatatcaatcatcaagaagataaaccaaagtgtgccagtctgccaatcttttaagaaataattgtcagaaagagtagcagatgacaagaataaattaaatggaatgaagatgaggagaatagttaaaatttgatgactaaacgtgcatatatgtaaattaaaaagatatatttaaaactaaaatatcagaaaccatgcttttagatgggaggttaggttagatataaaaaaatattagaaaaactgctagatgcagaaatgtaattaaaatatgataatatgtattcttaccccaagagaatgataagtctggaaatagctattgtcagctctgtaattgccttttattagattaccaccaccattttgagaattgaaatgacagcgtgaagagaaaataattatttaaaaataaaatatcaaagatgtgatgtttataacgttagaagttcattaagcttgtaagagcactaagagcaggctgttcattttcatcttctccaactgctagtttgacacaattctcgatgttttgtaacagttttctccatgacttcacaattgttgaaatactttacagactcccacgcagatgtgatttcgtagagtcgagaatagtgaatgacttccaaaacaacttcaagtcatatccttcaatttttgagctaagtaattttgttctgtagtttctcttcatagacgcaatgacgccttggtccataggctgaactagcgcagtggtgtttgggggcaaacatttttccgtcagcagacttacagctttttgtggcaaattgtttccttttaaatgttttttgacttctggtacaaatttgacttagtaaagataatacagtggactctctctataacgaactcggatattacgaggtttcacttataacgaggtacactagatttctcatgaaattcctattgaactataacacctctgtaacgaggcatatttggttataacgagaaaaaatgaaatcgaagaatatgtttctttacctgaatggctatgaataaataccctcaactgcctgtatatagaaatgcccaacatctgtgttattatcgaggccgttgctataataaactccaccgcctgtaataaacttcatctgtttatctatcgaccgatattgaatattgtaggaaatttacgatggctataatccgttccgcggataatccgctcgcggataaacgggaattgactgtatcgtagaaaaatatttatgtcattcaattattgtagttgttgcgtaggtgttggcttccatttgactgattttgaggatattagtataactaacgtaaaccataagtactgttaaactgatttttgcatcgtattgaatatctaaggagtattagcttaaaaaatctgtttgatattaacataagtcacaaaacatcacgatgattttgtttctttttggggacaaaatgatgcaattttaaacgaaagcacaaaaaggaagaagacatataggaacgtagactaaaaccccttataacttcatgccactccacaatcactagctcgtagattagttagtaaatgcagcgactgaatgtagagtggtagggatgttttgagtaaacagggttgccgcaatcccttgattccttaaactaacatgctctttaaacaattgtagcaataagttgacgcaaagagcgagataacatacctacagcattattcaatgaaattcggatagcaaaattattaaaaaaaaaccttgggaaaatacgtccactctttctttacaattgaagcgtttatttgaaaaacaacagatgttcatttttcgcaaattcgactttatgtacctattcctctcatggaatagtagtttctttatccatctgacatatccagttgtgtaaaaatctcagttgtccggagaaaactacatagaacatttggatagtattagaaaaacaccagatgtgtgggaagtttttcttgatttgccaaaattttaatttttggacaagtgttgtttttcaaataaacgcttcaattatactgtgaaaaggaaggcagttacaagtaatgacaaataaatggtcattgatttattcgagatataacttgtttttttgcatggacagatttcatagatgacatatgtcaaaactgacatctgtaaacttagacaagtgacaactgaagaattctacacaacaatacttttacacaatactgttgtattttatacctttatacctttcacctatactcacttttatcctggcagccctgtttagcaataagcctagtagtagtagcaaaaaataggcttaagatttgccttaattgcccaatatattcaagtctgcattaatttttagtattttttatttgtggttgtatgtattttaatggaaagttaaagtttgaaggtattttgatgactaaacttttcgtgtgtgtaatactatattagtaacttttgttcacgagtagtaaggttttgtgctatagttttttatgatttttatagtgtgtaggacattttaagaatgtatacctcttgacggttttttagaactgtaataaatatatgtttgg

SEQ ID NO: 2166 - DNA, 4237 bp, Diabrotica virgifera
taaccgactacgaagtacgagtactcgcacgagacacgggcaagatccggcactcatttgtttggaaaaacgtcggtaaagtagatttattgttcgagtgtgctaccaaaaattatttccacactttttggttctttgtctatcgaatgttgagacagtaaatatagattaatttttttgaacttttgaaaatgattgtttgatgtgtttttaataagccaagtgtttgtttggaattttttggatatagtcaattttggatagtttattatagtaattctaattagtaagtaattgtcatacaaaatgggtgcgaagcagtcaaaaaggtcagtagatattacaaataccccaacaaaaggagaagttgaagctgtaggtgagggagaaggacgagtagttaaaattggtgatgcagatattaaagccacaacgaacggcgcagttccacatacagatttagaaataggggaaaaagatgaaaacgaaaaagacctcacagctgaaaaagagaacaaggaagaaaacgtagtagaagtaaaagaaaacggcgtatcagaatcagaagatgcgaaaacaccagaatccgaatccgaaaatgtaaacgaatcagaaaagtcaatcgagaatacagaaaacaaaacagaagagacggcggaagctaagaaacagaaagaaaagaagaaaaagaaatggtcgtttagaagtatatcattctctaaaaaggataaatctaaaccaagcaaggactctgagaagaacggtgatgttaaggaagtagcggaagagaacgttgatgaatcagccacatctcccacagctgaatctccaaaaactgagaaaccagaatccacagaatccacagaagccgctacagttctcaacggagaggcatcaaaagatgaaatcgccagcgaagcacccaaaacagaagccgctacacccgtagaggaagagcccaaaaaagaggaacctgtggtagatgagcctgcaaaagaggaagcaaaagaggagccgaagatagaggaacccaaggcgaggaacctaaacctgttgaagcagcagaatcacctaaagtccccgaacccgttactgaatccgctccctctcccccggaacaagaggaacccgctaccataaatccaccaactgaggaaaccaaagaggtacctcctgtagctccgagcgaaacgtcaaaagaagaagaggaaaaggctgctcctgcggaggttgtaacggtagaagaataagttcagtccttccaccaaaagtaataagtttttatacatacattttaaacaaaacaaattgatcatatttggcagtgatcaaataaatccgaccaaatcacacatggaagctgcctaaccgactctcatacatttatccattaaaaaaatgtaatcagaagttttaatactcccataataaaatattttatattgtctttagaaatctggacagtttttatatgtcgttcaaacgacttttttaatcgtatacaattttgtaatataaaaaatttagtgtagtcttagtatctatttcctaggtgagcttattttgaaaaaaaaaaatcttgtgttttatcatcacttttatattataaaatagccagtcaatgagcattgttacgaatatattcattatcgtctctgctattatcgctaccatataaatattccaattaacgaatgaatgttagacaaattcgcaatataaaatattccagagatctttgttagacgagcatttattaaatttttgcaataattggtgctgtattcgtttttttaaacaacagttatttaagaaaaacaacaaacttaaaattaatctaaatttaaaataaaatatgccatctaatacttcttgattaattttaaagctctttatttgttgtcaattttttaacaaaatataagctggtattgacacgggtcttgctattcaatcaaaagatgtgtttgacttttccctttgatattgttgtttatgaacttgaaattatgttaccaacctacgcatagacatatataatacttgtatgtttatgcacgtaggtgatcaaactctaaccaactaaataatttcaaatattggatatattatattgggacatgctgtatataaaatggtcaatgactggtctatttgaatgttaattaaaagccaaacaatcaatttattttatttgtaattatattcttatttagcttgtatttagattagatacatatcttatattaaattaaagagagaggaaagtcatgtacttgctccgtgaaatttttgtaaatgtattagctgttaaaaatgttttttgagaaatatcgggccaaattgtcttcattcttcaaaattcagttttaatcacagtgccagatcacaacaaactaaaattgtagttttattttgaggttcactcacacatttcttataacctcttcaattcagttctaaaaacgagttttcgaaaagaagattcgaattttgaatgaatatattttgaatttcatgaatatatcagttaatctacagttagttaataaaaagtttttgtttgttgtgattcttaaggtattttttgtttttaactgtataaaagtgttacgaaattttaaagaaagtataaatgtgtagaatagataaatcggccgtttaagaaatattcacagtgtgcttcttgtattttcttatataggcaactagttcactactgttttttaacctattcaataaagtaagttctttctgtttcgtttgttttatcttagataataatagaagatttttgtcatttcctacactagtagtcacagaattgggaagaagacttattgaaatatttatgctgaattttcgataggtaggattattaagacatgaatttaacttgtagatatttttgacgtttaaacgttggtaaaaacgtcagtcgtctttcttttttgatttttacgtttcacttcttatgtttcaaaaataaaaaccttatcctgtaaaaggtatatttttacaagatttttacaatataccttttacaagataaggttttattttttgtgatttatggtatacagccagttacaggaatttttccttgtgatatttcttatgtttcacttgctcagaaattttcaataatgagtattttgccaaaatgctgtcacaaagattctaaaaccatgtatccggtttgctcactcattttctttatttagttcctatgaccaagtgtccgtttatgtttgaaccgttaactgtggtaattgaaatatatcgtcaaaggtaaacgttttcctaatattcatcgattttttgtttcaatatttcaacttatttcttattcgcaagtttagaaatattatattatcaatttctatagtttaagataatctataaaatattgttatggaatatccttagctcttttccagttttctttaaatggttctagcatcttagttcccgattataagcagcatattactgcctgtctttttttcgtccacgtttaaatgattcaatattattttcacttcagatgaatcacgaaaaataatgcactttttagaatgactacgtcgttaccaacagttagttgacagatctgttaggattagttatgtctcttttgtctgtagtaaagatctaaatttctctaagcagtcaacagtaaaggatgttactgaatgagttgtttgtatagagtttagttgaattaacatgccttataatttttctgtgatggaaaatgtaatagtaaggtaaatgaaaggaattgtaaaaagtagggaattgatgatttgtatgttgctagtatcagtatgtagagtgtaggacgtggtcaaaataacttctaaatagtaacgtaacgttttgtgtacattttaaagagtttaaatatttacatttacaaatttgtatcgcctaaatgtgattttacgaagtaaaaatggttggttttgcaaaaattataataaaaatttaaaattacacaacgaaatttacgtgtctcgaaatttctacattagcgattaagtttttaattttttatcaactcaaaagtatattctgtctcttgtatcagtgtcccacagctatttgatatttcgctattactgtatctaccgacttatcaaaaaggctgtgtgtaggtaaaaatgattgaaataaaaatcttcatgtatgtgtgaatgtgtttataaacataaatatataatttaggatgttt

SEQ ID NO: 2167 - DNA, 4215 bp, Diabrotica virgifera
taaccgactacgaagtacgagtactcgcacgagacacgggcaagatccggcactcatttgtttggaaaaacgtcggtaaagtagatttattgttcgagtgtgctaccaaaaattatttccacactttttggttctttgtctatcgaatgttgagacagtaaatatagattaatttttttgaacttttgaaaatgattgtttgatgtgtttttaataagccaagtgtttgtttggaattttttggatatagtcaattttggatagtttattatagtaattctaattagtaagtaattgtcatacaaaatgggtgcgaagcagtcaaaaaggtcagtagatattacaaataccccaacaaaaggagaagttgaagctgtaggtgagggagaaggacgagtagttaaaattggtgatgcagatattaaagccacaacgaacggcgcagttccacatacagatttagaaataggggaaaaagatgaaaacgaaaaagacctcacagctgaaaaagagaacaaggaagaaaacgtagtagaagtaaaagaaaacggcgtatcagaatcagaagatgcgaaaacaccagaatccgaatccgaaaatgtaaacgaatcagaaaagtcaatcgagaatacagaaaacaaaacagaagagacggcggaagctaagaaacagaaagaaaagaagaaaaagaaatggtcgtttagaagtatatcattctctaaaaaggataaatctaaaccaagcaaggactctgagaagaacggtgatgttaaggaagtagcggaagagaacgttgatgaatcagccacatctcccacagctgaatctccaaaaactgagaaaccagaatccacagaatccacagaagccgctacagttctcaacggagaggcatcaaaagatgaaatcgccagcgaagcacccaaaacagaagccgctacacccgtagaggaagagcccaaaaaagaggaacctgtggtagatgagcctgcaaaagaggaagcaaaagaggagccgaagatagaggaacccaaggcgaggaacctaaacctgttgaagcagcagaatcacctaaagtccccgaacccgttactgaatccgctccctctcccccggaacaagaggaacccgctaccataaatccaccaactgaggaaaccaaagaggtacctcctgtagctccgagcgaaacgtcaaaagaagaagaggaaaaggctgctcctgcggaggttgtaacggtagaagaataagttcagtccttccaccaaaagtaataagtttttatacatacattttaaacaaaacaaattgatcatatttggcagtgatcaaataaatccgaccaaatcacacatggaagctgcctaaccgactctcatacatttatccattaaaaaaatgtaatcagaagttttaatactcccataataaaatattttatattgtctttagaaatctggacagtttttatatgtcgttcaaacgacttttttaatcgtatacaattttgtaatataaaaaatttagtgtagtcttagtatctatttcctaggtgagcttattttgaaaaaaaaaaatcttgtgttttatcatcacttttatattataaaatagccagtcaatgagcattgttacgaatatattcattatcgtctctgctattatcgctaccatataaatattccaattaacgaatgaatgttagacaaattcgcaatataaaatattccagagatctttgttagacgagcatttattaaatttttgcaataattggtgctgtattcgtttttttaaacaacagttatttaagaaaaacaacaaacttaaaattaatctaaatttaaaataaaatatgccatctaatacttcttgattaattttaaagctctttatttgttgtcaattttttaacaaaatataagctggtattgacacgggtcttgctattcaatcaaaagatgtgtttgacttttccctttgatattgttgtttatgaacttgaaattatgttaccaacctacgcatagacatatataatacttgtatgtttatgcacgtaggtgatcaaactctaaccaactaaataatttcaaatattggatatattatattgggacatgctgtatataaaatggtcaatgactggtctatttgaatgttaattaaaagccaaacaatcaatttattttatttgtaattatattcttatttagcttgtatttagattagatacatatcttatattaaattaaagagagaggaaagtcatgtacttgctccgtgaaatttttgtaaatgtattagctgttaaaaatgttttttgagaaatatcgggccaaattgtcttcattcttcaaaattcagttttaatcacagtgccagatcacaacaaactaaaattgtagttttattttgaggttcactcacacatttcttataacctcttcaattcagttctaaaaacgagttttcgaaaagaagattcgaattttgaatgaatatattttgaatttcatgaatatatcagttaatctacagttagttaataaaaagtttttgtttgttgtgattcttaaggtattttttgtttttaactgtataaaagtgttacgaaattttaaagaaagtataaatgtgtagaatagataaatcggccgtttaagaaatattcacagtgtgcttcttgtattttcttatataggcaactagttcactactgttttttaacctattcaataaagtaagttctttctgtttcgtttgttttatcttagataataatagaagatttttgtcatttcctacactagtagtcacagaattgggaagaagacttattgaaatatttatgctgaattttcgataggtaggattattaagacatgaatttaacttgtagatatttttgacgtttaaacgttggtaaaaacgtcagtcgtctttctttttctcgtctaaaaaataaaaccttatcctgtaaaaggtatatttttacaagatttttacaatataccttttacaagataaggttttattttttgtgatttatggtatacagccagttacaggaatttttccttgtgatatttcttatgtttcacttgctcagaaattttcaataatgagtattttgccaaaatgctgtcacaaagattctaaaaccatgtatccggtttgctcactcattttctttatttagttcctatgaccaagtgtccgtttatgtttgaaccgttaactgtggtaattgaaatatatcgtcaaaggtaaacgttttcctaatattcatcgattttttgtttcaatatttcaacttatttcttattcgcaagtttagaaatattatattatcaatttctatagtttaagataatctataaaatattgttatggaatatccttagctcttttccagttttctttaaatggttctagcatcttagttcccgattataagcagcatattactgcctgtctttttttcgtccacgtttaaatgattcaatattattttcacttcagatgaatcacgaaaaataatgcactttttagaatgactacgtcgttaccaacagttagttgacagatctgttaggattagttatgtctcttttgtctgtagtaaagatctaaatttctctaagcagtcaacagtaaaggatgttactgaatgagttgtttgtatagagtttagttgaattaacatgccttataatttttctgtgatggaaaatgtaatagtaaggtaaatgaaaggaattgtaaaaagtagggaattgatgatttgtatgttgctagtatcagtatgtagagtgtaggacgtggtcaaaataacttctaaatagtaacgtaacgttttgtgtacattttaaagagtttaaatatttacatttacaaatttgtatcgcctaaatgtgattttacgaagtaaaaatggttggttttgcaaaaattataataaaaatttaaaattacacaacgaaatttacgtgtctcgaaatttctacattagcgattaagtttttaattttttatcaactcaaaagtatattctgtctcttgtatcagtgtcccacagctatttgatatttcgctattactgtatctaccgacttatcaaaaaggctgtgtgtaggtaaaaatgattgaaataaaaatcttcatgtatgtgtgaatgtgtttataaacataaatatataatttaggatgttt

SEQ ID NO: 2168 - DNA, 4074 bp, Diabrotica virgifera
aaagttgtaagttggtgcacgtttattgtgaatactgattaagtgtgatcattttatacgggatattttcggtgtacaaggggctgtgagtcttaacacaaatctagattaaaacagtaattagtaagtaattgtcatacaaaatgggtgcgaagcagtcaaaaaggtcagtagatattacaaataccccaacaaaaggagaagttgaagctgtaggtgagggagaaggacgagtagttaaaattggtgatgcagatattaaagccacaacgaacggcgcagttccacatacagatttagaaataggggaaaaagatgaaaacgaaaaagacctcacagctgaaaaagagaacaaggaagaaaacgtagtagaagtaaaagaaaacggcgtatcagaatcagaagatgcgaaaacaccagaatccgaatccgaaaatgtaaacgaatcagaaaagtcaatcgagaatacagaaaacaaaacagaagagacggcggaagctaagaaacagaaagaaaagaagaaaaagaaatggtcgtttagaagtatatcattctctaaaaaggataaatctaaaccaagcaaggactctgagaagaacggtgatgttaaggaagtagcggaagagaacgttgatgaatcagccacatctcccacagctgaatctccaaaaactgagaaaccagaatccacagaatccacagaagccgctacagttctcaacggagaggcatcaaaagatgaaatcgccagcgaagcacccaaaacagaagccgctacacccgtagaggaagagcccaaaaaagaggaacctgtggtagatgagcctgcaaaagaggaagcaaaagaggagccgaagatagaggaacccaaggcgaggaacctaaacctgttgaagcagcagaatcacctaaagtccccgaacccgttactgaatccgctccctctcccccggaacaagaggaacccgctaccataaatccaccaactgaggaaaccaaagaggtacctcctgtagctccgagcgaaacgtcaaaagaagaagaggaaaaggctgctcctgcggaggttgtaacggtagaagaataagttcagtccttccaccaaaagtaataagtttttatacatacattttaaacaaaacaaattgatcatatttggcagtgatcaaataaatccgaccaaatcacacatggaagctgcctaaccgactctcatacatttatccattaaaaaaatgtaatcagaagttttaatactcccataataaaatattttatattgtctttagaaatctggacagtttttatatgtcgttcaaacgacttttttaatcgtatacaattttgtaatataaaaaatttagtgtagtcttagtatctatttcctaggtgagcttattttgaaaaaaaaaaatcttgtgttttatcatcacttttatattataaaatagccagtcaatgagcattgttacgaatatattcattatcgtctctgctattatcgctaccatataaatattccaattaacgaatgaatgttagacaaattcgcaatataaaatattccagagatctttgttagacgagcatttattaaatttttgcaataattggtgctgtattcgtttttttaaacaacagttatttaagaaaaacaacaaacttaaaattaatctaaatttaaaataaaatatgccatctaatacttcttgattaattttaaagctctttatttgttgtcaattttttaacaaaatataagctggtattgacacgggtcttgctattcaatcaaaagatgtgtttgacttttccctttgatattgttgtttatgaacttgaaattatgttaccaacctacgcatagacatatataatacttgtatgtttatgcacgtaggtgatcaaactctaaccaactaaataatttcaaatattggatatattatattgggacatgctgtatataaaatggtcaatgactggtctatttgaatgttaattaaaagccaaacaatcaatttattttatttgtaattatattcttatttagcttgtatttagattagatacatatcttatattaaattaaagagagaggaaagtcatgtacttgctccgtgaaatttttgtaaatgtattagctgttaaaaatgttttttgagaaatatcgggccaaattgtcttcattcttcaaaattcagttttaatcacagtgccagatcacaacaaactaaaattgtagttttattttgaggttcactcacacatttcttataacctcttcaattcagttctaaaaacgagttttcgaaaagaagattcgaattttgaatgaatatattttgaatttcatgaatatatcagttaatctacagttagttaataaaaagtttttgtttgttgtgattcttaaggtattttttgtttttaactgtataaaagtgttacgaaattttaaagaaagtataaatgtgtagaatagataaatcggccgtttaagaaatattcacagtgtgcttcttgtattttcttatataggcaactagttcactactgttttttaacctattcaataaagtaagttctttctgtttcgtttgttttatcttagataataatagaagatttttgtcatttcctacactagtagtcacagaattgggaagaagacttattgaaatatttatgctgaattttcgataggtaggattattaagacatgaatttaacttgtagatatttttgacgtttaaacgttggtaaaaacgtcagtcgtctttcttttttgatttttacgtttcacttcttatgtttcaaaaataaaaaccttatcctgtaaaaggtatatttttacaagatttttacaatataccttttacaagataaggttttattttttgtgatttatggtatacagccagttacaggaatttttccttgtgatatttcttatgtttcacttgctcagaaattttcaataatgagtattttgccaaaatgctgtcacaaagattctaaaaccatgtatccggtttgctcactcattttctttatttagttcctatgaccaagtgtccgtttatgtttgaaccgttaactgtggtaattgaaatatatcgtcaaaggtaaacgttttcctaatattcatcgattttttgtttcaatatttcaacttatttcttattcgcaagtttagaaatattatattatcaatttctatagtttaagataatctataaaatattgttatggaatatccttagctcttttccagttttctttaaatggttctagcatcttagttcccgattataagcagcatattactgcctgtctttttttcgtccacgtttaaatgattcaatattattttcacttcagatgaatcacgaaaaataatgcactttttagaatgactacgtcgttaccaacagttagttgacagatctgttaggattagttatgtctcttttgtctgtagtaaagatctaaatttctctaagcagtcaacagtaaaggatgttactgaatgagttgtttgtatagagtttagttgaattaacatgccttataatttttctgtgatggaaaatgtaatagtaaggtaaatgaaaggaattgtaaaaagtagggaattgatgatttgtatgttgctagtatcagtatgtagagtgtaggacgtggtcaaaataacttctaaatagtaacgtaacgttttgtgtacattttaaagagtttaaatatttacatttacaaatttgtatcgcctaaatgtgattttacgaagtaaaaatggttggttttgcaaaaattataataaaaatttaaaattacacaacgaaatttacgtgtctcgaaatttctacattagcgattaagtttttaattttttatcaactcaaaagtatattctgtctcttgtatcagtgtcccacagctatttgatatttcgctattactgtatctaccgacttatcaaaaaggctgtgtgtaggtaaaaatgattgaaataaaaatcttcatgtatgtgtgaatgtgtttataaacataaatatataatttaggatgttt

SEQ ID NO: 2169 - DNA, 4071 bp, Diabrotica virgifera
cgctagttttattgttaaatgtttattgccttgtgcttgtgatattagtggcttttaacaattattcctttaaaaaattgtgtggtattgttcttccagattgtaaaactttagtaattagtaagtaattgtcatacaaaatgggtgcgaagcagtcaaaaaggtcagtagatattacaaataccccaacaaaaggagaagttgaagctgtaggtgagggagaaggacgagtagttaaaattggtgatgcagatattaaagccacaacgaacggcgcagttccacatacagatttagaaataggggaaaaagatgaaaacgaaaaagacctcacagctgaaaaagagaacaaggaagaaaacgtagtagaagtaaaagaaaacggcgtatcagaatcagaagatgcgaaaacaccagaatccgaatccgaaaatgtaaacgaatcagaaaagtcaatcgagaatacagaaaacaaaacagaagagacggcggaagctaagaaacagaaagaaaagaagaaaaagaaatggtcgtttagaagtatatcattctctaaaaaggataaatctaaaccaagcaaggactctgagaagaacggtgatgttaaggaagtagcggaagagaacgttgatgaatcagccacatctcccacagctgaatctccaaaaactgagaaaccagaatccacagaatccacagaagccgctacagttctcaacggagaggcatcaaaagatgaaatcgccagcgaagcacccaaaacagaagccgctacacccgtagaggaagagcccaaaaaagaggaacctgtggtagatgagcctgcaaaagaggaagcaaaagaggagccgaagatagaggaacccaaggcgaggaacctaaacctgttgaagcagcagaatcacctaaagtccccgaacccgttactgaatccgctccctctcccccggaacaagaggaacccgctaccataaatccaccaactgaggaaaccaaagaggtacctcctgtagctccgagcgaaacgtcaaaagaagaagaggaaaaggctgctcctgcggaggttgtaacggtagaagaataagttcagtccttccaccaaaagtaataagtttttatacatacattttaaacaaaacaaattgatcatatttggcagtgatcaaataaatccgaccaaatcacacatggaagctgcctaaccgactctcatacatttatccattaaaaaaatgtaatcagaagttttaatactcccataataaaatattttatattgtctttagaaatctggacagtttttatatgtcgttcaaacgacttttttaatcgtatacaattttgtaatataaaaaatttagtgtagtcttagtatctatttcctaggtgagcttattttgaaaaaaaaaaatcttgtgttttatcatcacttttatattataaaatagccagtcaatgagcattgttacgaatatattcattatcgtctctgctattatcgctaccatataaatattccaattaacgaatgaatgttagacaaattcgcaatataaaatattccagagatctttgttagacgagcatttattaaatttttgcaataattggtgctgtattcgtttttttaaacaacagttatttaagaaaaacaacaaacttaaaattaatctaaatttaaaataaaatatgccatctaatacttcttgattaattttaaagctctttatttgttgtcaattttttaacaaaatataagctggtattgacacgggtcttgctattcaatcaaaagatgtgtttgacttttccctttgatattgttgtttatgaacttgaaattatgttaccaacctacgcatagacatatataatacttgtatgtttatgcacgtaggtgatcaaactctaaccaactaaataatttcaaatattggatatattatattgggacatgctgtatataaaatggtcaatgactggtctatttgaatgttaattaaaagccaaacaatcaatttattttatttgtaattatattcttatttagcttgtatttagattagatacatatcttatattaaattaaagagagaggaaagtcatgtacttgctccgtgaaatttttgtaaatgtattagctgttaaaaatgttttttgagaaatatcgggccaaattgtcttcattcttcaaaattcagttttaatcacagtgccagatcacaacaaactaaaattgtagttttattttgaggttcactcacacatttcttataacctcttcaattcagttctaaaaacgagttttcgaaaagaagattcgaattttgaatgaatatattttgaatttcatgaatatatcagttaatctacagttagttaataaaaagtttttgtttgttgtgattcttaaggtattttttgtttttaactgtataaaagtgttacgaaattttaaagaaagtataaatgtgtagaatagataaatcggccgtttaagaaatattcacagtgtgcttcttgtattttcttatataggcaactagttcactactgttttttaacctattcaataaagtaagttctttctgtttcgtttgttttatcttagataataatagaagatttttgtcatttcctacactagtagtcacagaattgggaagaagacttattgaaatatttatgctgaattttcgataggtaggattattaagacatgaatttaacttgtagatatttttgacgtttaaacgttggtaaaaacgtcagtcgtctttcttttttgatttttacgtttcacttcttatgtttcaaaaataaaaaccttatcctgtaaaaggtatatttttacaagatttttacaatataccttttacaagataaggttttattttttgtgatttatggtatacagccagttacaggaatttttccttgtgatatttcttatgtttcacttgctcagaaattttcaataatgagtattttgccaaaatgctgtcacaaagattctaaaaccatgtatccggtttgctcactcattttctttatttagttcctatgaccaagtgtccgtttatgtttgaaccgttaactgtggtaattgaaatatatcgtcaaaggtaaacgttttcctaatattcatcgattttttgtttcaatatttcaacttatttcttattcgcaagtttagaaatattatattatcaatttctatagtttaagataatctataaaatattgttatggaatatccttagctcttttccagttttctttaaatggttctagcatcttagttcccgattataagcagcatattactgcctgtctttttttcgtccacgtttaaatgattcaatattattttcacttcagatgaatcacgaaaaataatgcactttttagaatgactacgtcgttaccaacagttagttgacagatctgttaggattagttatgtctcttttgtctgtagtaaagatctaaatttctctaagcagtcaacagtaaaggatgttactgaatgagttgtttgtatagagtttagttgaattaacatgccttataatttttctgtgatggaaaatgtaatagtaaggtaaatgaaaggaattgtaaaaagtagggaattgatgatttgtatgttgctagtatcagtatgtagagtgtaggacgtggtcaaaataacttctaaatagtaacgtaacgttttgtgtacattttaaagagtttaaatatttacatttacaaatttgtatcgcctaaatgtgattttacgaagtaaaaatggttggttttgcaaaaattataataaaaatttaaaattacacaacgaaatttacgtgtctcgaaatttctacattagcgattaagtttttaattttttatcaactcaaaagtatattctgtctcttgtatcagtgtcccacagctatttgatatttcgctattactgtatctaccgacttatcaaaaaggctgtgtgtaggtaaaaatgattgaaataaaaatcttcatgtatgtgtgaatgtgtttataaacataaatatataatttaggatgttt

SEQ ID NO: 2170 - DNA, 4052 bp, Diabrotica virgifera
aaagttgtaagttggtgcacgtttattgtgaatactgattaagtgtgatcattttatacgggatattttcggtgtacaaggggctgtgagtcttaacacaaatctagattaaaacagtaattagtaagtaattgtcatacaaaatgggtgcgaagcagtcaaaaaggtcagtagatattacaaataccccaacaaaaggagaagttgaagctgtaggtgagggagaaggacgagtagttaaaattggtgatgcagatattaaagccacaacgaacggcgcagttccacatacagatttagaaataggggaaaaagatgaaaacgaaaaagacctcacagctgaaaaagagaacaaggaagaaaacgtagtagaagtaaaagaaaacggcgtatcagaatcagaagatgcgaaaacaccagaatccgaatccgaaaatgtaaacgaatcagaaaagtcaatcgagaatacagaaaacaaaacagaagagacggcggaagctaagaaacagaaagaaaagaagaaaaagaaatggtcgtttagaagtatatcattctctaaaaaggataaatctaaaccaagcaaggactctgagaagaacggtgatgttaaggaagtagcggaagagaacgttgatgaatcagccacatctcccacagctgaatctccaaaaactgagaaaccagaatccacagaatccacagaagccgctacagttctcaacggagaggcatcaaaagatgaaatcgccagcgaagcacccaaaacagaagccgctacacccgtagaggaagagcccaaaaaagaggaacctgtggtagatgagcctgcaaaagaggaagcaaaagaggagccgaagatagaggaacccaaggcgaggaacctaaacctgttgaagcagcagaatcacctaaagtccccgaacccgttactgaatccgctccctctcccccggaacaagaggaacccgctaccataaatccaccaactgaggaaaccaaagaggtacctcctgtagctccgagcgaaacgtcaaaagaagaagaggaaaaggctgctcctgcggaggttgtaacggtagaagaataagttcagtccttccaccaaaagtaataagtttttatacatacattttaaacaaaacaaattgatcatatttggcagtgatcaaataaatccgaccaaatcacacatggaagctgcctaaccgactctcatacatttatccattaaaaaaatgtaatcagaagttttaatactcccataataaaatattttatattgtctttagaaatctggacagtttttatatgtcgttcaaacgacttttttaatcgtatacaattttgtaatataaaaaatttagtgtagtcttagtatctatttcctaggtgagcttattttgaaaaaaaaaaatcttgtgttttatcatcacttttatattataaaatagccagtcaatgagcattgttacgaatatattcattatcgtctctgctattatcgctaccatataaatattccaattaacgaatgaatgttagacaaattcgcaatataaaatattccagagatctttgttagacgagcatttattaaatttttgcaataattggtgctgtattcgtttttttaaacaacagttatttaagaaaaacaacaaacttaaaattaatctaaatttaaaataaaatatgccatctaatacttcttgattaattttaaagctctttatttgttgtcaattttttaacaaaatataagctggtattgacacgggtcttgctattcaatcaaaagatgtgtttgacttttccctttgatattgttgtttatgaacttgaaattatgttaccaacctacgcatagacatatataatacttgtatgtttatgcacgtaggtgatcaaactctaaccaactaaataatttcaaatattggatatattatattgggacatgctgtatataaaatggtcaatgactggtctatttgaatgttaattaaaagccaaacaatcaatttattttatttgtaattatattcttatttagcttgtatttagattagatacatatcttatattaaattaaagagagaggaaagtcatgtacttgctccgtgaaatttttgtaaatgtattagctgttaaaaatgttttttgagaaatatcgggccaaattgtcttcattcttcaaaattcagttttaatcacagtgccagatcacaacaaactaaaattgtagttttattttgaggttcactcacacatttcttataacctcttcaattcagttctaaaaacgagttttcgaaaagaagattcgaattttgaatgaatatattttgaatttcatgaatatatcagttaatctacagttagttaataaaaagtttttgtttgttgtgattcttaaggtattttttgtttttaactgtataaaagtgttacgaaattttaaagaaagtataaatgtgtagaatagataaatcggccgtttaagaaatattcacagtgtgcttcttgtattttcttatataggcaactagttcactactgttttttaacctattcaataaagtaagttctttctgtttcgtttgttttatcttagataataatagaagatttttgtcatttcctacactagtagtcacagaattgggaagaagacttattgaaatatttatgctgaattttcgataggtaggattattaagacatgaatttaacttgtagatatttttgacgtttaaacgttggtaaaaacgtcagtcgtctttctttttctcgtctaaaaaataaaaccttatcctgtaaaaggtatatttttacaagatttttacaatataccttttacaagataaggttttattttttgtgatttatggtatacagccagttacaggaatttttccttgtgatatttcttatgtttcacttgctcagaaattttcaataatgagtattttgccaaaatgctgtcacaaagattctaaaaccatgtatccggtttgctcactcattttctttatttagttcctatgaccaagtgtccgtttatgtttgaaccgttaactgtggtaattgaaatatatcgtcaaaggtaaacgttttcctaatattcatcgattttttgtttcaatatttcaacttatttcttattcgcaagtttagaaatattatattatcaatttctatagtttaagataatctataaaatattgttatggaatatccttagctcttttccagttttctttaaatggttctagcatcttagttcccgattataagcagcatattactgcctgtctttttttcgtccacgtttaaatgattcaatattattttcacttcagatgaatcacgaaaaataatgcactttttagaatgactacgtcgttaccaacagttagttgacagatctgttaggattagttatgtctcttttgtctgtagtaaagatctaaatttctctaagcagtcaacagtaaaggatgttactgaatgagttgtttgtatagagtttagttgaattaacatgccttataatttttctgtgatggaaaatgtaatagtaaggtaaatgaaaggaattgtaaaaagtagggaattgatgatttgtatgttgctagtatcagtatgtagagtgtaggacgtggtcaaaataacttctaaatagtaacgtaacgttttgtgtacattttaaagagtttaaatatttacatttacaaatttgtatcgcctaaatgtgattttacgaagtaaaaatggttggttttgcaaaaattataataaaaatttaaaattacacaacgaaatttacgtgtctcgaaatttctacattagcgattaagtttttaattttttatcaactcaaaagtatattctgtctcttgtatcagtgtcccacagctatttgatatttcgctattactgtatctaccgacttatcaaaaaggctgtgtgtaggtaaaaatgattgaaataaaaatcttcatgtatgtgtgaatgtgtttataaacataaatatataatttaggatgttt

SEQ ID NO: 2171 - DNA, 4049 bp, Diabrotica virgifera
cgctagttttattgttaaatgtttattgccttgtgcttgtgatattagtggcttttaacaattattcctttaaaaaattgtgtggtattgttcttccagattgtaaaactttagtaattagtaagtaattgtcatacaaaatgggtgcgaagcagtcaaaaaggtcagtagatattacaaataccccaacaaaaggagaagttgaagctgtaggtgagggagaaggacgagtagttaaaattggtgatgcagatattaaagccacaacgaacggcgcagttccacatacagatttagaaataggggaaaaagatgaaaacgaaaaagacctcacagctgaaaaagagaacaaggaagaaaacgtagtagaagtaaaagaaaacggcgtatcagaatcagaagatgcgaaaacaccagaatccgaatccgaaaatgtaaacgaatcagaaaagtcaatcgagaatacagaaaacaaaacagaagagacggcggaagctaagaaacagaaagaaaagaagaaaaagaaatggtcgtttagaagtatatcattctctaaaaaggataaatctaaaccaagcaaggactctgagaagaacggtgatgttaaggaagtagcggaagagaacgttgatgaatcagccacatctcccacagctgaatctccaaaaactgagaaaccagaatccacagaatccacagaagccgctacagttctcaacggagaggcatcaaaagatgaaatcgccagcgaagcacccaaaacagaagccgctacacccgtagaggaagagcccaaaaaagaggaacctgtggtagatgagcctgcaaaagaggaagcaaaagaggagccgaagatagaggaacccaaggcgaggaacctaaacctgttgaagcagcagaatcacctaaagtccccgaacccgttactgaatccgctccctctcccccggaacaagaggaacccgctaccataaatccaccaactgaggaaaccaaagaggtacctcctgtagctccgagcgaaacgtcaaaagaagaagaggaaaaggctgctcctgcggaggttgtaacggtagaagaataagttcagtccttccaccaaaagtaataagtttttatacatacattttaaacaaaacaaattgatcatatttggcagtgatcaaataaatccgaccaaatcacacatggaagctgcctaaccgactctcatacatttatccattaaaaaaatgtaatcagaagttttaatactcccataataaaatattttatattgtctttagaaatctggacagtttttatatgtcgttcaaacgacttttttaatcgtatacaattttgtaatataaaaaatttagtgtagtcttagtatctatttcctaggtgagcttattttgaaaaaaaaaaatcttgtgttttatcatcacttttatattataaaatagccagtcaatgagcattgttacgaatatattcattatcgtctctgctattatcgctaccatataaatattccaattaacgaatgaatgttagacaaattcgcaatataaaatattccagagatctttgttagacgagcatttattaaatttttgcaataattggtgctgtattcgtttttttaaacaacagttatttaagaaaaacaacaaacttaaaattaatctaaatttaaaataaaatatgccatctaatacttcttgattaattttaaagctctttatttgttgtcaattttttaacaaaatataagctggtattgacacgggtcttgctattcaatcaaaagatgtgtttgacttttccctttgatattgttgtttatgaacttgaaattatgttaccaacctacgcatagacatatataatacttgtatgtttatgcacgtaggtgatcaaactctaaccaactaaataatttcaaatattggatatattatattgggacatgctgtatataaaatggtcaatgactggtctatttgaatgttaattaaaagccaaacaatcaatttattttatttgtaattatattcttatttagcttgtatttagattagatacatatcttatattaaattaaagagagaggaaagtcatgtacttgctccgtgaaatttttgtaaatgtattagctgttaaaaatgttttttgagaaatatcgggccaaattgtcttcattcttcaaaattcagttttaatcacagtgccagatcacaacaaactaaaattgtagttttattttgaggttcactcacacatttcttataacctcttcaattcagttctaaaaacgagttttcgaaaagaagattcgaattttgaatgaatatattttgaatttcatgaatatatcagttaatctacagttagttaataaaaagtttttgtttgttgtgattcttaaggtattttttgtttttaactgtataaaagtgttacgaaattttaaagaaagtataaatgtgtagaatagataaatcggccgtttaagaaatattcacagtgtgcttcttgtattttcttatataggcaactagttcactactgttttttaacctattcaataaagtaagttctttctgtttcgtttgttttatcttagataataatagaagatttttgtcatttcctacactagtagtcacagaattgggaagaagacttattgaaatatttatgctgaattttcgataggtaggattattaagacatgaatttaacttgtagatatttttgacgtttaaacgttggtaaaaacgtcagtcgtctttctttttctcgtctaaaaaataaaaccttatcctgtaaaaggtatatttttacaagatttttacaatataccttttacaagataaggttttattttttgtgatttatggtatacagccagttacaggaatttttccttgtgatatttcttatgtttcacttgctcagaaattttcaataatgagtattttgccaaaatgctgtcacaaagattctaaaaccatgtatccggtttgctcactcattttctttatttagttcctatgaccaagtgtccgtttatgtttgaaccgttaactgtggtaattgaaatatatcgtcaaaggtaaacgttttcctaatattcatcgattttttgtttcaatatttcaacttatttcttattcgcaagtttagaaatattatattatcaatttctatagtttaagataatctataaaatattgttatggaatatccttagctcttttccagttttctttaaatggttctagcatcttagttcccgattataagcagcatattactgcctgtctttttttcgtccacgtttaaatgattcaatattattttcacttcagatgaatcacgaaaaataatgcactttttagaatgactacgtcgttaccaacagttagttgacagatctgttaggattagttatgtctcttttgtctgtagtaaagatctaaatttctctaagcagtcaacagtaaaggatgttactgaatgagttgtttgtatagagtttagttgaattaacatgccttataatttttctgtgatggaaaatgtaatagtaaggtaaatgaaaggaattgtaaaaagtagggaattgatgatttgtatgttgctagtatcagtatgtagagtgtaggacgtggtcaaaataacttctaaatagtaacgtaacgttttgtgtacattttaaagagtttaaatatttacatttacaaatttgtatcgcctaaatgtgattttacgaagtaaaaatggttggttttgcaaaaattataataaaaatttaaaattacacaacgaaatttacgtgtctcgaaatttctacattagcgattaagtttttaattttttatcaactcaaaagtatattctgtctcttgtatcagtgtcccacagctatttgatatttcgctattactgtatctaccgacttatcaaaaaggctgtgtgtaggtaaaaatgattgaaataaaaatcttcatgtatgtgtgaatgtgtttataaacataaatatataatttaggatgttt

SEQ ID NO: 2172 - DNA, 3658 bp, Diabrotica virgifera
ggggtaaattgctaattttgaaatagtaaagagttaaagagagttggggcaagaggcaagacaagccagaaccacaggcacagttcgaagaaactagttgccgcagtgaaccacacagaaccacacatacacacacagtgcttagttaacttttttctgtaaaatcgaccggagtttttgtattagttaataacgaacatggatacccagaacgttgatgaatcagccacatctcccacagctgaatctccaaaaactgagaaaccagaatccacagaatccacagaagccgctacagttctcaacggagaggcatcaaaagatgaaatcgccagcgaagcacccaaaacagaagccgctacacccgtagaggaagagcccaaaaaagaggaacctgtggtagatgagcctgcaaaagaggaagcaaaagaggagccgaagatagaggaacccaaggcgaggaacctaaacctgttgaagcagcagaatcacctaaagtccccgaacccgttactgaatccgctccctctcccccggaacaagaggaacccgctaccataaatccaccaactgaggaaaccaaagaggtacctcctgtagctccgagcgaaacgtcaaaagaagaagaggaaaaggctgctcctgcggaggttgtaacggtagaagaataagttcagtccttccaccaaaagtaataagtttttatacatacattttaaacaaaacaaattgatcatatttggcagtgatcaaataaatccgaccaaatcacacatggaagctgcctaaccgactctcatacatttatccattaaaaaaatgtaatcagaagttttaatactcccataataaaatattttatattgtctttagaaatctggacagtttttatatgtcgttcaaacgacttttttaatcgtatacaattttgtaatataaaaaatttagtgtagtcttagtatctatttcctaggtgagcttattttgaaaaaaaaaaatcttgtgttttatcatcacttttatattataaaatagccagtcaatgagcattgttacgaatatattcattatcgtctctgctattatcgctaccatataaatattccaattaacgaatgaatgttagacaaattcgcaatataaaatattccagagatctttgttagacgagcatttattaaatttttgcaataattggtgctgtattcgtttttttaaacaacagttatttaagaaaaacaacaaacttaaaattaatctaaatttaaaataaaatatgccatctaatacttcttgattaattttaaagctctttatttgttgtcaattttttaacaaaatataagctggtattgacacgggtcttgctattcaatcaaaagatgtgtttgacttttccctttgatattgttgtttatgaacttgaaattatgttaccaacctacgcatagacatatataatacttgtatgtttatgcacgtaggtgatcaaactctaaccaactaaataatttcaaatattggatatattatattgggacatgctgtatataaaatggtcaatgactggtctatttgaatgttaattaaaagccaaacaatcaatttattttatttgtaattatattcttatttagcttgtatttagattagatacatatcttatattaaattaaagagagaggaaagtcatgtacttgctccgtgaaatttttgtaaatgtattagctgttaaaaatgttttttgagaaatatcgggccaaattgtcttcattcttcaaaattcagttttaatcacagtgccagatcacaacaaactaaaattgtagttttattttgaggttcactcacacatttcttataacctcttcaattcagttctaaaaacgagttttcgaaaagaagattcgaattttgaatgaatatattttgaatttcatgaatatatcagttaatctacagttagttaataaaaagtttttgtttgttgtgattcttaaggtattttttgtttttaactgtataaaagtgttacgaaattttaaagaaagtataaatgtgtagaatagataaatcggccgtttaagaaatattcacagtgtgcttcttgtattttcttatataggcaactagttcactactgttttttaacctattcaataaagtaagttctttctgtttcgtttgttttatcttagataataatagaagatttttgtcatttcctacactagtagtcacagaattgggaagaagacttattgaaatatttatgctgaattttcgataggtaggattattaagacatgaatttaacttgtagatatttttgacgtttaaacgttggtaaaaacgtcagtcgtctttcttttttgatttttacgtttcacttcttatgtttcaaaaataaaaaccttatcctgtaaaaggtatatttttacaagatttttacaatataccttttacaagataaggttttattttttgtgatttatggtatacagccagttacaggaatttttccttgtgatatttcttatgtttcacttgctcagaaattttcaataatgagtattttgccaaaatgctgtcacaaagattctaaaaccatgtatccggtttgctcactcattttctttatttagttcctatgaccaagtgtccgtttatgtttgaaccgttaactgtggtaattgaaatatatcgtcaaaggtaaacgttttcctaatattcatcgattttttgtttcaatatttcaacttatttcttattcgcaagtttagaaatattatattatcaatttctatagtttaagataatctataaaatattgttatggaatatccttagctcttttccagttttctttaaatggttctagcatcttagttcccgattataagcagcatattactgcctgtctttttttcgtccacgtttaaatgattcaatattattttcacttcagatgaatcacgaaaaataatgcactttttagaatgactacgtcgttaccaacagttagttgacagatctgttaggattagttatgtctcttttgtctgtagtaaagatctaaatttctctaagcagtcaacagtaaaggatgttactgaatgagttgtttgtatagagtttagttgaattaacatgccttataatttttctgtgatggaaaatgtaatagtaaggtaaatgaaaggaattgtaaaaagtagggaattgatgatttgtatgttgctagtatcagtatgtagagtgtaggacgtggtcaaaataacttctaaatagtaacgtaacgttttgtgtacattttaaagagtttaaatatttacatttacaaatttgtatcgcctaaatgtgattttacgaagtaaaaatggttggttttgcaaaaattataataaaaatttaaaattacacaacgaaatttacgtgtctcgaaatttctacattagcgattaagtttttaattttttatcaactcaaaagtatattctgtctcttgtatcagtgtcccacagctatttgatatttcgctattactgtatctaccgacttatcaaaaaggctgtgtgtaggtaaaaatgattgaaataaaaatcttcatgtatgtgtgaatgtgtttataaacataaatatataatttaggatgttt

SEQ ID NO: 2173 - DNA, 3636 bp, Diabrotica virgifera
ggggtaaattgctaattttgaaatagtaaagagttaaagagagttggggcaagaggcaagacaagccagaaccacaggcacagttcgaagaaactagttgccgcagtgaaccacacagaaccacacatacacacacagtgcttagttaacttttttctgtaaaatcgaccggagtttttgtattagttaataacgaacatggatacccagaacgttgatgaatcagccacatctcccacagctgaatctccaaaaactgagaaaccagaatccacagaatccacagaagccgctacagttctcaacggagaggcatcaaaagatgaaatcgccagcgaagcacccaaaacagaagccgctacacccgtagaggaagagcccaaaaaagaggaacctgtggtagatgagcctgcaaaagaggaagcaaaagaggagccgaagatagaggaacccaaggcgaggaacctaaacctgttgaagcagcagaatcacctaaagtccccgaacccgttactgaatccgctccctctcccccggaacaagaggaacccgctaccataaatccaccaactgaggaaaccaaagaggtacctcctgtagctccgagcgaaacgtcaaaagaagaagaggaaaaggctgctcctgcggaggttgtaacggtagaagaataagttcagtccttccaccaaaagtaataagtttttatacatacattttaaacaaaacaaattgatcatatttggcagtgatcaaataaatccgaccaaatcacacatggaagctgcctaaccgactctcatacatttatccattaaaaaaatgtaatcagaagttttaatactcccataataaaatattttatattgtctttagaaatctggacagtttttatatgtcgttcaaacgacttttttaatcgtatacaattttgtaatataaaaaatttagtgtagtcttagtatctatttcctaggtgagcttattttgaaaaaaaaaaatcttgtgttttatcatcacttttatattataaaatagccagtcaatgagcattgttacgaatatattcattatcgtctctgctattatcgctaccatataaatattccaattaacgaatgaatgttagacaaattcgcaatataaaatattccagagatctttgttagacgagcatttattaaatttttgcaataattggtgctgtattcgtttttttaaacaacagttatttaagaaaaacaacaaacttaaaattaatctaaatttaaaataaaatatgccatctaatacttcttgattaattttaaagctctttatttgttgtcaattttttaacaaaatataagctggtattgacacgggtcttgctattcaatcaaaagatgtgtttgacttttccctttgatattgttgtttatgaacttgaaattatgttaccaacctacgcatagacatatataatacttgtatgtttatgcacgtaggtgatcaaactctaaccaactaaataatttcaaatattggatatattatattgggacatgctgtatataaaatggtcaatgactggtctatttgaatgttaattaaaagccaaacaatcaatttattttatttgtaattatattcttatttagcttgtatttagattagatacatatcttatattaaattaaagagagaggaaagtcatgtacttgctccgtgaaatttttgtaaatgtattagctgttaaaaatgttttttgagaaatatcgggccaaattgtcttcattcttcaaaattcagttttaatcacagtgccagatcacaacaaactaaaattgtagttttattttgaggttcactcacacatttcttataacctcttcaattcagttctaaaaacgagttttcgaaaagaagattcgaattttgaatgaatatattttgaatttcatgaatatatcagttaatctacagttagttaataaaaagtttttgtttgttgtgattcttaaggtattttttgtttttaactgtataaaagtgttacgaaattttaaagaaagtataaatgtgtagaatagataaatcggccgtttaagaaatattcacagtgtgcttcttgtattttcttatataggcaactagttcactactgttttttaacctattcaataaagtaagttctttctgtttcgtttgttttatcttagataataatagaagatttttgtcatttcctacactagtagtcacagaattgggaagaagacttattgaaatatttatgctgaattttcgataggtaggattattaagacatgaatttaacttgtagatatttttgacgtttaaacgttggtaaaaacgtcagtcgtctttctttttctcgtctaaaaaataaaaccttatcctgtaaaaggtatatttttacaagatttttacaatataccttttacaagataaggttttattttttgtgatttatggtatacagccagttacaggaatttttccttgtgatatttcttatgtttcacttgctcagaaattttcaataatgagtattttgccaaaatgctgtcacaaagattctaaaaccatgtatccggtttgctcactcattttctttatttagttcctatgaccaagtgtccgtttatgtttgaaccgttaactgtggtaattgaaatatatcgtcaaaggtaaacgttttcctaatattcatcgattttttgtttcaatatttcaacttatttcttattcgcaagtttagaaatattatattatcaatttctatagtttaagataatctataaaatattgttatggaatatccttagctcttttccagttttctttaaatggttctagcatcttagttcccgattataagcagcatattactgcctgtctttttttcgtccacgtttaaatgattcaatattattttcacttcagatgaatcacgaaaaataatgcactttttagaatgactacgtcgttaccaacagttagttgacagatctgttaggattagttatgtctcttttgtctgtagtaaagatctaaatttctctaagcagtcaacagtaaaggatgttactgaatgagttgtttgtatagagtttagttgaattaacatgccttataatttttctgtgatggaaaatgtaatagtaaggtaaatgaaaggaattgtaaaaagtagggaattgatgatttgtatgttgctagtatcagtatgtagagtgtaggacgtggtcaaaataacttctaaatagtaacgtaacgttttgtgtacattttaaagagtttaaatatttacatttacaaatttgtatcgcctaaatgtgattttacgaagtaaaaatggttggttttgcaaaaattataataaaaatttaaaattacacaacgaaatttacgtgtctcgaaatttctacattagcgattaagtttttaattttttatcaactcaaaagtatattctgtctcttgtatcagtgtcccacagctatttgatatttcgctattactgtatctaccgacttatcaaaaaggctgtgtgtaggtaaaaatgattgaaataaaaatcttcatgtatgtgtgaatgtgtttataaacataaatatataatttaggatgttt

SEQ ID NO: 2174 - DNA, 6946 bp, Diabrotica virgifera
  SmartBlast Evalue=0; Info="Myosin IA, putative n=1 Tax= Pediculus humanus corporis RepID=E0VG03_PEDHC"
ggtgatttctgagatagtagagcgttcagcgattacgaaaagcttataaataaatcgcgttgactcaccaaatcaaatcgaattaaatgaagtgcagtgttggtgattaaaaacaatctacagcagaaaaaatcaactttataccatggctatgcaacgagaagttggcgtaggcgattttgtcctcatggacaaaattgacctggacaattttatgaagaatattgaactcagattcaaaaatggattcatttacacatacatcggagaagtatgtgtttctgtcaatccctacagaacaaaaaacatttatggaatggaacaagtcaatcagtataaagatcgagaactattcgaaaaccccccacacatattcgccattgccgatgcttcacataaagtgatgaaacagcaaggaaaagatacttgtattgtcatcagcggagaatccggatctggaaagacagaagcttctaaaatcataatgaagtacattgctgcagtgacaaatcaaggaggacaaaaagaaatcgaaagagtcaaagatgttctcatccagtctaactccatcctagaagctttcgggaacgccaaaacgaacaggaacgacaactcatccagatttggcaaatatatggatatccatttcgacttcaaaggcgacccgattggtggccatattaataaatatctgctagaaaaatctcgtgtcattgctcagcagcagggtgagagaaatttccattgtttttatcagcttctatctggagcaaatgatgatttgttaaaaagactgaacatatcccgtgatacccaccagtattattacatcaagcaaggaaatgctgccgtagttaacaccatcaacgacaaaagtgactaccgtgaagtcatgtcatcattgaacacacttcaattcagccaacaagaccaagataccctctggagggtagtggcggccatactacatttaggtaacgtcgatttcgagaatgacgatgatgaaaagttgagactgaaaaaatccaaaggagtggattatgctgcagacttacttcagataaaaaagagtgacttagaaaccgccctttgtgaaagagtgatagcagcacgaggtgacataatgagaaaagagcacaccgaaacagaagcttcctttggcaaagacgcttttgccaaggctgtatacgataggctattcacttggatagtcgataaaatcaatgccgccatagctgtagacaaaaccaacttaactaagacgtacaaaagttctttgatcggcgtactcgatatctacggtttcgagatcttcgacaacaatagttttgaacaattttgtatcaattattgtaacgaaaagttgcaacagctgtttattgaattggtgctgaaacaggagcaagaagaatacaatcgggaaggtatcgcgtggaccaatatagaatacttcaacaatcagatcatttgtgatttggtagaagcaccacacaaggggatcatttcaattttggatgatgcttgcaagatgactgccgaaaaagtaaccgatgagatgctgctggaagctatggacaagaatcttaaaggccacaaacattatgtctcaagacaaacaaaaacaaccgagaaaaaccttaaacataaggtagatttccgtattactcactacgctggcgatgtgacgtactgcatcatcggttttctggacaaaaacaaagatacgctcttccaagacttcaaacgtttgttatacaattccaaggatccaaatataaaggaaatgtggcccgaaggggcacagcatatcacacaaataaccaagagacctcccacagctggatcccttttcaaagcctccatgcaagctttagtccaaaacctccaaagcaaagaaccacactatgtcagatgcattaaaccgaacgaaatcaaatcgtcttcagccttcgatgaagaaagagtaagacatcaagttagttacttaggtctcgtggaaaacgttcgggtgagaagagccggtttcgcatacagacaacgatatgacagattccttaagagatacaaaatgatctcgcagttcacctggcccaatttcagatccggttccgataaagaagcctgtaaagtcatcatggacgagaacaagtacactgacgatgtcaaatacggtaaaacgaaaatcttcatccgcacaccacaaacgttgtttgctttggagatgtccaggaacaacctcatccccggcatcgttactcttatccagaaaacttggagaggttggatggcacggcagcagtacaagagattgaaggctgcgatgacgatattgaaggcatatcgcaagatgaagttgagggattacatatgtactttgcagagtaaatttaagaacgccaaaaagatgaaagattatggtaaaagcatcatgtggcctgctccgccgctgtctttgagagacactacgaaaattttaagaggtatttacaataaatggaggtgccgcatgattttgaaccgtatccccaaaaacgaatggccgcagatgaggctgaaagtaatcgccgccagtaatctgatcaacaaacgaccccactacggtgtaaatcgcaaatgggaaggcaactacctcacatctcatttggaaaacaaccaatacacagtatacaatgaagcagtgaacaacctaaggaacactaaacacttcaataacgttctcttctcctctttcgttaccaaattcaacaaatttaacaaagttgccgagagagtcatgctagttaccgatcaatatgttttcaagttagatacccaaaagtttagaaacatgaaagagggcgtggcgatcggtgaattgaccggtatcagtgtcagtccaggacaggaccaattgatagttcttcactgcccagggggtaacgatttggtggtgtcgttgcactgtgatagacaagaggacagaataggtgaatgtatcggtgtgatatgtaacagatattaccagattaaacaggctgacctgcctgtgaaagtatcaaagactatatcctgcagcttgggcaacaaacaacgactaatcaacattcaagtatcagcagctgagcagcaggcgacatttaaaaaggatggtcacaacatcttataccttctgccttccacgttttcaattcttgaaaacggcaataaccatattaagcaatagactgaggtcttacgccgaagagtgatatcaattttttagatttaggtttattctacttaatattttttagtagagttgagtttctaccgatttggggctaatggggcagaaataagtttcaaaccgaaaaggggtgcaattggtatgaccagtgaatttatttagcatgccagaaacattgaaagttagtccattaaagttaacaggaaagaaaatgagtgaaatgaaaaataagtcaatgaaggaaagtaaggcttaaaggaaaaacgtagtacatcagaattgatgcaaatctaatattttttacttgaaaattgttttgcactccttgttcagtacgtttggggattacttattaacgcattggctgccactgccgccaataggcatgttaggctacttgagtcaggtgccagtgaatgccttttggcgttcataacctgtgaaattaaataggttcttatcgtattggctccatacgaaagtgactgaatataagtggcagctaacgtgttaagaatgttgttacaggtcggtagaaacttttgtaaaaactgtgtcatagtaagtttttcgtttttaacacttttattattgattgttgcttttctgttatgtctctatgttgggattagggacaaaaaatttattttattttctttcaagtattaaaatcagtatctggaaagctcacgcatgtaaaatataaatcaacgaatacaagaaacgcaatttaacacgttggctgccataatgttaaaaaaaacaaaatggatcccaagaccacgaggctcacgtttctatgctattgagacaactacggtgtgtcacgcggctgttctcgaaaacaacatgaaacacatttgtttctcacggcagccaccgcgttaaacatctaaaattcaaacacactaatagtttcagctggcagattctgaactgcagatggtgttgaccggacaataagaatgtttataggaatgtaaattgtaagtttagcgattgagaatgtttttttgtcacatattctaaaattacttattcaatttttttgcttacgtgatctttccacacactgacctaagtaagtctattaatttattatctatagcaatagatatccttaaaaaataatgctttgcaatattttaaaaaacgcctctttttgttactgttgtatctcttatgtacttatacatacataaaaaatcaataagtgcctttttaatgttgagaaagtggttataaagtttcctataaatgcactttttagaattgaaatcttctgtgggcattttgagtttacaatcgtgaaatttgaaacagtttcattatttattggaacacgagaacagtttatcaatgaaaacatataataatattgcaaaaatattggtggtaggaccaaatgtggaattgatcaaggacaccatttaaatgagttgaaaaagagactataaaactatttttgtaaagggaatttttgaaatcaagtgtctcttttactttacctgttttaggtatgagatagtgcctaagatgctgaaattaatgctgggaaatcctgttttagttgtaatgttctttaacatatgcctctcatctttctgtagaaccttccatacaaagtcttctggaaagtgcggattttttgttttcggaaacaattgaaaaccttgggaccagaaggggacatgccaccaaacaatattttggagaaaacatcattttaaacttattttcaaatcctgaaatccaatttttacagttttctcagcagtaaggcccctaatcgtttggaaatatgttattaaatacacaagaaaagcaacacaaatgtttgtttaattgttttgagtttttgaacattttttgaaaaatatgaggcttatcccattttgtataaaaaattatattctaaaaaatgaacataaaatgcaacaataaaataattcagttgtcaatattttcaatatctgaaaagtcgtccaaatgttcaatgtcttccagtggttcagtattctcagtatctggtagaatctattgacaagcaccattttctgcgtacactgttttgtgcaaccgcaaggtgcatataattattgtggttctattttcttccctttcgtatttatatattcgtaacttagatttcttttagtcttacgcttaatttttttatgtcgttgggtatccttgtgtctccatctaggaggcgcattcttttctggagttggcaaaagacctccagaagtctgtgcggtataaacccattcattttcttacaataaagtaggtattttactaaaaaggggtaagccacaaaaaacatttacaacacctaatatttttaggtccgaaaaaaatataacataaggggacaagccacacatttaataaaattactcttcctgagtttatattttccgaatcgctactacttccggatactgtatagtctttgtcatttaaaaatggatcttggtcactgtgttcagaatcaaactcagaaaagtctattttccgtttacatacacgggaatgtttcgccgccatgttgattactactgtggcttgtctccttctgttgcaatataaagtaatggtgacacagcaggacttactacagcggcgccatctatgagaaaactgctgaaattttctgtttgggacattaatatgatcttaaagtgtgcgatttctactttaactcatttttgacggaattgtggcttgtccccttctggtcccaaggtcctcaattgataatctcactgcgctaggttagattaatatagtggatggagtaatacctggatttagtacttcgctaaaagacatttttgggtttcaggaattaggtgaaacattgtatggagatttgaaaattctatgaaatatgtgatatttcctcttaaccattttttattgtcccttgctatttcctgttgtcttgctttttgctacgttttcatatcttttctcccttctgtttttatttctttttagtccttatcttatgttctattaccgactcttactgttatgctacatcttcgtactgtttcttgtacattttacttatcaactcgttcagtgcccatgacgacagtgtgtcgtcacgatagtttcatcaagggtgcctacaactcacgagtgtcggcgttagtactgccaccgtactgcgttactaaatgaaccatttaagtacgtggtaccagctatatggcgtttgttcaagatgggcaccaaacgtctaattacaagttttacaactgctaatgttaataattttaaactgcaattttttttctctgattctggccttggtttagaactagaacctttagccacgtaattgtataacttatcactaactcaggtgtaatgtgtagtgtgtgtgttgagtaagtgtcttgttactttgcaaagtcgacgtcattgtctttgcaaagagacgctaattgtatccgaacgtctgcggttcctccggtgagtaccgatcccacaaggagataaactattttcatttattaatttataataaatgaaaaaatttctgaccctggtgagattcgaactcactaccattcggaactttcgatccaaaggttaggcgctcttaccactgagccacagaggtggttaatcgtcatttgaaaagtattgttatgaatcaccttagcatatgtgtaagttagtaagtcagactagtaatggatctgacagttaagtatatttgtc

SEQ ID NO: 2175 - DNA, 6582 bp, Diabrotica virgifera
  SmartBlast Evalue=0; Info="Myosin IA, putative n=1 Tax= Pediculus humanus corporis RepID=E0VG03_PEDHC"
ggtgatttctgagatagtagagcgttcagcgattacgaaaagcttataaataaatcgcgttgactcaccaaatcaaatcgaattaaatgaagtgcagtgttggtgattaaaaacaatctacagcagaaaaaatcaactttataccatggctatgcaacgagaagttggcgtaggcgattttgtcctcatggacaaaattgacctggacaattttatgaagaatattgaactcagattcaaaaatggattcatttacacatacatcggagaagtatgtgtttctgtcaatccctacagaacaaaaaacatttatggaatggaacaagtcaatcagtataaagatcgagaactattcgaaaaccccccacacatattcgccattgccgatgcttcacataaagtgatgaaacagcaaggaaaagatacttgtattgtcatcagcggagaatccggatctggaaagacagaagcttctaaaatcataatgaagtacattgctgcagtgacaaatcaaggaggacaaaaagaaatcgaaagagtcaaagatgttctcatccagtctaactccatcctagaagctttcgggaacgccaaaacgaacaggaacgacaactcatccagatttggcaaatatatggatatccatttcgacttcaaaggcgacccgattggtggccatattaataaatatctgctagaaaaatctcgtgtcattgctcagcagcagggtgagagaaatttccattgtttttatcagcttctatctggagcaaatgatgatttgttaaaaagactgaacatatcccgtgatacccaccagtattattacatcaagcaaggaaatgctgccgtagttaacaccatcaacgacaaaagtgactaccgtgaagtcatgtcatcattgaacacacttcaattcagccaacaagaccaagataccctctggagggtagtggcggccatactacatttaggtaacgtcgatttcgagaatgacgatgatgaaaagttgagactgaaaaaatccaaaggagtggattatgctgcagacttacttcagataaaaaagagtgacttagaaaccgccctttgtgaaagagtgatagcagcacgaggtgacataatgagaaaagagcacaccgaaacagaagcttcctttggcaaagacgcttttgccaaggctgtatacgataggctattcacttggatagtcgataaaatcaatgccgccatagctgtagacaaaaccaacttaactaagacgtacaaaagttctttgatcggcgtactcgatatctacggtttcgagatcttcgacaacaatagttttgaacaattttgtatcaattattgtaacgaaaagttgcaacagctgtttattgaattggtgctgaaacaggagcaagaagaatacaatcgggaaggtatcgcgtggaccaatatagaatacttcaacaatcagatcatttgtgatttggtagaagcaccacacaaggggatcatttcaattttggatgatgcttgcaagatgactgccgaaaaagtaaccgatgagatgctgctggaagctatggacaagaatcttaaaggccacaaacattatgtctcaagacaaacaaaaacaaccgagaaaaaccttaaacataaggtagatttccgtattactcactacgctggcgatgtgacgtactgcatcatcggttttctggacaaaaacaaagatacgctcttccaagacttcaaacgtttgttatacaattccaaggatccaaatataaaggaaatgtggcccgaaggggcacagcatatcacacaaataaccaagagacctcccacagctggatcccttttcaaagcctccatgcaagctttagtccaaaacctccaaagcaaagaaccacactatgtcagatgcattaaaccgaacgaaatcaaatcgtcttcagccttcgatgaagaaagagtaagacatcaagttagttacttaggtctcgtggaaaacgttcgggtgagaagagccggtttcgcatacagacaacgatatgacagattccttaagagatacaaaatgatctcgcagttcacctggcccaatttcagatccggttccgataaagaagcctgtaaagtcatcatggacgagaacaagtacactgacgatgtcaaatacggtaaaacgaaaatcttcatccgcacaccacaaacgttgtttgctttggagatgtccaggaacaacctcatccccggcatcgttactcttatccagaaaacttggagaggttggatggcacggcagcagtacaagagattgaaggctgcgatgacgatattgaaggcatatcgcaagatgaagttgagggattacatatgtactttgcagagtaaatttaagaacgccaaaaagatgaaagattatggtaaaagcatcatgtggcctgctccgccgctgtctttgagagacactacgaaaattttaagaggtatttacaataaatggaggtgccgcatgattttgaaccgtatccccaaaaacgaatggccgcagatgaggctgaaagtaatcgccgccagtaatctgatcaacaaacgaccccactacggtgtaaatcgcaaatgggaaggcaactacctcacatctcatttggaaaacaaccaatacacagtatacaatgaagcagtgaacaacctaaggaacactaaacacttcaataacgttctcttctcctctttcgttaccaaattcaacaaatttaacaaagttgccgagagagtcatgctagttaccgatcaatatgttttcaagttagatacccaaaagtttagaaacatgaaagagggcgtggcgatcggtgaattgaccggtatcagtgtcagtccaggacaggaccaattgatagttcttcactgcccagggggtaacgatttggtggtgtcgttgcactgtgatagacaagaggacagaataggtgaatgtatcggtgtgatatgtaacagatattaccagattaaacaggctgacctgcctgtgaaagtatcaaagactatatcctgcagcttgggcaacaaacaacgactaatcaacattcaagtatcagcagctgagcagcaggcgacatttaaaaaggatggtcacaacatcttataccttctgccttccacgttttcaattcttgaaaacggcaataaccatattaagcaatagactgaggtcttacgccgaagagtgatatcaattttttagatttaggtttattctacttaatattttttagtagagttgagtttctaccgatttggggctaatggggcagaaataagtttcaaaccgaaaaggggtgcaattggtatgaccagtgaatttatttagcatgccagaaacattgaaagttagtccattaaagttaacaggaaagaaaatgagtgaaatgaaaaataagtcaatgaaggaaagtaaggcttaaaggaaaaacgtagtacatcagaattgatgcaaatctaatattttttacttgaaaattgttttgcactccttgttcagtacgtttggggattacttattaacgcattggctgccactgccgccaataggcatgttaggctacttgagtcaggtgccagtgaatgccttttggcgttcataacctgtgaaattaaataggttcttatcgtattggctccatacgaaagtgactgaatataagtggcagctaacgtgttaagaatgttgttacaggtcggtagaaacttttgtaaaaactgtgtcatagtaagtttttcgtttttaacacttttattattgattgttgcttttctgttatgtctctatgttgggattagggacaaaaaatttattttattttctttcaagtattaaaatcagtatctggaaagctcacgcatgtaaaatataaatcaacgaatacaagaaacgcaatttaacacgttggctgccataatgttaaaaaaaacaaaatggatcccaagaccacgaggctcacgtttctatgctattgagacaactacggtgtgtcacgcggctgttctcgaaaacaacatgaaacacatttgtttctcacggcagccaccgcgttaaacatctaaaattcaaacacactaatagtttcagctggcagattctgaactgcagatggtgttgaccggacaataagaatgtttataggaatgtaaattgtaagtttagcgattgagaatgtttttttgtcacatattctaaaattacttattcaatttttttgcttacgtgatctttccacacactgacctaagtaagtctattaatttattatctatagcaatagatatccttaaaaaataatgctttgcaatattttaaaaaacgcctctttttgttactgttgtatctcttatgtacttatacatacataaaaaatcaataagtgcctttttaatgttgagaaagtggttataaagtttcctataaatgcactttttagaattgaaatcttctgtgggcattttgagtttacaatcgtgaaatttgaaacagtttcattatttattggaacacgagaacagtttatcaatgaaaacatataataatattgcaaaaatattggtggtaggaccaaatgtggaattgatcaaggacaccatttaaatgagttgaaaaagagactataaaactatttttgtaaagggaatttttgaaatcaagtgtctcttttactttacctgttttaggtatgagatagtgcctaagatgctgaaattaatgctgggaaatcctgttttagttgtaatgttctttaacatatgcctctcatctttctgtagaaccttccatacaaagtcttctggaaagtgcggattttttgttttcggaaacaattgaaaaccttgggaccagaaggggacatgccaccaaacaatattttggagaaaacatcattttaaacttattttcaaatcctgaaatccaatttttacagttttctcagcagtaaggcccctaatcgtttggaaatatgttattaaatacacaagaaaagcaacacaaatgtttgtttaattgttttgagtttttgaacattttttgaaaaatatgaggcttatcccattttgtataaaaaattatattctaaaaaatgaacataaaatgcaacaataaaataattcagttgtcaatattttcaatatctgaaaagtcgtccaaatgttcaatgtcttccagtggttcagtattctcagtatctggtagaatctattgacaagcaccattttctgcgtacactgttttgtgcaaccgcaaggtgcatataattattgtggttctattttcttccctttcgtatttatatattcgtaacttagatttcttttagtcttacgcttaatttttttatgtcgttgggtatccttgtgtctccatctaggaggcgcattcttttctggagttggcaaaagacctccagaagtctgtgcggtataaacccattcattttcttacaataaagtaggtattttactaaaaaggggtaagccacaaaaaacatttacaacacctaatatttttaggtccgaaaaaaatataacataaggggacaagccacacatttaataaaattactcttcctgagtttatattttccgaatcgctactacttccggatactgtatagtctttgtcatttaaaaatggatcttggtcactgtgttcagaatcaaactcagaaaagtctattttccgtttacatacacgggaatgtttcgccgccatgttgattactactgtggcttgtctccttctgttgcaatataaagtaatggtgacacagcaggacttactacagcggcgccatctatgagaaaactgctgaaattttctgtttgggacattaatatgatcttaaagtgtgcgatttctactttaactcatttttgacggaattgtggcttgtccccttctggtcccaaggtcctcaattgataatctcactgcgctaggttagattaatatagtggatggagtaatacctggatttagtacttcgctaaaagacatttttgggtttcaggaattaggtgaaacattgtatggagatttgaaaattctatgaaatatgtgatatttcctcttaaccattttttattgtcccttgctatttcctgttgtcttgctttttgctacgttttcatatcttttctcccttctgtttttatttctttttagtccttatcttatgttctattaccgactcttactgttatgctacatcttcgtactgtttcttgtacattttacttatcaactcgttcagtgcccatgacgacagtgtgtcgtcacgatagtttcatcaagggtgcctacaactcacgagtgtcggcgttagtactgccaccgtactgcgttactaaatgaaccatttaagtacgtggtacacttcgcgtcaaaaaaaactggtacacttttttttcccaatgtaaacctgtgttcagactggacacaatggctcgtgaatcacggcgttgttgccagcacagataatggaattgcactaaatctaaatacaaaaaataatgttcaaaaatcatggtggtgaa

SEQ ID NO: 2176 - DNA, 6244 bp, Diabrotica virgifera
  SmartBlast Evalue=0; Info="Myosin IA, putative n=1 Tax= Pediculus humanus corporis RepID=E0VG03_PEDHC"
ggtgatttctgagatagtagagcgttcagcgattacgaaaagcttataaataaatcgcgttgactcaccaaatcaaatcgaattaaatgaagtgcagtgttggtgattaaaaacaatctacagcagaaaaaatcaactttataccatggctatgcaacgagaagttggcgtaggcgattttgtcctcatggacaaaattgacctggacaattttatgaagaatattgaactcagattcaaaaatggattcatttacacatacatcggagaagtatgtgtttctgtcaatccctacagaacaaaaaacatttatggaatggaacaagtcaatcagtataaagatcgagaactattcgaaaaccccccacacatattcgccattgccgatgcttcacataaagtgatgaaacagcaaggaaaagatacttgtattgtcatcagcggagaatccggatctggaaagacagaagcttctaaaatcataatgaagtacattgctgcagtgacaaatcaaggaggacaaaaagaaatcgaaagagtcaaagatgttctcatccagtctaactccatcctagaagctttcgggaacgccaaaacgaacaggaacgacaactcatccagatttggcaaatatatggatatccatttcgacttcaaaggcgacccgattggtggccatattaataaatatctgctagaaaaatctcgtgtcattgctcagcagcagggtgagagaaatttccattgtttttatcagcttctatctggagcaaatgatgatttgttaaaaagactgaacatatcccgtgatacccaccagtattattacatcaagcaaggaaatgctgccgtagttaacaccatcaacgacaaaagtgactaccgtgaagtcatgtcatcattgaacacacttcaattcagccaacaagaccaagataccctctggagggtagtggcggccatactacatttaggtaacgtcgatttcgagaatgacgatgatgaaaagttgagactgaaaaaatccaaaggagtggattatgctgcagacttacttcagataaaaaagagtgacttagaaaccgccctttgtgaaagagtgatagcagcacgaggtgacataatgagaaaagagcacaccgaaacagaagcttcctttggcaaagacgcttttgccaaggctgtatacgataggctattcacttggatagtcgataaaatcaatgccgccatagctgtagacaaaaccaacttaactaagacgtacaaaagttctttgatcggcgtactcgatatctacggtttcgagatcttcgacaacaatagttttgaacaattttgtatcaattattgtaacgaaaagttgcaacagctgtttattgaattggtgctgaaacaggagcaagaagaatacaatcgggaaggtatcgcgtggaccaatatagaatacttcaacaatcagatcatttgtgatttggtagaagcaccacacaaggggatcatttcaattttggatgatgcttgcaagatgactgccgaaaaagtaaccgatgagatgctgctggaagctatggacaagaatcttaaaggccacaaacattatgtctcaagacaaacaaaaacaaccgagaaaaaccttaaacataaggtagatttccgtattactcactacgctggcgatgtgacgtactgcatcatcggttttctggacaaaaacaaagatacgctcttccaagacttcaaacgtttgttatacaattccaaggatccaaatataaaggaaatgtggcccgaaggggcacagcatatcacacaaataaccaagagacctcccacagctggatcccttttcaaagcctccatgcaagctttagtccaaaacctccaaagcaaagaaccacactatgtcagatgcattaaaccgaacgaaatcaaatcgtcttcagccttcgatgaagaaagagtaagacatcaagttagttacttaggtctcgtggaaaacgttcgggtgagaagagccggtttcgcatacagacaacgatatgacagattccttaagagatacaaaatgatctcgcagttcacctggcccaatttcagatccggttccgataaagaagcctgtaaagtcatcatggacgagaacaagtacactgacgatgtcaaatacggtaaaacgaaaatcttcatccgcacaccacaaacgttgtttgctttggagatgtccaggaacaacctcatccccggcatcgttactcttatccagaaaacttggagaggttggatggcacggcagcagtacaagagattgaaggctgcgatgacgatattgaaggcatatcgcaagatgaagttgagggattacatatgtactttgcagagtaaatttaagaacgccaaaaagatgaaagattatggtaaaagcatcatgtggcctgctccgccgctgtctttgagagacactacgaaaattttaagaggtatttacaataaatggaggtgccgcatgattttgaaccgtatccccaaaaacgaatggccgcagatgaggctgaaagtaatcgccgccagtaatctgatcaacaaacgaccccactacggtgtaaatcgcaaatgggaaggcaactacctcacatctcatttggaaaacaaccaatacacagtatacaatgaagcagtgaacaacctaaggaacactaaacacttcaataacgttctcttctcctctttcgttaccaaattcaacaaatttaacaaagttgccgagagagtcatgctagttaccgatcaatatgttttcaagttagatacccaaaagtttagaaacatgaaagagggcgtggcgatcggtgaattgaccggtatcagtgtcagtccaggacaggaccaattgatagttcttcactgcccagggggtaacgatttggtggtgtcgttgcactgtgatagacaagaggacagaataggtgaatgtatcggtgtgatatgtaacagatattaccagattaaacaggctgacctgcctgtgaaagtatcaaagactatatcctgcagcttgggcaacaaacaacgactaatcaacattcaagtatcagcagctgagcagcaggcgacatttaaaaaggatggtcacaacatcttataccttctgccttccacgttttcaattcttgaaaacggcaataaccatattaagcaatagactgaggtcttacgccgaagagtgatatcaattttttagatttaggtttattctacttaatattttttagtagagttgagtttctaccgatttggggctaatggggcagaaataagtttcaaaccgaaaaggggtgcaattggtatgaccagtgaatttatttagcatgccagaaacattgaaagttagtccattaaagttaacaggaaagaaaatgagtgaaatgaaaaataagtcaatgaaggaaagtaaggcttaaaggaaaaacgtagtacatcagaattgatgcaaatctaatattttttacttgaaaattgttttgcactccttgttcagtacgtttggggattacttattaacgcattggctgccactgccgccaataggcatgttaggctacttgagtcaggtgccagtgaatgccttttggcgttcataacctgtgaaattaaataggttcttatcgtattggctccatacgaaagtgactgaatataagtggcagctaacgtgttaagaatgttgttacaggtcggtagaaacttttgtaaaaactgtgtcatagtaagtttttcgtttttaacacttttattattgattgttgcttttctgttatgtctctatgttgggattagggacaaaaaatttattttattttctttcaagtattaaaatcagtatctggaaagctcacgcatgtaaaatataaatcaacgaatacaagaaacgcaatttaacacgttggctgccataatgttaaaaaaaacaaaatggatcccaagaccacgaggctcacgtttctatgctattgagacaactacggtgtgtcacgcggctgttctcgaaaacaacatgaaacacatttgtttctcacggcagccaccgcgttaaacatctaaaattcaaacacactaatagtttcagctggcagattctgaactgcagatggtgttgaccggacaataagaatgtttataggaatgtaaattgtaagtttagcgattgagaatgtttttttgtcacatattctaaaattacttattcaatttttttgcttacgtgatctttccacacactgacctaagtaagtctattaatttattatctatagcaatagatatccttaaaaaataatgctttgcaatattttaaaaaacgcctctttttgttactgttgtatctcttatgtacttatacatacataaaaaatcaataagtgcctttttaatgttgagaaagtggttataaagtttcctataaatgcactttttagaattgaaatcttctgtgggcattttgagtttacaatcgtgaaatttgaaacagtttcattatttattggaacacgagaacagtttatcaatgaaaacatataataatattgcaaaaatattggtggtaggaccaaatgtggaattgatcaaggacaccatttaaatgagttgaaaaagagactataaaactatttttgtaaagggaatttttgaaatcaagtgtctcttttactttacctgttttaggtatgagatagtgcctaagatgctgaaattaatgctgggaaatcctgttttagttgtaatgttctttaacatatgcctctcatctttctgtagaaccttccatacaaagtcttctggaaagtgcggattttttgttttcggaaacaattgaaaaccttgggaccagaaggggacatgccaccaaacaatattttggagaaaacatcattttaaacttattttcaaatcctgaaatccaatttttacagttttctcagcagtaaggcccctaatcgtttggaaatatgttattaaatacacaagaaaagcaacacaaatgtttgtttaattgttttgagtttttgaacattttttgaaaaatatgaggcttatcccattttgtataaaaaattatattctaaaaaatgaacataaaatgcaacaataaaataattcagttgtcaatattttcaatatctgaaaagtcgtccaaatgttcaatgtcttccagtggttcagtattctcagtatctggtagaatctattgacaagcaccattttctgcgtacactgttttgtgcaaccgcaaggtgcatataattattgtggttctattttcttccctttcgtatttatatattcgtaacttagatttcttttagtcttacgcttaatttttttatgtcgttgggtatccttgtgtctccatctaggaggcgcattcttttctggagttggcaaaagacctccagaagtctgtgcggtataaacccattcattttcttacaataaagtaggtattttactaaaaaggggtaagccacaaaaaacatttacaacacctaatatttttaggtccgaaaaaaatataacataaggggacaagccacacatttaataaaattactcttcctgagtttatattttccgaatcgctactacttccggatactgtatagtctttgtcatttaaaaatggatcttggtcactgtgttcagaatcaaactcagaaaagtctattttccgtttacatacacgggaatgtttcgccgccatgttgattactactgtggcttgtctccttctgttgcaatataaagtaatggtgacacagcaggacttactacagcggcgccatctatgagaaaactgctgaaattttctgtttgggacattaatatgatcttaaagtgtgcgatttctactttaactcatttttgacgaaattgtggcttgtcccaaggtcttcaattatattttattttgttgtttttaattttaatctatataaatatccaaattgccagggacaatcaaactaccgaattacaaagaaggatcaccttagaattggccgcatatggagctctttcaaacatcttcaagagcaacatgccaaattatttgaaaaagaagacatttcaaccaatgtgtgcttccagtcatgacttactgcgtcgaaacattatcgttaacccaggccacagcaaccaaacttagagtggcccaaagaagaatggaacggtcactacttggactgac

SEQ ID NO: 2177 - DNA, 6142 bp, Diabrotica virgifera
  SmartBlast Evalue=0; Info="Myosin IA, putative n=1 Tax= Pediculus humanus corporis RepID=E0VG03_PEDHC"
ggtgatttctgagatagtagagcgttcagcgattacgaaaagcttataaataaatcgcgttgactcaccaaatcaaatcgaattaaatgaagtgcagtgttggtgattaaaaacaatctacagcagaaaaaatcaactttataccatggctatgcaacgagaagttggcgtaggcgattttgtcctcatggacaaaattgacctggacaattttatgaagaatattgaactcagattcaaaaatggattcatttacacatacatcggagaagtatgtgtttctgtcaatccctacagaacaaaaaacatttatggaatggaacaagtcaatcagtataaagatcgagaactattcgaaaaccccccacacatattcgccattgccgatgcttcacataaagtgatgaaacagcaaggaaaagatacttgtattgtcatcagcggagaatccggatctggaaagacagaagcttctaaaatcataatgaagtacattgctgcagtgacaaatcaaggaggacaaaaagaaatcgaaagagtcaaagatgttctcatccagtctaactccatcctagaagctttcgggaacgccaaaacgaacaggaacgacaactcatccagatttggcaaatatatggatatccatttcgacttcaaaggcgacccgattggtggccatattaataaatatctgctagaaaaatctcgtgtcattgctcagcagcagggtgagagaaatttccattgtttttatcagcttctatctggagcaaatgatgatttgttaaaaagactgaacatatcccgtgatacccaccagtattattacatcaagcaaggaaatgctgccgtagttaacaccatcaacgacaaaagtgactaccgtgaagtcatgtcatcattgaacacacttcaattcagccaacaagaccaagataccctctggagggtagtggcggccatactacatttaggtaacgtcgatttcgagaatgacgatgatgaaaagttgagactgaaaaaatccaaaggagtggattatgctgcagacttacttcagataaaaaagagtgacttagaaaccgccctttgtgaaagagtgatagcagcacgaggtgacataatgagaaaagagcacaccgaaacagaagcttcctttggcaaagacgcttttgccaaggctgtatacgataggctattcacttggatagtcgataaaatcaatgccgccatagctgtagacaaaaccaacttaactaagacgtacaaaagttctttgatcggcgtactcgatatctacggtttcgagatcttcgacaacaatagttttgaacaattttgtatcaattattgtaacgaaaagttgcaacagctgtttattgaattggtgctgaaacaggagcaagaagaatacaatcgggaaggtatcgcgtggaccaatatagaatacttcaacaatcagatcatttgtgatttggtagaagcaccacacaaggggatcatttcaattttggatgatgcttgcaagatgactgccgaaaaagtaaccgatgagatgctgctggaagctatggacaagaatcttaaaggccacaaacattatgtctcaagacaaacaaaaacaaccgagaaaaaccttaaacataaggtagatttccgtattactcactacgctggcgatgtgacgtactgcatcatcggttttctggacaaaaacaaagatacgctcttccaagacttcaaacgtttgttatacaattccaaggatccaaatataaaggaaatgtggcccgaaggggcacagcatatcacacaaataaccaagagacctcccacagctggatcccttttcaaagcctccatgcaagctttagtccaaaacctccaaagcaaagaaccacactatgtcagatgcattaaaccgaacgaaatcaaatcgtcttcagccttcgatgaagaaagagtaagacatcaagttagttacttaggtctcgtggaaaacgttcgggtgagaagagccggtttcgcatacagacaacgatatgacagattccttaagagatacaaaatgatctcgcagttcacctggcccaatttcagatccggttccgataaagaagcctgtaaagtcatcatggacgagaacaagtacactgacgatgtcaaatacggtaaaacgaaaatcttcatccgcacaccacaaacgttgtttgctttggagatgtccaggaacaacctcatccccggcatcgttactcttatccagaaaacttggagaggttggatggcacggcagcagtacaagagattgaaggctgcgatgacgatattgaaggcatatcgcaagatgaagttgagggattacatatgtactttgcagagtaaatttaagaacgccaaaaagatgaaagattatggtaaaagcatcatgtggcctgctccgccgctgtctttgagagacactacgaaaattttaagaggtatttacaataaatggaggtgccgcatgattttgaaccgtatccccaaaaacgaatggccgcagatgaggctgaaagtaatcgccgccagtaatctgatcaacaaacgaccccactacggtgtaaatcgcaaatgggaaggcaactacctcacatctcatttggaaaacaaccaatacacagtatacaatgaagcagtgaacaacctaaggaacactaaacacttcaataacgttctcttctcctctttcgttaccaaattcaacaaatttaacaaagttgccgagagagtcatgctagttaccgatcaatatgttttcaagttagatacccaaaagtttagaaacatgaaagagggcgtggcgatcggtgaattgaccggtatcagtgtcagtccaggacaggaccaattgatagttcttcactgcccagggggtaacgatttggtggtgtcgttgcactgtgatagacaagaggacagaataggtgaatgtatcggtgtgatatgtaacagatattaccagattaaacaggctgacctgcctgtgaaagtatcaaagactatatcctgcagcttgggcaacaaacaacgactaatcaacattcaagtatcagcagctgagcagcaggcgacatttaaaaaggatggtcacaacatcttataccttctgccttccacgttttcaattcttgaaaacggcaataaccatattaagcaatagactgaggtcttacgccgaagagtgatatcaattttttagatttaggtttattctacttaatattttttagtagagttgagtttctaccgatttggggctaatggggcagaaataagtttcaaaccgaaaaggggtgcaattggtatgaccagtgaatttatttagcatgccagaaacattgaaagttagtccattaaagttaacaggaaagaaaatgagtgaaatgaaaaataagtcaatgaaggaaagtaaggcttaaaggaaaaacgtagtacatcagaattgatgcaaatctaatattttttacttgaaaattgttttgcactccttgttcagtacgtttggggattacttattaacgcattggctgccactgccgccaataggcatgttaggctacttgagtcaggtgccagtgaatgccttttggcgttcataacctgtgaaattaaataggttcttatcgtattggctccatacgaaagtgactgaatataagtggcagctaacgtgttaagaatgttgttacaggtcggtagaaacttttgtaaaaactgtgtcatagtaagtttttcgtttttaacacttttattattgattgttgcttttctgttatgtctctatgttgggattagggacaaaaaatttattttattttctttcaagtattaaaatcagtatctggaaagctcacgcatgtaaaatataaatcaacgaatacaagaaacgcaatttaacacgttggctgccataatgttaaaaaaaacaaaatggatcccaagaccacgaggctcacgtttctatgctattgagacaactacggtgtgtcacgcggctgttctcgaaaacaacatgaaacacatttgtttctcacggcagccaccgcgttaaacatctaaaattcaaacacactaatagtttcagctggcagattctgaactgcagatggtgttgaccggacaataagaatgtttataggaatgtaaattgtaagtttagcgattgagaatgtttttttgtcacatattctaaaattacttattcaatttttttgcttacgtgatctttccacacactgacctaagtaagtctattaatttattatctatagcaatagatatccttaaaaaataatgctttgcaatattttaaaaaacgcctctttttgttactgttgtatctcttatgtacttatacatacataaaaaatcaataagtgcctttttaatgttgagaaagtggttataaagtttcctataaatgcactttttagaattgaaatcttctgtgggcattttgagtttacaatcgtgaaatttgaaacagtttcattatttattggaacacgagaacagtttatcaatgaaaacatataataatattgcaaaaatattggtggtaggaccaaatgtggaattgatcaaggacaccatttaaatgagttgaaaaagagactataaaactatttttgtaaagggaatttttgaaatcaagtgtctcttttactttacctgttttaggtatgagatagtgcctaagatgctgaaattaatgctgggaaatcctgttttagttgtaatgttctttaacatatgcctctcatctttctgtagaaccttccatacaaagtcttctggaaagtgcggattttttgttttcggaaacaattgaaaaccttgggaccagaaggggacatgccaccaaacaatattttggagaaaacatcattttaaacttattttcaaatcctgaaatccaatttttacagttttctcagcagtaaggcccctaatcgtttggaaatatgttattaaatacacaagaaaagcaacacaaatgtttgtttaattgttttgagtttttgaacattttttgaaaaatatgaggcttatcccattttgtataaaaaattatattctaaaaaatgaacataaaatgcaacaataaaataattcagttgtcaatattttcaatatctgaaaagtcgtccaaatgttcaatgtcttccagtggttcagtattctcagtatctggtagaatctattgacaagcaccattttctgcgtacactgttttgtgcaaccgcaaggtgcatataattattgtggttctattttcttccctttcgtatttatatattcgtaacttagatttcttttagtcttacgcttaatttttttatgtcgttgggtatccttgtgtctccatctaggaggcgcattcttttctggagttggcaaaagacctccagaagtctgtgcggtataaacccattcattttcttacaataaagtaggtattttactaaaaaggggtaagccacaaaaaacatttacaacacctaatatttttaggtccgaaaaaaatataacataaggggacaagccacacatttaataaaattactcttcctgagtttatattttccgaatcgctactacttccggatactgtatagtctttgtcatttaaaaatggatcttggtcactgtgttcagaatcaaactcagaaaagtctattttccgtttacatacacgggaatgtttcgccgccatgttgattactactgtggcttgtctccttctgttgcaatataaagtaatggtgacacagcaggacttactacagcggcgccatctatgagaaaactgctgaaattttctgtttgggacattaatatgatcttaaagtgtgcgatttctactttaactcatttttgacggaattgtggcttgtccccttctggtcccaaggtcctcaattgatattttattttgtcgtttttaattttaatctatataaatttccaaattgccagggacaatcaaactaccgaattacaaagaaggatcaccttagaattggccgcatatggagctctctcaaacatcttcaagagcaacatgccaaattatttgaaaaagaagacatttcaacca

SEQ ID NO: 2178 - DNA, 1579 bp, Diabrotica virgifera
ttgcgcttaatttttttgtcgttgggtatccttgtgcccccatctagaaggcgctttcttttctggagttggcaagacaactcgagaagtctgtggggtataaacctattcattttcctacaataaagttggtattttactaaaaagggataagccacgaaaaacctttagaacaatcctaatatttttaggttcgaaaaatataacataaggggacaagccacacatttaataaaattactcttcctgagtttatattttccgaatcgctactacttccggatactgtatagtctttgtcatttaaaaatggatcttggtcactgtgttcagaatcaaactcagaaaagtctattttccgtttacatacacgggaatgtttcgccgccatgttgattactactgtggcttgtctccttctgttgcaatataaagtaatggtgacacagcaggacttactacagcggcgccatctatgagaaaactgctgaaattttctgtttgggacattaatatgatcttaaagtgtgcgatttctactttaactcatttttgacggaattgtggcttgtccccttctggtcccaaggtcctcaattgataatctcactgcgctaggttagattaatatagtggatggagtaatacctggatttagtacttcgctaaaagacatttttgggtttcaggaattaggtgaaacattgtatggagatttgaaaattctatgaaatatgtgatatttcctcttaaccattttttattgtcccttgctatttcctgttgtcttgctttttgctacgttttcatatcttttctcccttctgtttttatttctttttagtccttatcttatgttctattaccgactcttactgttatgctacatcttcgtactgtttcttgtacattttacttatcaactcgttcagtgcccatgacgacagtgtgtcgtcacgatagtttcatcaagggtgcctacaactcacgagtgtcggcgttagtactgccaccgtactgcgttactaaatgaaccatttaagtacgtggtaccagctatatggcgtttgttcaagatgggcaccaaacgtctaattacaagttttacaactgctaatgttaataattttaaactgcaattttttttctctgattctggccttggtttagaactagaacctttagccacgtaattgtataacttatcactaactcaggtgtaatgtgtagtgtgtgtgttgagtaagtgtcttgttactttgcaaagtcgacgtcattgtctttgcaaagagacgctaattgtatccgaacgtctgcggttcctccggtgagtaccgatcccacaaggagataaactattttcatttattaatttataataaatgaaaaaatttctgaccctggtgagattcgaactcactaccattcggaactttcgatccaaaggttaggcgctcttaccactgagccacagaggtggttaatcgtcatttgaaaagtattgttatgaatcaccttagcatatgtgtaagttagtaagtcagactagtaatggatctgacagttaagtatatttgtc

SEQ ID NO: 2179 - DNA, 1215 bp, Diabrotica virgifera
ttgcgcttaatttttttgtcgttgggtatccttgtgcccccatctagaaggcgctttcttttctggagttggcaagacaactcgagaagtctgtggggtataaacctattcattttcctacaataaagttggtattttactaaaaagggataagccacgaaaaacctttagaacaatcctaatatttttaggttcgaaaaatataacataaggggacaagccacacatttaataaaattactcttcctgagtttatattttccgaatcgctactacttccggatactgtatagtctttgtcatttaaaaatggatcttggtcactgtgttcagaatcaaactcagaaaagtctattttccgtttacatacacgggaatgtttcgccgccatgttgattactactgtggcttgtctccttctgttgcaatataaagtaatggtgacacagcaggacttactacagcggcgccatctatgagaaaactgctgaaattttctgtttgggacattaatatgatcttaaagtgtgcgatttctactttaactcatttttgacggaattgtggcttgtccccttctggtcccaaggtcctcaattgataatctcactgcgctaggttagattaatatagtggatggagtaatacctggatttagtacttcgctaaaagacatttttgggtttcaggaattaggtgaaacattgtatggagatttgaaaattctatgaaatatgtgatatttcctcttaaccattttttattgtcccttgctatttcctgttgtcttgctttttgctacgttttcatatcttttctcccttctgtttttatttctttttagtccttatcttatgttctattaccgactcttactgttatgctacatcttcgtactgtttcttgtacattttacttatcaactcgttcagtgcccatgacgacagtgtgtcgtcacgatagtttcatcaagggtgcctacaactcacgagtgtcggcgttagtactgccaccgtactgcgttactaaatgaaccatttaagtacgtggtacacttcgcgtcaaaaaaaactggtacacttttttttcccaatgtaaacctgtgttcagactggacacaatggctcgtgaatcacggcgttgttgccagcacagataatggaattgcactaaatctaaatacaaaaaataatgttcaaaaatcatggtggtgaa

SEQ ID NO: 2180 - DNA, 877 bp, Diabrotica virgifera
  SmartBlast Evalue=1E-10; Info=Endonuclease-reverse transcriptase n=1 Tax=Bombyx mori RepID=D7F160_BOMMO
ttgcgcttaatttttttgtcgttgggtatccttgtgcccccatctagaaggcgctttcttttctggagttggcaagacaactcgagaagtctgtggggtataaacctattcattttcctacaataaagttggtattttactaaaaagggataagccacgaaaaacctttagaacaatcctaatatttttaggttcgaaaaatataacataaggggacaagccacacatttaataaaattactcttcctgagtttatattttccgaatcgctactacttccggatactgtatagtctttgtcatttaaaaatggatcttggtcactgtgttcagaatcaaactcagaaaagtctattttccgtttacatacacgggaatgtttcgccgccatgttgattactactgtggcttgtctccttctgttgcaatataaagtaatggtgacacagcaggacttactacagcggcgccatctatgagaaaactgctgaaattttctgtttgggacattaatatgatcttaaagtgtgcgatttctactttaactcatttttgacgaaattgtggcttgtcccaaggtcttcaattatattttattttgttgtttttaattttaatctatataaatatccaaattgccagggacaatcaaactaccgaattacaaagaaggatcaccttagaattggccgcatatggagctctttcaaacatcttcaagagcaacatgccaaattatttgaaaaagaagacatttcaaccaatgtgtgcttccagtcatgacttactgcgtcgaaacattatcgttaacccaggccacagcaaccaaacttagagtggcccaaagaagaatggaacggtcactacttggactgac

SEQ ID NO: 2181 - DNA, 775 bp, Diabrotica virgifera
ttgcgcttaatttttttgtcgttgggtatccttgtgcccccatctagaaggcgctttcttttctggagttggcaagacaactcgagaagtctgtggggtataaacctattcattttcctacaataaagttggtattttactaaaaagggataagccacgaaaaacctttagaacaatcctaatatttttaggttcgaaaaatataacataaggggacaagccacacatttaataaaattactcttcctgagtttatattttccgaatcgctactacttccggatactgtatagtctttgtcatttaaaaatggatcttggtcactgtgttcagaatcaaactcagaaaagtctattttccgtttacatacacgggaatgtttcgccgccatgttgattactactgtggcttgtctccttctgttgcaatataaagtaatggtgacacagcaggacttactacagcggcgccatctatgagaaaactgctgaaattttctgtttgggacattaatatgatcttaaagtgtgcgatttctactttaactcatttttgacggaattgtggcttgtccccttctggtcccaaggtcctcaattgatattttattttgtcgtttttaattttaatctatataaatttccaaattgccagggacaatcaaactaccgaattacaaagaaggatcaccttagaattggccgcatatggagctctctcaaacatcttcaagagcaacatgccaaattatttgaaaaagaagacatttcaacca

SEQ ID NO: 2182 - DNA, 5345 bp, Diabrotica virgifera
  SmartBlast Evalue=2E-68; Info=Endonuclease-reverse transcriptase n=1 Tax=Bombyx mori RepID=D5LB38_BOMMO
taaacagatcgatcactatacctttctccgcaatcgatttgtttattctgattggccaaacttagttaaaatttataaatactttgaatatttacacagggaataaaaactataccaaaaacttgttatttatataattacataaaaaaacatgcaaacaattggcgcactaaaatagtattcaccaaaataatgacagtaggacagtaaaaatagaagtactaagcgtcatattattaagagtgggagcttataaagtgcaatttagtaaaactacatcaatgaaacagtttcgttaaagcagtcagtttttacaagtacttataggttacaatatagcagattgtgtcagtttctttgatgaataatttatttcttctggaatcaaaatttcagctattttaaagaaatgtgtatggtaaggcaagtgtggcatagctactatagttagcgtctgattattgctatggattactttcaggatgcaatttattggaagtgttttatgtaaaaattaatttacagtaacttgtattggacacagtcacagtaagttgtattggccatggatggtggacacgacgaatcatggaatggaggcccagaaactataaaagaagccgaggacgcccaccgactagatagatcgacagcatagaacgtgtagcgggaaactggctacaagctgcccactgtaaagaacactggaaagaactgagggaggcctatggccagcagtgaacgcgattgactgattgatgatgacgatgaaattgtgttattagacgttagaagaagcaatattattggtacatactatataaacactatttaccaaaatctcaccgtcagcaatcgctccacctcatttttctttcatcatccagcctcaaaagtccactgctgaacatatgcctcctccccttgtttccaaccctgtctatactgcgccgctcttcagtttatcctgcttaaatcgtcggtccatcttgtaggcagtcgaccgacgcttctcttggtctccactccaataacctctttgttcatcgcccatctgtcattctggctatgtgtcctgcccatctccattttagtctggctatcctttgatgacgtcagtcacctttgttcttctcctgacctcttcgtttttgattatgtctcgcagagttattcgcaaatggaccattccattcttctctgtgtcactcttagtttggtagctgaggctaacaagactggaaggacgcacggatcaaatacctttctctttagacatgtgagcaactcacttttaaagtttctctcaattttccacatgctgccccacccaagaccgattcttctcttcatttttatttatccgatgtatcttcttctttaggtgccgtgtctgtattcagacgtttggccgtcatcatgtttacaatttcctgaaatctctctctatcggctgctgcgcgaaataattcttctactgtgcagccacaccattgtctaatattacgcagccatgaaagtttctttcgaccaatccatctctttccctcaacttttccttgtattataaggcgaagcagatggtatttaggtcctctaattatatggccgaagtattctgtttttctcctctttatgatgcttatgagcagacgttccgaattcatcatttgaagaacatcttcattggaagtgtgcgaaacccacgatatctttaggattcgtcgatagcaccacaattcgaatgcttctattttgtttagcattgtggtttttaacgtccatgtctcacaaccatacaataggatagaccacacataacatttcagcaccttctttcgaatattcatcgacaggtttctattacataaaactggtttccaggtcataaaagccttccgtgatatttcgatcctagttattatctcttcatcagagtcacaatttacatttaaccagctgccaaggtacttgaaatgatttacccgttctaactcctctccatcaagagaaagctgaccttgatctatattaatctttccaactgccatccactttgtttttgaaatgttgattttaaggcctctccgatagcttgcttcactgactagatttagtagtgtctgaagatcttgtaaattttcagcaagaatggctgtatcgtcagcgtatctaatattgtcgtgtcagcgtatctaatggtgaatataaaattcttaattgtatgtcaaaaatgtgcaataactacgttttaaaacccaccaaatttgatttgcatatcttaaatggttttaaagcaataaataaatcatcaatttgtaaaagaaattggacatcccgtatatcggaaacgaagcgtttgcagacatatgactataaagcaaactgtcattattttctcacgtagaattatcccttaaagtttctcgcacttatttagacacaccctgtactgatgacgaacatggccagttgttaaagtacctgacttttttattatttaacataagcgaatgaatctgaaaacagaatgttaagaaaacctgaggctatagttgggtttttaattcagtattttataaactctagaatagtccacagggtgatgcgaactttgagaaaaaacacagtttgattcgtacactcggtatacaatgacagtttacctgtctagcaacaatattattacagagatattgataatgaataagctataatatggtaaaaaaatcacttaaatcggacaacgggtttgggaaattcgagacatcacaaatggccacattttcagtggatcgatttttttgcacccgagtgtatatcctctgatcagtcagtaaaccacttctacatctttggtatgaacaaagcatacatttggaatgactcgtttttgtcattgagtttatatgataggtaatctattgtgttttacaaattccagagccagttgatgaaagacggttttaccatgttgctctttattcaactggactttcaaacgtcaaagattaatttcaaaatattaaataatctaaatgtgccctttgtacttgcaatatagtcataatcaatattcacatatgtggattttatttcactatacttgatgcatccgaagaaggtagccaatgtgtgtattaatacctatgaaactgttagtaaaaaattaatatattattatgcttgtgttttctcgattttttgaggataaatagaaagtttgtcttttagtttaactccatcagcagttttcagtataaatcggtccatacaggaaggtttctctagctagatcaaccgaaattcattaactatacatatgatatctgttaatattttcttgtaggagatttgaatggtaactgattattgaaaataaattaataaactatattttccttttttttgctggaatagataaaaaaaaacggtataataaataatcccacattggttagaatttattttataaaccggtgcaggtctcagtaacaggtaaccctaactaatattttgcagacagccactgaataaatgtggtgctttgaatagtttcgccactgggagggtccggtgattcgaggtgaaaatactaggcttgtttaattgaaacgtatcttagatccagaacaaaattatcggtaaacatatttaccagtaattactaccatatttaaggcacagattccattgttgtgtaccacaagaatttttgtgcctgtgggttgaagaattcttcaacagcattttgtatttcttcgttcatctgaaaacgattaccttttaacgccgttttcagtggcccaaagatgtgaatacagtagaatgataaatcggaactataccctggatactctaatatcctttatttctattcttttgttgtagatttttccacttcttcggcgacataaggtcaagcattgtcgtgcagaagaatgacaagcttttctggacgttttggtcataatgcttgatacattgtttaaagtttccatatacaagtttggtttgcgttaacatgcactctaggttccaaaaactcctcgagcaagggtccttcatggttgaaaaacatgttaacatggctgaacggagtggggggttgatttatcccctctacttcgtgcaagccaccggttgggggcggcttccttcgactggtttgtggaaataagaaaaactcgtgcagggtacaagtttaataaaagaatttacctttattctggcgatcattttcacaaaaactacacataactacttactaaacctttacatttaattttgcacagtaaatttagcatttagcgatgtatttttacacagaggtgctacatgttgattgattgagagtcggcacacgaatgttagaataaaacaggcggaaagaaccacacaccacacaactgtatgtatgcataaaaccggctcacaaaagacccaacgcatttacgagcatgtagaaaaacctgctttaaacacctagccaaattgttttgcttgtcggaaagaaaggcgagcgtcagttgcaccataacttctaaaatagttgcgtttcgcaacaatggtcgtatacttaaaatagtagtcaaatacaaattataggaactgatcagtgtgacgtctacaaacataactaacatttcagaacgtcagttgagtgattataattgtttccaaggctaacctgaccaaagatatgtttccattgaacaagcctatacatcattcgtgcaacgggctacgtcataattgactttggctatacgtgcgatagatttaagcaacttgctgagaccttgtgtaacagagagaagcctatgtatggccgcttttagaccacctggcaccttctaggtatttaaaagcttgtttatctcatttaaaaataatatatcgtttatatgtatttataatttttaataattagctatatcaatgtgtatttaaaaattattagagagaaaaaaattcaaattcgaaatacttaggaatttaagctttttcaattcgatcttatgatgttagaaatattaattttatcttgtttcgcagttttttttttatttattatttttttaaatacagcaatgcatgtctaaagaaagtagtagattgaatgatgtatgtctgtattttcctttcatatgctttttatctcactgtaagtaatatcgcaacattcacaagtgattaagtgatctacgggaagcaatatttattattgctaccaaactaatttggatatagctaatgttttggtatttggcaagcggttttcccttacaagacgctgagaaacagaatgtaccgactaattttttgtttgcatgcaccatacc

SEQ ID NO: 2183 - DNA, 4628 bp, Diabrotica virgifera
  SmartBlast Evalue=1E-166; Info=Cytochrome P450 CYP6BQ9 n=2 Tax= Tribolium castaneum RepID=D7PM84_TRICA
taaacagatcgatcactatacctttctccgcaatcgatttgtttattctgattggccaaacttagttaaaatttataaatactttgaatatttacacagggaataaaaactataccaaaaacttgttatttatataattacataaaaaaacatgcaaacaattggcgcactaaaatagtattcaccaaaataatgacagtaggacagtaaaaatagaagtactaagcgtcatattattaagagtgggagcttataaagtgcaatttagtaaaactacatcaatgaaacagtttcgttaaagcagtcagtttttacaagtacttataggttacaatatagcagattgtgtcagtttctttgatgaataatttatttcttctggaatcaaaatttcagctattttaaagaaatgtgtatggtaaggcaagtgtggcatagctactatagttagcgtctgattattgctatggattactttcaggatgcaatttattggaagtgttttatgtaaaaattaatttacagtaacttgtattggacacagtcacagtaagttgtattggccatggatggtggacacgacgaatcatggaatggaggcccagaaactataaaagaagccgaggacgcccaccgactagatagatcgacagcatagaacgtgtagcgggaaactggctacaagctgcccactgtaaagaacactggaaagaactgagggaggcctatggccagcagtgaacgcgattgactgattgatgatgacgatgaaattgtgttattagacgttagaagaagcaatattattggtacatactatataaacactatttaccaaaatctcaccgtcagcaatcgctccacctcatttttctttcatcatccagcctcaaaagtccactgctgaacatatgcctcctccccttgtttccaaccctgtctatactgcgccgctcttcagtttatcctgcttaaatcgtcggtccatcttgtaggcagtcgaccgacgcttctcttggtctccactccaataacctctttgttcatcgcccatctgtcattctggctatgtgtcctgcccatctccattttagtctggctatcctttgatgacgtcagtcacctttgttcttctcctgacctcttcgtttttgattatgtctcgcagagttattcgcaaatggaccattccattcttctctgtgtcactcttagtttggtagctgaggctaacaagactggaaggacgcacggatcaaatacctttctctttagacatgtgagcaactcacttttaaagtttctctcaattttccacatgctgccccacccaagaccgattcttctcttcatttttatttatccgatgtatcttcttctttaggtgccgtgtctgtattcagacgtttggccgtcatcatgtttacaatttcctgaaatctctctctatcggctgctgcgcgaaataattcttctactgtgcagccacaccattgtctaatattacgcagccatgaaagtttctttcgaccaatccatctctttccctcaacttttccttgtattataaggcgaagcagatggtatttaggtcctctaattatatggccgaagtattctgtttttctcctctttatgatgcttatgagcagacgttccgaattcatcatttgaagaacatcttcattggaagtgtgcgaaacccacgatatctttaggattcgtcgatagcaccacaattcgaatgcttctattttgtttagcattgtggtttttaacgtccatgtctcacaaccatacaataggatagaccacacataacatttcagcaccttctttcgaatattcatcgacaggtttctattacataaaactggtttccaggtcataaaagccttccgtgatatttcgatcctagttattatctcttcatcagagtcacaatttacatttaaccagctgccaaggtacttgaaatgatttacccgttctaactcctctccatcaagagaaagctgaccttgatctatattaatctttccaactgccatccactttgtttttgaaatgttgattttaaggcctctccgatagcttgcttcactgactagatttagtagtgtctgaagatcttgtaaattttcagcaagaatggctgtatcgtcagcgtatctaatattgtcgtgtcagcgtatctaatggtgaatataaaattcttaattgtatgtcaaaaatgtgcaataactacgttttaaaacccaccaaatttgatttgcatatcttaaatggttttaaagcaataaataaatcatcaatttgtaaaagaaattggacatcccgtatatcggaaacgaagcgtttgcagacatatgactataaagcaaactgtcattattttctcacgtagaattatcccttaaagtttctcgcacttatttagacacaccctgtactgatgacgaacatggccagttgttaaagtacctgacttttttattatttaacataagcgaatgaatctgaaaacagaatgttaagaaaacctgaggctatagttgggtttaatttcagtatcttaaaaaagctagaacagtgcacgaggtgatgcgaactttgagaaaaaacgcagttcgattcgtacacccggtatacaatgacagtttacctgtctagcaataatattattacagcgatattgttaatgaataagactataacatggtaaaaaaaatcacttaaatcggacaacaggtttaggaaattcgagacatcaaaaaatgaccaaatttttaagtggatcgatttttttgcacctgagtgtaatatgctactttttaaaaatttacaataattcttccatcgtcaaccatacatctccatctatagcagtaatgaaactctttgttggtgtatttaattgggactttcgtcttcttattcagtgttacattgaagtttttaatgactgaagccactcccactttagcctgtaacattccgaatcttgctcctatacagattctgggcccttctccaaagggaataaatgcaaacgggtgtcttttggctttattttcctcgctgaaacgttcggggtcaaatttttctggatctggataatattctggatctctgtggatagcttggaaaggtatatgtactttagttccaacttccaagacgacatctgtgccaggaacctggtattctttgttgcacattcttggagtacctggtaatggtgggtgcttccgtagcgtttcgtgaataactttatccaagtaatgcatatccatgacagcttcatacgtaacttgattgtcgtgtttttttaatacagaagtaatttcttctcttaacttttcttgaatatctggattcaacgctagttccaaaagcgcaaaagtcattgtagttgctgatgtttcaaaaccagcaatgaaaaatacaaagcattgtgcagctaattcattaaaagtaaggaaatgtccatcagcgtcttttttatcttcttcgttaaatatcaaatggtcatctgcgactcttcctctattttttaactgtagcagtaaatgcatgaaatcttttctataaagattatttttctccctataattaacagtactatttacgacacccataaagaaatcttcaacctctggattcatctgtttaaatttgatcatttttagaaaatttcttggtattgtcgtagctagaacacttcttagccttgtccaagtggtttgagtgaatatttttcttccaaattgtctaaattcagaatcaggattcttaaggctgttgcagtcaataccaaaagcaacggatccgattacatctgtggtgaatctggacgctacttccttcatgtccactgcatcttgtagtttagcgtaactcttgaggatgtccctgaggccttcggtacatgcaaccattgtagagaacatcattttcattttaccagaagtaaacgttggagttaacttagtcctcaacctcctccatttatcgtcctctaaagcgaaaagatgtcccgtcaaaggatcgacttcttcattcacataaaacccatgattcacaaagttgttgaaatctttctgcaaaatattcttaatgatatccagatccagaggcatatacgtaggccttaataagacgtaaattccaccatgcttcagacctctcgacttgaagttgttgtacagttttgtgtgacaatcaccaaaggaggaatttctggtgatgaaatctttggcgtttccatagattagatgtacgggttcgatttgctccagtccaattcttttccagtatgttaatttaaattttatatataaatagccaatcgttgctgctagtgcagccaagactatcagtgagatcatctttcttagcactgatggaatgggactaatattagtttagccttgtgagcaatgtatcttgtacttctatattaatcgaactattcagatttaaaacacacatagtaatacacgtaactaaaaaatgtacctactcctacattaactaaactattcagatataattatttaatatctaaaagtcacaataataacaatacacatttatcatttatctaaagtacgtaagtaccaaac

SEQ ID NO: 2184 - DNA, 4277 bp, Diabrotica virgifera
  SmartBlast Evalue=2E-68; Info=Endonuclease-reverse transcriptase n=1 Tax=Bombyx mori RepID=D5LB38_BOMMO
ataatattataatacattgagatgcaaaaaatcgaacctcttaaaaactcggtcattttttcctaaacctgtttaaagtttaactgttgctaaacagttaaactgtcattccacaccgggtgcacgaatcaaactgcgctcttttctcaaagttcgcatcaccctgtggaccattctagcatttataaaacactgaaagtaaaacccaactaagactccggctttcttaacattggcgcgcaaacgggtattatgacagttaatattacccgtatgcacgccaatggtgaatatcttcttctttcttcttctttaggtgccgtgtctgtattcagacgtttggccgtcatcatgtttacaatttcctgaaatctctctctatcggctgctgcgcgaaataattcttctactgtgcagccacaccattgtctaatattacgcagccatgaaagtttctttcgaccaatccatctctttccctcaacttttccttgtattataaggcgaagcagatggtatttaggtcctctaattatatggccgaagtattctgtttttctcctctttatgatgcttatgagcagacgttccgaattcatcatttgaagaacatcttcattggaagtgtgcgaaacccacgatatctttaggattcgtcgatagcaccacaattcgaatgcttctattttgtttagcattgtggtttttaacgtccatgtctcacaaccatacaataggatagaccacacataacatttcagcaccttctttcgaatattcatcgacaggtttctattacataaaactggtttccaggtcataaaagccttccgtgatatttcgatcctagttattatctcttcatcagagtcacaatttacatttaaccagctgccaaggtacttgaaatgatttacccgttctaactcctctccatcaagagaaagctgaccttgatctatattaatctttccaactgccatccactttgtttttgaaatgttgattttaaggcctctccgatagcttgcttcactgactagatttagtagtgtctgaagatcttgtaaattttcagcaagaatggctgtatcgtcagcgtatctaatattgtcgtgtcagcgtatctaatggtgaatataaaattcttaattgtatgtcaaaaatgtgcaataactacgttttaaaacccaccaaatttgatttgcatatcttaaatggttttaaagcaataaataaatcatcaatttgtaaaagaaattggacatcccgtatatcggaaacgaagcgtttgcagacatatgactataaagcaaactgtcattattttctcacgtagaattatcccttaaagtttctcgcacttatttagacacaccctgtactgatgacgaacatggccagttgttaaagtacctgacttttttattatttaacataagcgaatgaatctgaaaacagaatgttaagaaaacctgaggctatagttgggtttttaattcagtattttataaactctagaatagtccacagggtgatgcgaactttgagaaaaaacacagtttgattcgtacactcggtatacaatgacagtttacctgtctagcaacaatattattacagagatattgataatgaataagctataatatggtaaaaaaatcacttaaatcggacaacgggtttgggaaattcgagacatcacaaatggccacattttcagtggatcgatttttttgcacccgagtgtatatcctctgatcagtcagtaaaccacttctacatctttggtatgaacaaagcatacatttggaatgactcgtttttgtcattgagtttatatgataggtaatctattgtgttttacaaattccagagccagttgatgaaagacggttttaccatgttgctctttattcaactggactttcaaacgtcaaagattaatttcaaaatattaaataatctaaatgtgccctttgtacttgcaatatagtcataatcaatattcacatatgtggattttatttcactatacttgatgcatccgaagaaggtagccaatgtgtgtattaatacctatgaaactgttagtaaaaaattaatatattattatgcttgtgttttctcgattttttgaggataaatagaaagtttgtcttttagtttaactccatcagcagttttcagtataaatcggtccatacaggaaggtttctctagctagatcaaccgaaattcattaactatacatatgatatctgttaatattttcttgtaggagatttgaatggtaactgattattgaaaataaattaataaactatattttccttttttttgctggaatagataaaaaaaaacggtataataaataatcccacattggttagaatttattttataaaccggtgcaggtctcagtaacaggtaaccctaactaatattttgcagacagccactgaataaatgtggtgctttgaatagtttcgccactgggagggtccggtgattcgaggtgaaaatactaggcttgtttaattgaaacgtatcttagatccagaacaaaattatcggtaaacatatttaccagtaattactaccatatttaaggcacagattccattgttgtgtaccacaagaatttttgtgcctgtgggttgaagaattcttcaacagcattttgtatttcttcgttcatctgaaaacgattaccttttaacgccgttttcagtggcccaaagatgtgaatacagtagaatgataaatcggaactataccctggatactctaatatcctttatttctattcttttgttgtagatttttccacttcttcggcgacataaggtcaagcattgtcgtgcagaagaatgacaagcttttctggacgttttggtcataatgcttgatacattgtttaaagtttccatatacaagtttggtttgcgttaacatgcactctaggttccaaaaactcctcgagcaagggtccttcatggttgaaaaacatgttaacatggctgaacggagtggggggttgatttatcccctctacttcgtgcaagccaccggttgggggcggcttccttcgactggtttgtggaaataagaaaaactcgtgcagggtacaagtttaataaaagaatttacctttattctggcgatcattttcacaaaaactacacataactacttactaaacctttacatttaattttgcacagtaaatttagcatttagcgatgtatttttacacagaggtgctacatgttgattgattgagagtcggcacacgaatgttagaataaaacaggcggaaagaaccacacaccacacaactgtatgtatgcataaaaccggctcacaaaagacccaacgcatttacgagcatgtagaaaaacctgctttaaacacctagccaaattgttttgcttgtcggaaagaaaggcgagcgtcagttgcaccataacttctaaaatagttgcgtttcgcaacaatggtcgtatacttaaaatagtagtcaaatacaaattataggaactgatcagtgtgacgtctacaaacataactaacatttcagaacgtcagttgagtgattataattgtttccaaggctaacctgaccaaagatatgtttccattgaacaagcctatacatcattcgtgcaacgggctacgtcataattgactttggctatacgtgcgatagatttaagcaacttgctgagaccttgtgtaacagagagaagcctatgtatggccgcttttagaccacctggcaccttctaggtatttaaaagcttgtttatctcatttaaaaataatatatcgtttatatgtatttataatttttaataattagctatatcaatgtgtatttaaaaattattagagagaaaaaaattcaaattcgaaatacttaggaatttaagctttttcaattcgatcttatgatgttagaaatattaattttatcttgtttcgcagttttttttttatttattatttttttaaatacagcaatgcatgtctaaagaaagtagtagattgaatgatgtatgtctgtattttcctttcatatgctttttatctcactgtaagtaatatcgcaacattcacaagtgattaagtgatctacgggaagcaatatttattattgctaccaaactaatttggatatagctaatgttttggtatttggcaagcggttttcccttacaagacgctgagaaacagaatgtaccgactaattttttgtttgcatgcaccatacc

SEQ ID NO: 2185 - DNA, 3560 bp, Diabrotica virgifera
  SmartBlast Evalue=1E-166; Info=Cytochrome P450 CYP6BQ9 n=2 Tax= Tribolium castaneum RepID=D7PM84_TRICA
ataatattataatacattgagatgcaaaaaatcgaacctcttaaaaactcggtcattttttcctaaacctgtttaaagtttaactgttgctaaacagttaaactgtcattccacaccgggtgcacgaatcaaactgcgctcttttctcaaagttcgcatcaccctgtggaccattctagcatttataaaacactgaaagtaaaacccaactaagactccggctttcttaacattggcgcgcaaacgggtattatgacagttaatattacccgtatgcacgccaatggtgaatatcttcttctttcttcttctttaggtgccgtgtctgtattcagacgtttggccgtcatcatgtttacaatttcctgaaatctctctctatcggctgctgcgcgaaataattcttctactgtgcagccacaccattgtctaatattacgcagccatgaaagtttctttcgaccaatccatctctttccctcaacttttccttgtattataaggcgaagcagatggtatttaggtcctctaattatatggccgaagtattctgtttttctcctctttatgatgcttatgagcagacgttccgaattcatcatttgaagaacatcttcattggaagtgtgcgaaacccacgatatctttaggattcgtcgatagcaccacaattcgaatgcttctattttgtttagcattgtggtttttaacgtccatgtctcacaaccatacaataggatagaccacacataacatttcagcaccttctttcgaatattcatcgacaggtttctattacataaaactggtttccaggtcataaaagccttccgtgatatttcgatcctagttattatctcttcatcagagtcacaatttacatttaaccagctgccaaggtacttgaaatgatttacccgttctaactcctctccatcaagagaaagctgaccttgatctatattaatctttccaactgccatccactttgtttttgaaatgttgattttaaggcctctccgatagcttgcttcactgactagatttagtagtgtctgaagatcttgtaaattttcagcaagaatggctgtatcgtcagcgtatctaatattgtcgtgtcagcgtatctaatggtgaatataaaattcttaattgtatgtcaaaaatgtgcaataactacgttttaaaacccaccaaatttgatttgcatatcttaaatggttttaaagcaataaataaatcatcaatttgtaaaagaaattggacatcccgtatatcggaaacgaagcgtttgcagacatatgactataaagcaaactgtcattattttctcacgtagaattatcccttaaagtttctcgcacttatttagacacaccctgtactgatgacgaacatggccagttgttaaagtacctgacttttttattatttaacataagcgaatgaatctgaaaacagaatgttaagaaaacctgaggctatagttgggtttaatttcagtatcttaaaaaagctagaacagtgcacgaggtgatgcgaactttgagaaaaaacgcagttcgattcgtacacccggtatacaatgacagtttacctgtctagcaataatattattacagcgatattgttaatgaataagactataacatggtaaaaaaaatcacttaaatcggacaacaggtttaggaaattcgagacatcaaaaaatgaccaaatttttaagtggatcgatttttttgcacctgagtgtaatatgctactttttaaaaatttacaataattcttccatcgtcaaccatacatctccatctatagcagtaatgaaactctttgttggtgtatttaattgggactttcgtcttcttattcagtgttacattgaagtttttaatgactgaagccactcccactttagcctgtaacattccgaatcttgctcctatacagattctgggcccttctccaaagggaataaatgcaaacgggtgtcttttggctttattttcctcgctgaaacgttcggggtcaaatttttctggatctggataatattctggatctctgtggatagcttggaaaggtatatgtactttagttccaacttccaagacgacatctgtgccaggaacctggtattctttgttgcacattcttggagtacctggtaatggtgggtgcttccgtagcgtttcgtgaataactttatccaagtaatgcatatccatgacagcttcatacgtaacttgattgtcgtgtttttttaatacagaagtaatttcttctcttaacttttcttgaatatctggattcaacgctagttccaaaagcgcaaaagtcattgtagttgctgatgtttcaaaaccagcaatgaaaaatacaaagcattgtgcagctaattcattaaaagtaaggaaatgtccatcagcgtcttttttatcttcttcgttaaatatcaaatggtcatctgcgactcttcctctattttttaactgtagcagtaaatgcatgaaatcttttctataaagattatttttctccctataattaacagtactatttacgacacccataaagaaatcttcaacctctggattcatctgtttaaatttgatcatttttagaaaatttcttggtattgtcgtagctagaacacttcttagccttgtccaagtggtttgagtgaatatttttcttccaaattgtctaaattcagaatcaggattcttaaggctgttgcagtcaataccaaaagcaacggatccgattacatctgtggtgaatctggacgctacttccttcatgtccactgcatcttgtagtttagcgtaactcttgaggatgtccctgaggccttcggtacatgcaaccattgtagagaacatcattttcattttaccagaagtaaacgttggagttaacttagtcctcaacctcctccatttatcgtcctctaaagcgaaaagatgtcccgtcaaaggatcgacttcttcattcacataaaacccatgattcacaaagttgttgaaatctttctgcaaaatattcttaatgatatccagatccagaggcatatacgtaggccttaataagacgtaaattccaccatgcttcagacctctcgacttgaagttgttgtacagttttgtgtgacaatcaccaaaggaggaatttctggtgatgaaatctttggcgtttccatagattagatgtacgggttcgatttgctccagtccaattcttttccagtatgttaatttaaattttatatataaatagccaatcgttgctgctagtgcagccaagactatcagtgagatcatctttcttagcactgatggaatgggactaatattagtttagccttgtgagcaatgtatcttgtacttctatattaatcgaactattcagatttaaaacacacatagtaatacacgtaactaaaaaatgtacctactcctacattaactaaactattcagatataattatttaatatctaaaagtcacaataataacaatacacatttatcatttatctaaagtacgtaagtaccaaac

SEQ ID NO: 2186 - DNA, 3011 bp, Diabrotica virgifera
  SmartBlast Evalue=1E-136; Info=Endonuclease-reverse transcriptase n=1 Tax=Bombyx mori RepID=D5LB38_BOMMO
taaacagatcgatcactatacctttctccgcaatcgatttgtttattctgattggccaaacttagttaaaatttataaatactttgaatatttacacagggaataaaaactataccaaaaacttgttatttatataattacataaaaaaacatgcaaacaattggcgcactaaaatagtattcaccaaaataatgacagtaggacagtaaaaatagaagtactaagcgtcatattattaagagtgggagcttataaagtgcaatttagtaaaactacatcaatgaaacagtttcgttaaagcagtcagtttttacaagtacttataggttacaatatagcagattgtgtcagtttctttgatgaataatttatttcttctggaatcaaaatttcagctattttaaagaaatgtgtatggtaaggcaagtgtggcatagctactatagttagcgtctgattattgctatggattactttcaggatgcaatttattggaagtgttttatgtaaaaattaatttacagtaacttgtattggacacagtcacagtaagttgtattggccatggatggtggacacgacgaatcatggaatggaggcccagaaactataaaagaagccgaggacgcccaccgactagatagatcgacagcatagaacgtgtagcgggaaactggctacaagctgcccactgtaaagaacactggaaagaactgagggaggcctatggccagcagtgaacgcgattgactgattgatgatgacgatgaaattgtgttattagacgttagaagaagcaatattattggtacatactatataaacactatttaccaaaatctcaccgtcagcaatcgctccacctcatttttctttcatcatccagcctcaaaagtccactgctgaacatatgcctcctccccttgtttccaaccctgtctatactgcgccgctcttcagtttatcctgcttaaatcgtcggtccatcttgtaggcagtcgaccgacgcttctcttggtctccactccaataacctctttgttcatcgcccatctgtcattctggctatgtgtcctgcccatctccattttagtctggctatcctttgatgacgtcagtcacctttgttcttctcctgacctcttcgtttttgattatgtctcgcagagttattcgcaaatggaccattccattcttctctgtgtcactcttagtttggtagctgaggctaacaagactggaaggacgcacggatcaaatacctttctctttagacatgtgagcaactcacttttaaagtttctctcaattttccacatgctgccccacccaagaccgattcttctcttcatttttatttatccgatgtatcttcttctttaggtgccgtgtctgtattcagacgtttggccgtcatcatgtttacaatttcctgaaatctctctctatcggctgctgcgcgaaataattcttctactgtgcagccacaccattgtctaatattacgcagccatgaaagtttctttcgaccaatccatctctttccctcaacttttccttgtattataaggcgaagcagatggtatttaggtcctctaattatatcgccgaagtattctgtttttctcctctttatgatgcttatgagcagacgttctgaattcatcatttgaagaacatcttcattggaagtgtgcgaaatccacgatatctttaggattcgtcgatagcaccacaattcgaatgcctctattttgtttagcattgtgatttttaagtccatgtctcacaaccatataagatagaccacacataacatttcagtacattctttcgaatattcatcgaaaggtttctgttacataagacttgtttccaggtcataaaagccttccgtgatatttcgatcttagttattatctcttcatcagagtcacaatttacatttaaccagctgccaaggtacttgaaattattcacccgttctaactcctctccatcaagagaaagctgaccttgatctatattaatctttccaactaccatccactttgtttttgaaatgttgattttaaggcctctccgataacttgcttcactgactagatttagtagtgtctgaagatcttttaaattttctgcaagaaaggctgtatcgtcagcgtatctaatattgttgattacttctccgcctggccttactccctcttgtctgtcatccaaagcctcgctaaagatttcttcagagtacagattaaaaagggtaggtgataaaacacaaccttgtcgtagtccacgttttatgggtagtttttcagtacgactgtctccaatttggatagaggctacttgattgtaatataagtatttcagcagtcttatatcgtagtggtcaagtcctgcctgcaggcaatcgaaaagtgtatcatgttgtactcggtcgaatgccttctcgaagtcgatgaaacaaacataaacgttctttcggaattcacaacttttttgtaagagaacgcgcatacaaaatagtgcttctctagttcctagaccatttctaaatccaaattgcttattacccattctagtttcgcacagaaggaatactcggttttgtataatacgtaaaagtatcttagtgtgtgactcatcaaactgattagtctaaaatcgctacatttggtgggcctgcttttctttggtaatgttataaacaatgactccaaccaatcatctggtatttttccttcattgtaaattttgttgaagaaagtagtcaagtaggtaatgtttttctcatctaaaagtttaagtagctcaacagggatttgatctggtccaggtgctttattgtttttggctcgttgtattgcttttatgacttccgacttcagtatactggatatccgatgtatacttctctttatgttccaattacacacatattggtaaaattggtcgagaaaaaagaactacaaaaactaatgcaattctgacaatgcttcagtgaagt

SEQ ID NO: 2187 - DNA, 3096 bp, Diabrotica virgifera
ctatagttggtttttaattcagtattttataaactctagaatagtccacagggtgatgcgaactttaagaaaaaattctctcggaaaaaaatatctcggaaacgaagcatttcgaaacatgcgattatggagcgaactgtcattattttcatgtgtacaattgccccttaaagtttgccgcacttatttagacacaccctgtactgatgacgaacatggccagttgttaaagtacctgacttttttattatttaacataagcgaatgaatctgaaaacagaatgttaagaaaacctgaggctatagttgggtttttaattcagtattttataaactctagaatagtccacagggtgatgcgaactttgagaaaaaacacagtttgattcgtacactcggtatacaatgacagtttacctgtctagcaacaatattattacagagatattgataatgaataagctataatatggtaaaaaaatcacttaaatcggacaacgggtttgggaaattcgagacatcacaaatggccacattttcagtggatcgatttttttgcacccgagtgtatatcctctgatcagtcagtaaaccacttctacatctttggtatgaacaaagcatacatttggaatgactcgtttttgtcattgagtttatatgataggtaatctattgtgttttacaaattccagagccagttgatgaaagacggttttaccatgttgctctttattcaactggactttcaaacgtcaaagattaatttcaaaatattaaataatctaaatgtgccctttgtacttgcaatatagtcataatcaatattcacatatgtggattttatttcactatacttgatgcatccgaagaaggtagccaatgtgtgtattaatacctatgaaactgttagtaaaaaattaatatattattatgcttgtgttttctcgattttttgaggataaatagaaagtttgtcttttagtttaactccatcagcagttttcagtataaatcggtccatacaggaaggtttctctagctagatcaaccgaaattcattaactatacatatgatatctgttaatattttcttgtaggagatttgaatggtaactgattattgaaaataaattaataaactatattttccttttttttgctggaatagataaaaaaaaacggtataataaataatcccacattggttagaatttattttataaaccggtgcaggtctcagtaacaggtaaccctaactaatattttgcagacagccactgaataaatgtggtgctttgaatagtttcgccactgggagggtccggtgattcgaggtgaaaatactaggcttgtttaattgaaacgtatcttagatccagaacaaaattatcggtaaacatatttaccagtaattactaccatatttaaggcacagattccattgttgtgtaccacaagaatttttgtgcctgtgggttgaagaattcttcaacagcattttgtatttcttcgttcatctgaaaacgattaccttttaacgccgttttcagtggcccaaagatgtgaatacagtagaatgataaatcggaactataccctggatactctaatatcctttatttctattcttttgttgtagatttttccacttcttcggcgacataaggtcaagcattgtcgtgcagaagaatgacaagcttttctggacgttttggtcataatgcttgatacattgtttaaagtttccatatacaagtttggtttgcgttaacatgcactctaggttccaaaaactcctcgagcaagggtccttcatggttgaaaaacatgttaacatggctgaacggagtggggggttgatttatcccctctacttcgtgcaagccaccggttgggggcggcttccttcgactggtttgtggaaataagaaaaactcgtgcagggtacaagtttaataaaagaatttacctttattctggcgatcattttcacaaaaactacacataactacttactaaacctttacatttaattttgcacagtaaatttagcatttagcgatgtatttttacacagaggtgctacatgttgattgattgagagtcggcacacgaatgttagaataaaacaggcggaaagaaccacacaccacacaactgtatgtatgcataaaaccggctcacaaaagacccaacgcatttacgagcatgtagaaaaacctgctttaaacacctagccaaattgttttgcttgtcggaaagaaaggcgagcgtcagttgcaccataacttctaaaatagttgcgtttcgcaacaatggtcgtatacttaaaatagtagtcaaatacaaattataggaactgatcagtgtgacgtctacaaacataactaacatttcagaacgtcagttgagtgattataattgtttccaaggctaacctgaccaaagatatgtttccattgaacaagcctatacatcattcgtgcaacgggctacgtcataattgactttggctatacgtgcgatagatttaagcaacttgctgagaccttgtgtaacagagagaagcctatgtatggccgcttttagaccacctggcaccttctaggtatttaaaagcttgtttatctcatttaaaaataatatatcgtttatatgtatttataatttttaataattagctatatcaatgtgtatttaaaaattattagagagaaaaaaattcaaattcgaaatacttaggaatttaagctttttcaattcgatcttatgatgttagaaatattaattttatcttgtttcgcagttttttttttatttattatttttttaaatacagcaatgcatgtctaaagaaagtagtagattgaatgatgtatgtctgtattttcctttcatatgctttttatctcactgtaagtaatatcgcaacattcacaagtgattaagtgatctacgggaagcaatatttattattgctaccaaactaatttggatatagctaatgttttggtatttggcaagcggttttcccttacaagacgctgagaaacagaatgtaccgactaattttttgtttgcatgcaccatacc

SEQ ID NO: 2188 - DNA, 2379 bp, Diabrotica virgifera
  SmartBlast Evalue=1E-166; Info=Cytochrome P450 CYP6BQ9 n=2 Tax= Tribolium castaneum RepID=D7PM84_TRICA
ctatagttggtttttaattcagtattttataaactctagaatagtccacagggtgatgcgaactttaagaaaaaattctctcggaaaaaaatatctcggaaacgaagcatttcgaaacatgcgattatggagcgaactgtcattattttcatgtgtacaattgccccttaaagtttgccgcacttatttagacacaccctgtactgatgacgaacatggccagttgttaaagtacctgacttttttattatttaacataagcgaatgaatctgaaaacagaatgttaagaaaacctgaggctatagttgggtttaatttcagtatcttaaaaaagctagaacagtgcacgaggtgatgcgaactttgagaaaaaacgcagttcgattcgtacacccggtatacaatgacagtttacctgtctagcaataatattattacagcgatattgttaatgaataagactataacatggtaaaaaaaatcacttaaatcggacaacaggtttaggaaattcgagacatcaaaaaatgaccaaatttttaagtggatcgatttttttgcacctgagtgtaatatgctactttttaaaaatttacaataattcttccatcgtcaaccatacatctccatctatagcagtaatgaaactctttgttggtgtatttaattgggactttcgtcttcttattcagtgttacattgaagtttttaatgactgaagccactcccactttagcctgtaacattccgaatcttgctcctatacagattctgggcccttctccaaagggaataaatgcaaacgggtgtcttttggctttattttcctcgctgaaacgttcggggtcaaatttttctggatctggataatattctggatctctgtggatagcttggaaaggtatatgtactttagttccaacttccaagacgacatctgtgccaggaacctggtattctttgttgcacattcttggagtacctggtaatggtgggtgcttccgtagcgtttcgtgaataactttatccaagtaatgcatatccatgacagcttcatacgtaacttgattgtcgtgtttttttaatacagaagtaatttcttctcttaacttttcttgaatatctggattcaacgctagttccaaaagcgcaaaagtcattgtagttgctgatgtttcaaaaccagcaatgaaaaatacaaagcattgtgcagctaattcattaaaagtaaggaaatgtccatcagcgtcttttttatcttcttcgttaaatatcaaatggtcatctgcgactcttcctctattttttaactgtagcagtaaatgcatgaaatcttttctataaagattatttttctccctataattaacagtactatttacgacacccataaagaaatcttcaacctctggattcatctgtttaaatttgatcatttttagaaaatttcttggtattgtcgtagctagaacacttcttagccttgtccaagtggtttgagtgaatatttttcttccaaattgtctaaattcagaatcaggattcttaaggctgttgcagtcaataccaaaagcaacggatccgattacatctgtggtgaatctggacgctacttccttcatgtccactgcatcttgtagtttagcgtaactcttgaggatgtccctgaggccttcggtacatgcaaccattgtagagaacatcattttcattttaccagaagtaaacgttggagttaacttagtcctcaacctcctccatttatcgtcctctaaagcgaaaagatgtcccgtcaaaggatcgacttcttcattcacataaaacccatgattcacaaagttgttgaaatctttctgcaaaatattcttaatgatatccagatccagaggcatatacgtaggccttaataagacgtaaattccaccatgcttcagacctctcgacttgaagttgttgtacagttttgtgtgacaatcaccaaaggaggaatttctggtgatgaaatctttggcgtttccatagattagatgtacgggttcgatttgctccagtccaattcttttccagtatgttaatttaaattttatatataaatagccaatcgttgctgctagtgcagccaagactatcagtgagatcatctttcttagcactgatggaatgggactaatattagtttagccttgtgagcaatgtatcttgtacttctatattaatcgaactattcagatttaaaacacacatagtaatacacgtaactaaaaaatgtacctactcctacattaactaaactattcagatataattatttaatatctaaaagtcacaataataacaatacacatttatcatttatctaaagtacgtaagtaccaaac

SEQ ID NO: 2189 - DNA, 1943 bp, Diabrotica virgifera
  SmartBlast Evalue=1E-136; Info=Endonuclease-reverse transcriptase n=1 Tax=Bombyx mori RepID=D5LB38_BOMMO
ataatattataatacattgagatgcaaaaaatcgaacctcttaaaaactcggtcattttttcctaaacctgtttaaagtttaactgttgctaaacagttaaactgtcattccacaccgggtgcacgaatcaaactgcgctcttttctcaaagttcgcatcaccctgtggaccattctagcatttataaaacactgaaagtaaaacccaactaagactccggctttcttaacattggcgcgcaaacgggtattatgacagttaatattacccgtatgcacgccaatggtgaatatcttcttctttcttcttctttaggtgccgtgtctgtattcagacgtttggccgtcatcatgtttacaatttcctgaaatctctctctatcggctgctgcgcgaaataattcttctactgtgcagccacaccattgtctaatattacgcagccatgaaagtttctttcgaccaatccatctctttccctcaacttttccttgtattataaggcgaagcagatggtatttaggtcctctaattatatcgccgaagtattctgtttttctcctctttatgatgcttatgagcagacgttctgaattcatcatttgaagaacatcttcattggaagtgtgcgaaatccacgatatctttaggattcgtcgatagcaccacaattcgaatgcctctattttgtttagcattgtgatttttaagtccatgtctcacaaccatataagatagaccacacataacatttcagtacattctttcgaatattcatcgaaaggtttctgttacataagacttgtttccaggtcataaaagccttccgtgatatttcgatcttagttattatctcttcatcagagtcacaatttacatttaaccagctgccaaggtacttgaaattattcacccgttctaactcctctccatcaagagaaagctgaccttgatctatattaatctttccaactaccatccactttgtttttgaaatgttgattttaaggcctctccgataacttgcttcactgactagatttagtagtgtctgaagatcttttaaattttctgcaagaaaggctgtatcgtcagcgtatctaatattgttgattacttctccgcctggccttactccctcttgtctgtcatccaaagcctcgctaaagatttcttcagagtacagattaaaaagggtaggtgataaaacacaaccttgtcgtagtccacgttttatgggtagtttttcagtacgactgtctccaatttggatagaggctacttgattgtaatataagtatttcagcagtcttatatcgtagtggtcaagtcctgcctgcaggcaatcgaaaagtgtatcatgttgtactcggtcgaatgccttctcgaagtcgatgaaacaaacataaacgttctttcggaattcacaacttttttgtaagagaacgcgcatacaaaatagtgcttctctagttcctagaccatttctaaatccaaattgcttattacccattctagtttcgcacagaaggaatactcggttttgtataatacgtaaaagtatcttagtgtgtgactcatcaaactgattagtctaaaatcgctacatttggtgggcctgcttttctttggtaatgttataaacaatgactccaaccaatcatctggtatttttccttcattgtaaattttgttgaagaaagtagtcaagtaggtaatgtttttctcatctaaaagtttaagtagctcaacagggatttgatctggtccaggtgctttattgtttttggctcgttgtattgcttttatgacttccgacttcagtatactggatatccgatgtatacttctctttatgttccaattacacacatattggtaaaattggtcgagaaaaaagaactacaaaaactaatgcaattctgacaatgcttcagtgaagt

SEQ ID NO: 2190 - DNA, 5038 bp, Diabrotica virgifera
  SmartBlast Evalue=0; Info=Mitochondrial translation elongation factor Tu n=1 Tax=Glossina morsitans morsitans RepID=D3TM80_ GLOMM
gtctgattaaataacaaactccatgccggggttttaatgtaaaatatatttattataaagttaagaacttccactttctattcaaatatgacttcaattattgttgctagaactttagcaccagtggtgcaccgttcccttaaacagcttttttcaaaaggaactggtacaaaagtgaggaactactgtaaaacattacaactagcgacagttcaatacaaccaaaaacgattgtatgcagagaaaaaaagtatttgaaagaaccaaaccacattgtaatgtgggtactataggacatgtagatcatggtaagaccacacttactgcagctattaccaaagttttagctgaacaaaagttagcccaagcaagaggatatgcggatattgacaatgctccagaggaaaaagctagaggtattactattaatgtcgctcatattgagtatcaaacagaaaacagacattatggccacacagactgtcctggccatgctgattacatcaaaaacatgatcacaggagcagctcaaatgggatggtgccatcatgattgtagctgctactgatggtgtcatgccccaaaccagagaacatctattattagcaaaacaaattggtgtccatcacatcgtagtcttcatcaacaaagttgacgcagctgataaggaaatggttgagcttgtagaaatggaaattagggagttgttaacagaaatgggttttgatggagagaatattccaattattgctgggtctgccttatgtgctttagaaggaaagagtcctgaaataggctctgaagcaatcctaaaactattaaaagaagtagatgcctacatacctaccccagtaagagatttagacaaaccattcttgttacctgtagaacacacatattccatacctggaagaggcactgtagtaactggaagattggaaagaggcattttgaagaagggggctgaatgtgaatttgtaggatataacaaagttctgaaaagtacggttacaggtgtggagatgtttcatcaaattttggatgaagcccatgctggtgatcaacttggagctttagtgagaggattgaagagagatgacgttaaaagaggaatgattatggctaaacctggaacagtaaagagtcatgataatgttgaaactcaagtatatgttttaagtaaagaagaaggaggtcgtacaaaaccgttcacatctttcattcagctacagatgttctgcaggacctgggattgtcctgtgcaagtagttgtaccagacaaggaaatggtcatgccaggtgaagattccaagttagttttgaaaatgttgcggcccatggtacttgagcaaggtcagagattcacgttaagagatggttcacaaaccttaggaactggcgtagtaacgaaaaccttacctcgtctctcagatgccgaacgaaattccttaacagaaggcaagaaagccagagaaaagaaaatgggtgcaaccaagtagattgtaaatttttgtatattttgttaattaatgtttactatgccgaaaaaaacagaaaaatactgatatttctgtgtgagaatgttagaaggtttgttttaatagaaaaactaataggtatcattttttatttctatgtatttcaattttaatgtctcgttgttaacagctgactgtatattttatataggttttgaaagagcttcttatgagtttgtttttgaatggattggtttgcaacaaaatcataaatgcaaatattactagacactaattttatgatattatgttctagtagccactcttttttttttgttgtgtaataaaagctagaacataggctgtaaaaaaagtccaaggccagaaggaaattatttcctaaaccacattcaaatagcaaattctcaactataaacaaacgcacgtgttactattcaccgtatcattcgtcaagaggctgttaaatgtaatttattgccctaaatgaggcggattctcattttacaggtccaaactggtcagtctgcaaattcaaattgtaggtagcgtgttggtttttaagatacacttcaggacgaccctgtttagcttccatgcgcgtttgtttacagttgggaatctgtaaaatgaatggactgtagagactatgcgcggcccaaaaaaggacaactctaccttatcggtaaagtctacgagatgtgcacagtaaattgaaggtggaaataccaaaaaaaaaatgaaattatgtatgtctttgtactcactttatattgctcaaaaaattacggaatctggatttcaatgcatatttttttttataattctcgtatcaaagttgctcgtgaagttaggcgtgttgatgacagttgcgattttggggtcgacacagagactatcagttcgtctgtctcagtatgtataaaaaagaataaaacacttatcttagtgagttattgacgtggcctttgttaaaactgtataaaaaaatatctaaattaaataaaccaaagtaggtcaagcattgacacgattgccatggtcataaaggtgataagtgtgtggttaaagtgatattgcacccgcgagaccaatggtaaaagtggcattatagcggtaaaaaatgaatatcttaactctcccccccaattattaccatagcatcaactgcataaagaaagcagagcaactatttagaatagctcgagacagagacagtttcgccatgttaatcgccaacgtcaaggggacttaatagggcacgttaagaagaagacgtatatgtaggattcgttaaagacaatcgtaataaaagtccgtgtgatgtttaacagttttaattaataaaatagataactaaattatagatactattaaattgacgaaatgtaaaagtgttcgtgtaattgcgaccaaaattttacgagttctcacaaaagaaaatgtctttgaaataatcgcgtttatctacttaatatatgactgggttgtcaatatattagtacgtcttaaacttcgcgtcctttcgattatcgccaaatacagcctctttcattcgaatctaaaaatcaactgcttcttgcaccccctacgctaaaacaaattctcttacatctaatctcccttttccgttttcccctgagaaccaacctattaaaattggatcaaagtatgtacagactttttccaataaacgaaaaccaataaaattagtcaagacggctactgtttatcttaaactccgattccagacgattcgcacatgtggcatatgtgtttgtatgcgtgagaccctttttcgtgcttgtaataataattaagaaaaaatatatacagtagacttaaaaatatgtataaggtaaaatatttacaactctacatatatatacaaagaattacacataaatattaattaaataatgcactgaacttctgcaagtggaattgacccccaaaaagagacaaatatgggaacaatatttggaaaatcgttttcacaatagacgacgcaaatattgaagtagtaaaacagctcacatacaggggcgtactgataactgaggacggcagcgaggggagggaatacggaaaagaataatgcttgcaaaatattctctctattcaaagacatccatagggaagtaaaaaaaaatataaaagcatcatacgaccaatagcaacagcaacatatggcttagaaaaatagatcatgtcagagaagacaataaacatcaatattttgaaacaaagatgttaagaaggatatcgggacccacctgcgacagtaattgtatgtggaggaataaggtttaaccacgaattgtatcaatattgcaaagaaccctccatagaaaattatgcaaaaatacaaagattgtactgggcaggtcaccttataaaaatgaaaaataaaagaacacctaatagaacgcttagcgtaactatggtaagatgacggtcagtaggaagacaaaggaagaggaagatagacgaagtgcaaaccgatcttaaagcgttaagagagagagatttggaggctcgtatttggtgattaaagaacgtctacaaatagacaaccaaaatgcaaataatttttagttcaattcataacacttgttaaaaaaaagacggtaacaccgattatataaaatataaaacaaggtttttgtcagtaatacattttgtttctcctagtatttaatacatattccagatcatccaaatggtactataataaataaaatcataaataataatgccgagtatgtggttaatactgttatattagctgaatcgaaagagaaaataacagctttaatagacgaactattaaaagaaaaccacaagataattttgaaatcaatatttcaaaaaaggaaaatgctgtgttcaatagcaccctccaaaaaaagggtagcctacatgtatttctatatggacagagcaaagtggaccactacaaagaaatttgagagaaattgaaatagcaagacctggtttatgaacatgagtaacatcgctgtcaccaaaaattttcattataataaaatttctaatgttacaatgctatgtaagaaacatgtacactgaaacaagaagacaaaagactaaacgtacctattcgaaattttcatagaaaccttaccataactatgataacatccagcctccgctaggagaaggaactttaacagtattctgtttcaaaactaaaatgtcaaaagttcctccaaaattgcctggttcttttaaaacggtagcaatattttgagatgtatattgcgtatacagcaccgtatctttatcttttacgattacgagtttatatctcgagacatatcttttacatgatgttccaaaagaatcaaaacgtgtgacatttagcccaaaacactaaaaaatatgtaaaatttcgtaaaaaaaaatacctaaaaaaacttgcatgtgcataagtgctaaaattatgtgttcaatgtggaattataacgtatatctgaggattattagcccttgacatatatttcttatgtatttatatacct

SEQ ID NO: 2191 - DNA, 4063 bp, Diabrotica virgifera
  SmartBlast Evalue=0; Info=Mitochondrial translation elongation factor Tu n=1 Tax=Glossina morsitans morsitans RepID=D3TM80_ GLOMM
gtctgattaaataacaaactccatgccggggttttaatgtaaaatatatttattataaagttaagaacttccactttctattcaaatatgacttcaattattgttgctagaactttagcaccagtggtgcaccgttcccttaaacagcttttttcaaaaggaactggtacaaaagtgaggaactactgtaaaacattacaactagcgacagttcaatacaaccaaaaacgattgtatgcagagaaaaaaagtatttgaaagaaccaaaccacattgtaatgtgggtactataggacatgtagatcatggtaagaccacacttactgcagctattaccaaagttttagctgaacaaaagttagcccaagcaagaggatatgcggatattgacaatgctccagaggaaaaagctagaggtattactattaatgtcgctcatattgagtatcaaacagaaaacagacattatggccacacagactgtcctggccatgctgattacatcaaaaacatgatcacaggagcagctcaaatgggatggtgccatcatgattgtagctgctactgatggtgtcatgccccaaaccagagaacatctattattagcaaaacaaattggtgtccatcacatcgtagtcttcatcaacaaagttgacgcagctgataaggaaatggttgagcttgtagaaatggaaattagggagttgttaacagaaatgggttttgatggagagaatattccaattattgctgggtctgccttatgtgctttagaaggaaagagtcctgaaataggctctgaagcaatcctaaaactattaaaagaagtagatgcctacatacctaccccagtaagagatttagacaaaccattcttgttacctgtagaacacacatattccatacctggaagaggcactgtagtaactggaagattggaaagaggcattttgaagaagggggctgaatgtgaatttgtaggatataacaaagttctgaaaagtacggttacaggtgtggagatgtttcatcaaattttggatgaagcccatgctggtgatcaacttggagctttagtgagaggattgaagagagatgacgttaaaagaggaatgattatggctaaacctggaacagtaaagagtcatgataatgttgaaactcaagtatatgttttaagtaaagaagaaggaggtcgtacaaaaccgttcacatctttcattcagctacagatgttctgcaggacctgggattgtcctgtgcaagtagttgtaccagacaaggaaatggtcatgccaggtgaagattccaagttagttttgaaaatgttgcggcccatggtacttgagcaaggtcagagattcacgttaagagatggttcacaaaccttaggaactggcgtagtaacgaaaaccttacctcgtctctcagatgccgaacgaaattccttaacagaaggcaagaaagccagagaaaagaaaatgggtgcaaccaagtagattgtaaatttttgtatattttgttaattaatgtttactatgccgaaaaaaacagaaaaatactgatatttctgtgtgagaatgttagaaggtttgttttaatagaaaaactaataggtatcattttttatttctatgtatttcaattttaatgtctcgttgttaacagctgactgtatattttatataggttttgaaagagcttcttatgagtttgtttttgaatggattggtttgcaacaaaatcataaatgcaaatattactagacactaattttatgatattatgttctagtagccactcttttttttttgttgtgtaataaaagctagaacataggctgtaaaaaaagtccaaggccagaaggaaattatttcctaaaccacattcaaatagcaaattctcaactataaacaaacgcacgtgttactattcaccgtatcattcgtcaagaggctgttaaatgtaatttattgccctaaatgaggcggattctcattttacaggtccaaactggtcagtctgcaaattcaaattgtaggtagcgtgttggtttttaagatacacttcaggacgaccctgtttagcttccatgcgcgtttgtttacagttgggaatctgtaaaatgaatggactgtagagactatgcgcggcccaaaaaaggacaactctaccttatcggtaaagtctacgagatgtgcacagtaaattgaaggtggaaataccaaaaaaaaaatgaaattatgtatgtctttgtactcactttatattgctcaaaaaattacggaatctggatttcaatgcatatttttttttataattctcgtatcaaagttgctcgtgaagttaggcgtgttgatgacagttgcgattttggggtcgacacagagactatcagttcgtctgtctcagtatgtataaaaaagaataaaacacttatcttagtgagttattgacgtggcctttgttaaaactgtataaaaaaatatctaaattaaataaaccaaagtaggtcaagcattgacacgattgccatggtcataaaggtgataagtgtgtggttaaagtgatattgcacccgcgagaccaatggtaaaagtggcattatagcggtaaaaaatgaatatcttaactctcccccccaattattaccatagcatcaactgcataaagaaagcagagcaactatttagaatagctcgagacagagacagtttcgccatgttaatcgccaacgtcaaggggacttaatagggcacgttaagaagaagacgtatatgtaggattcgttaaagacaatcgtaataaaagtccgtgtgatgtttaacagttttaattaataaaatagataactaaattatagatactattaaattgacgaaatgtaaaagtgttcgtgtaattgcgaccaaaattttacgagttctcacaaaagaaaatgtctttgaaataatcgcgtttatctacttaatatttgaccggcttgtcaatatataagtacgtattaaacttcgcgtcctttcgattattgccaaatacaacctctttcctcattcgaatctcaaaatcgactgcctctcgcacccctacgctaaataaaaatctcttgcatctaatctcccttttccgtttactcctgagaaccaaactattaaaagtggttcaaagttgcgaatgttattcttacttaattaggtcttaaagattcaaagttagaagtatttcgcaccggctaccgtagtaatcccaattcgttccacccatctgggccacgcgatgtaggtctatatgtgtgagactattattccgtgctcgtaattaagaaaaaatatatacagagtaagttaaaaatataaggtaaaatatttacaattttacatatatgtaacttgaaagatttagctactaacttcatactgtctgtgtgcgcgtagttcattcatactgtcgttctcataaaaattcactctcaacatttttcttaatcacgcctaaagaagtatcacttcaataaatctgactgacagtcagattctcttttacgtcgagccacattttaaaaatgtttcacataactatataagcggtatctgtatagactataaaaaaattatatgaacaatgaatgggcgataaaaaacgctgcagaagaagataatacaaattcgactggaacttcgtccaaacttacgtacaatttttcaacgatttccggaaaggaaatcaaaacgtcaaaataaacgtattataatcggaaattttcttaaaaaaatactacattatattaaaatgtcacaagaaaatagcttcaaaagaaaatatctgtcggcaatgaaggcttgctacaaagagacgactgtgatccaagaaatcaggttataagcatgtctaatttgccgagacaaagaaagtaatgtttttgattttttgcaaatcttaaaaaactgttacactttattatcatgaaaacttctcaattttaaaaggtttatcatcgccttttgcttctgcggtataaacttcatatgtatgtattaactatgtgcttcaagttaaaaaaaat

SEQ ID NO: 2192 - DNA, 3858 bp, Diabrotica virgifera
  SmartBlast Evalue=0; Info=Mitochondrial translation elongation factor Tu n=1 Tax=Glossina morsitans morsitans RepID=D3TM80_ GLOMM
gtctgattaaataacaaactccatgccggggttttaatgtaaaatatatttattataaagttaagaacttccactttctattcaaatatgacttcaattattgttgctagaactttagcaccagtggtgcaccgttcccttaaacagcttttttcaaaaggaactggtacaaaagtgaggaactactgtaaaacattacaactagcgacagttcaatacaaccaaaaacgattgtatgcagagaaaaaaagtatttgaaagaaccaaaccacattgtaatgtgggtactataggacatgtagatcatggtaagaccacacttactgcagctattaccaaagttttagctgaacaaaagttagcccaagcaagaggatatgcggatattgacaatgctccagaggaaaaagctagaggtattactattaatgtcgctcatattgagtatcaaacagaaaacagacattatggccacacagactgtcctggccatgctgattacatcaaaaacatgatcacaggagcagctcaaatgggatggtgccatcatgattgtagctgctactgatggtgtcatgccccaaaccagagaacatctattattagcaaaacaaattggtgtccatcacatcgtagtcttcatcaacaaagttgacgcagctgataaggaaatggttgagcttgtagaaatggaaattagggagttgttaacagaaatgggttttgatggagagaatattccaattattgctgggtctgccttatgtgctttagaaggaaagagtcctgaaataggctctgaagcaatcctaaaactattaaaagaagtagatgcctacatacctaccccagtaagagatttagacaaaccattcttgttacctgtagaacacacatattccatacctggaagaggcactgtagtaactggaagattggaaagaggcattttgaagaagggggctgaatgtgaatttgtaggatataacaaagttctgaaaagtacggttacaggtgtggagatgtttcatcaaattttggatgaagcccatgctggtgatcaacttggagctttagtgagaggattgaagagagatgacgttaaaagaggaatgattatggctaaacctggaacagtaaagagtcatgataatgttgaaactcaagtatatgttttaagtaaagaagaaggaggtcgtacaaaaccgttcacatctttcattcagctacagatgttctgcaggacctgggattgtcctgtgcaagtagttgtaccagacaaggaaatggtcatgccaggtgaagattccaagttagttttgaaaatgttgcggcccatggtacttgagcaaggtcagagattcacgttaagagatggttcacaaaccttaggaactggcgtagtaacgaaaaccttacctcgtctctcagatgccgaacgaaattccttaacagaaggcaagaaagccagagaaaagaaaatgggtgcaaccaagtagattgtaaatttttgtatattttgttaattaatgtttactatgccgaaaaaaacagaaaaatactgatatttctgtgtgagaatgttagaaggtttgttttaatagaaaaactaataggtatcattttttatttctatgtatttcaattttaatgtctcgttgttaacagctgactgtatattttatataggttttgaaagagcttcttatgagtttgtttttgaatggattggtttgcaacaaaatcataaatgcaaatattactagacactaattttatgatattatgttctagtagccactcttttttttttgttgtgtaataaaagctagaacataggctgtaaaaaaagtccaaggccagaaggaaattatttcctaaaccacattcaaatagcaaattctcaactataaacaaacgcacgtgttactattcaccgtatcattcgtcaagaggctgttaaatgtaatttattgccctaaatgaggcggattctcattttacaggtccaaactggtcagtctgcaaattcaaattgtaggtagcgtgttggtttttaagatacacttcaggacgaccctgtttagcttccatgcgcgtttgtttacagttgggaatctgtaaaatgaatggactgtagagactatgcgcggcccaaaaaaggacaactctaccttatcggtaaagtctacgagatgtgcacagtaaattgaaggtggaaataccaaaaaaaaaatgaaattatgtatgtctttgtactcactttatattgctcaaaaaattacggaatctggatttcaatgcatatttttttttataattctcgtatcaaagttgctcgtgaagttaggcgtgttgatgacagttgcgattttggggtcgacacagagactatcagttcgtctgtctcagtatgtataaaaaagaataaaacacttatcttagtgagttattgacgtggcctttgttaaaactgtataaaaaaatatctaaattaaataaaccaaagtaggtcaagcattgacacgattgccatggtcataaaggtgataagtgtgtggttaaagtgatattgcacccgcgagaccaatggtaaaagtggcattatagcggtaaaaaatgaatatcttaactctcccccccaattattaccatagcatcaactgcataaagaaagcagagcaactatttagaatagctcgagacagagacagtttcgccatgttaatcgccaacgtcaaggggacttaatagggcacgttaagaagaagacgtatatgtaggattcgttaaagacaatcgtaataaaagtccgtgtgatgtttaacagttttaattaataaaatagataactaaattatagatactattaaattgacgaaatgtaaaagtgttcgtgtaattgcgaccaaaattttacgagttctcacaaaagaaaatgtctttgaaataatcgcgtttatctacttaatatatgactgggttgtcaatatattagtacgtcttaaacttcgcgtcctttcgattatcgccaaatacagcctctttcattcgaatctaaaaatcaactgcttcttgcaccccctacgctaaaacaaattctcttacatctaatctcccttttccgttttcccctgagaaccaacctattaaaattggatcaaagtatgtacagactttttccaataaacgaaaaccaataaaattagtcaagacggctactgtttatcttaaactccgattccagacgattcgcacatgtggcataatatgtgttcgtatgcgtgagacccttttttcgtgctcgtaataataattagaaaaaatatatacagtagacttaaaaatataaggtaaaatatttacaattctacattattatgaaaataatattgtaaaatcttacttaccatttaaaaatatgtggtgaatttcaaaatatctcgataagccagttttatcgagatatgtattttgaaaatttgtaaaagccaccacatatttttaaatggttaagcaagatgatagagatctgataatattattgtaggattcgttaaagacaatcgtattaaaagtccgtgtgatgtttaacagttttaattaataaaatagataactaaattatagatactattaaattgacgaaatgtaaaagtgtttgtgtaattgcgaccaaaatttacgtgttcttataaaaagaaatgtattgggaaataattgcgtctaatcaatattataaccggcttatcataatattcgtcttaaagcgcctctttacttcttaaagcgtctctttctattctctcaaagaacacgtccgtctagatcctgatgttaaaatcgactgactctcgc

SEQ ID NO: 2193 - DNA, 3649 bp, Diabrotica virgifera
  SmartBlast Evalue=0; Info=Mitochondrial translation elongation factor Tu n=1 Tax=Glossina morsitans morsitans RepID=D3TM80_ GLOMM
gtctgattaaataacaaactccatgccggggttttaatgtaaaatatatttattataaagttaagaacttccactttctattcaaatatgacttcaattattgttgctagaactttagcaccagtggtgcaccgttcccttaaacagcttttttcaaaaggaactggtacaaaagtgaggaactactgtaaaacattacaactagcgacagttcaatacaaccaaaaacgattgtatgcagagaaaaaaagtatttgaaagaaccaaaccacattgtaatgtgggtactataggacatgtagatcatggtaagaccacacttactgcagctattaccaaagttttagctgaacaaaagttagcccaagcaagaggatatgcggatattgacaatgctccagaggaaaaagctagaggtattactattaatgtcgctcatattgagtatcaaacagaaaacagacattatggccacacagactgtcctggccatgctgattacatcaaaaacatgatcacaggagcagctcaaatgggatggtgccatcatgattgtagctgctactgatggtgtcatgccccaaaccagagaacatctattattagcaaaacaaattggtgtccatcacatcgtagtcttcatcaacaaagttgacgcagctgataaggaaatggttgagcttgtagaaatggaaattagggagttgttaacagaaatgggttttgatggagagaatattccaattattgctgggtctgccttatgtgctttagaaggaaagagtcctgaaataggctctgaagcaatcctaaaactattaaaagaagtagatgcctacatacctaccccagtaagagatttagacaaaccattcttgttacctgtagaacacacatattccatacctggaagaggcactgtagtaactggaagattggaaagaggcattttgaagaagggggctgaatgtgaatttgtaggatataacaaagttctgaaaagtacggttacaggtgtggagatgtttcatcaaattttggatgaagcccatgctggtgatcaacttggagctttagtgagaggattgaagagagatgacgttaaaagaggaatgattatggctaaacctggaacagtaaagagtcatgataatgttgaaactcaagtatatgttttaagtaaagaagaaggaggtcgtacaaaaccgttcacatctttcattcagctacagatgttctgcaggacctgggattgtcctgtgcaagtagttgtaccagacaaggaaatggtcatgccaggtgaagattccaagttagttttgaaaatgttgcggcccatggtacttgagcaaggtcagagattcacgttaagagatggttcacaaaccttaggaactggcgtagtaacgaaaaccttacctcgtctctcagatgccgaacgaaattccttaacagaaggcaagaaagccagagaaaagaaaatgggtgcaaccaagtagattgtaaatttttgtatattttgttaattaatgtttactatgccgaaaaaaacagaaaaatactgatatttctgtgtgagaatgttagaaggtttgttttaatagaaaaactaataggtatcattttttatttctatgtatttcaattttaatgtctcgttgttaacagctgactgtatattttatataggttttgaaagagcttcttatgagtttgtttttgaatggattggtttgcaacaaaatcataaatgcaaatattactagacactaattttatgatattatgttctagtagccactcttttttttttgttgtgtaataaaagctagaacataggctgtaaaaaaagtccaaggccagaaggaaattatttcctaaaccacattcaaatagcaaattctcaactataaacaaacgcacgtgttactattcaccgtatcattcgtcaagaggctgttaaatgtaatttattgccctaaatgaggcggattctcattttacaggtccaaactggtcagtctgcaaattcaaattgtaggtagcgtgttggtttttaagatacacttcaggacgaccctgtttagcttccatgcgcgtttgtttacagttgggaatctgtaaaatgaatggactgtagagactatgcgcggcccaaaaaaggacaactctaccttatcggtaaagtctacgagatgtgcacagtaaattgaaggtggaaataccaaaaaaaaaatgaaattatgtatgtctttgtactcactttatattgctcaaaaaattacggaatctggatttcaatgcatatttttttttataattctcgtatcaaagttgctcgtgaagttaggcgtgttgatgacagttgcgattttggggtcgacacagagactatcagttcgtctgtctcagtatgtataaaaaagaataaaacacttatcttagtgagttattgacgtggcctttgttaaaactgtataaaaaaatatctaaattaaataaaccaaagtaggtcaagcattgacacgattgccatggtcataaaggtgataagtgtgtggttaaagtgatattgcacccgcgagaccaatggtaaaagtggcattatagcggtaaaaaatgaatatcttaactctcccccccaattattaccatagcatcaactgcataaagaaagcagagcaactatttagaatagctcgagacagagacagtttcgccatgttaatcgccaacgtcaaggggacttaatagggcacgttaagaagaagacgtatatgtaggattcgttaaagacaatcgtaataaaagtccgtgtgatgtttaacagttttaattaataaaatagataactaaattatagatactattaaattgacgaaatgtaaaagtgttcgtgtaattgcgaccaaaattttacgagttctcacaaaagaaaatgtctttgaaataatcgcgtttatctacttaatatatgactgggttgtcaatatattagtacgtcttaaacttcgcgtcctttcgattatcgccaaatacagcctctttcattcgaatctaaaaatcaactgcttcttgcaccccctacgctaaaacaaattctcttacatctaatctcccttttccgttttcccctgagaaccaacctattaaaattggatcaaagtatgtacagactttttccaataaacgaaaaccaataaaattagtcaagacggctactgtttatcttaaactccgattccagacgattcgcacatgtggcataatatgtgttcgtatgcgtgagacccttttttcgtgctcgtaataataattagaaaaaatatatacagtagacttaaaaatataaggtaaaatatttacaattctacattattatgaaaataatattgtaaaatcttacttaccatttaaaaatatgtggtgaatttcaaaatatctcgataacaacaactggtatatcgaagacgtactgggaggcaaaaaaggttttaaaaacattgtgattaactaaggctaccacaataatgatttatttggaacgtatagaaatattcgatgggtttaagggagcaaaacgccataaattattatgtggtgcacgggtttcactgttgttttgggatgttcctgtcatcagagtgtc

SEQ ID NO: 2194 - DNA, 3524 bp, Diabrotica virgifera
  SmartBlast Evalue=0.000000009; Info=Endonuclease-reverse transcriptase n=1 Tax=Bombyx mori RepID=D7F170_BOMMO
gacgaaaaaagcaccatctgcattccacttagaatagtagatgaatatctgaaacgctaatttatggtaagaatctataactctttcttttgtagaacatcacccttgtatcgagtataacattgcgtagataggactgcgtatttcttatggacgatagaagcgcgccgatgccgcttctatcgtatcgagaatgaatcttatattggcaaactagtagcaacacctgctggagagttttggcaacactgatctgcataagtcaaacgttccattcttaacgtgaaataaagaatagtaccactatatcgtcacattttctcattgaatacttttactgttgactgtatttgcccattttgttataaatatttttccaataaataatgttgttgattgtaattttgttagttgtgcgactgtttaataacgtcttagtggattgcctagtgcacactgtgcttgttggcagtagaggattaaattttatgtggaggctgttgtgtggcaaaatatggattaagtatatattagattatgtagcaaattgtataacgtatcattgtttttgataaattatttaaccaaaatcgaaatagtgcgagtaatatttctgcaaggagcatctagtataatacaactgtacataatgtttcgttttgttaaaggaaatgcaaaatgtttcttttgtatatatatgttaatgagaatcttgaaattctaccttttatatttattctaatactaggtaggctatgaaactctaagcgatattataaaaaacgctaagagcgattgttggagaagaatgatttataccagtcatagtaaatttttgagctttttcaaatataaagctccgcaattttcaagaactaatttaaataaattcttgaggcatacgaacctacatttaaatgatttttctccatggttttaaatatatccaacttgattaaggacttgttatcctcagatttagttatcatggtgaattagaatatagatgctttggaatcacacgtaagttccttaactgatacatctctgtcacgatctcagactacaataaaattggtagtatcaattacaaataattgcggtttagactcggctttgtgactgcgattgtgatttaggctatggaggacattagttgattagttttcacttcggtatgggaaaaaaattcataaatataaaagtttctacaaggttaccgtttatcttttatccgttttaaaagatttgcaagtgaaatatatgtaggtttagttaaagacaatcgtaataaaagtccgtgtgatgtttaacagttttaattaataaaatagataactaaattatagatactattaaattgacgaaatgtaaaagtgtttgtgtaattgcgaccaaaattttacgagttctcacaaaagaaaatgtctttgaaataatcgcgtttatctacttaatatatgactgggttgtcaatatattagtacgtcttaaacttcgcgtcctttcgattatcgccaaatacagcctctttcattcgaatctaaaaatcaactgcttcttgcaccccctacgctaaaacaaattctcttacatctaatctcccttttccgttttcccctgagaaccaacctattaaaattggatcaaagtatgtacagactttttccaataaacgaaaaccaataaaattagtcaagacggctactgtttatcttaaactccgattccagacgattcgcacatgtggcatatgtgtttgtatgcgtgagaccctttttcgtgcttgtaataataattaagaaaaaatatatacagtagacttaaaaatatgtataaggtaaaatatttacaactctacatatatatacaaagaattacacataaatattaattaaataatgcactgaacttctgcaagtggaattgacccccaaaaagagacaaatatgggaacaatatttggaaaatcgttttcacaatagacgacgcaaatattgaagtagtaaaacagctcacatacaggggcgtactgataactgaggacggcagcgaggggagggaatacggaaaagaataatgcttgcaaaatattctctctattcaaagacatccatagggaagtaaaaaaaaatataaaagcatcatacgaccaatagcaacagcaacatatggcttagaaaaatagatcatgtcagagaagacaataaacatcaatattttgaaacaaagatgttaagaaggatatcgggacccacctgcgacagtaattgtatgtggaggaataaggtttaaccacgaattgtatcaatattgcaaagaaccctccatagaaaattatgcaaaaatacaaagattgtactgggcaggtcaccttataaaaatgaaaaataaaagaacacctaatagaacgcttagcgtaactatggtaagatgacggtcagtaggaagacaaaggaagaggaagatagacgaagtgcaaaccgatcttaaagcgttaagagagagagatttggaggctcgtatttggtgattaaagaacgtctacaaatagacaaccaaaatgcaaataatttttagttcaattcataacacttgttaaaaaaaagacggtaacaccgattatataaaatataaaacaaggtttttgtcagtaatacattttgtttctcctagtatttaatacatattccagatcatccaaatggtactataataaataaaatcataaataataatgccgagtatgtggttaatactgttatattagctgaatcgaaagagaaaataacagctttaatagacgaactattaaaagaaaaccacaagataattttgaaatcaatatttcaaaaaaggaaaatgctgtgttcaatagcaccctccaaaaaaagggtagcctacatgtatttctatatggacagagcaaagtggaccactacaaagaaatttgagagaaattgaaatagcaagacctggtttatgaacatgagtaacatcgctgtcaccaaaaattttcattataataaaatttctaatgttacaatgctatgtaagaaacatgtacactgaaacaagaagacaaaagactaaacgtacctattcgaaattttcatagaaaccttaccataactatgataacatccagcctccgctaggagaaggaactttaacagtattctgtttcaaaactaaaatgtcaaaagttcctccaaaattgcctggttcttttaaaacggtagcaatattttgagatgtatattgcgtatacagcaccgtatctttatcttttacgattacgagtttatatctcgagacatatcttttacatgatgttccaaaagaatcaaaacgtgtgacatttagcccaaaacactaaaaaatatgtaaaatttcgtaaaaaaaaatacctaaaaaaacttgcatgtgcataagtgctaaaattatgtgttcaatgtggaattataacgtatatctgaggattattagcccttgacatatatttcttatgtatttatatacct

SEQ ID NO: 2195 - DNA, 2549 bp, Diabrotica virgifera
gacgaaaaaagcaccatctgcattccacttagaatagtagatgaatatctgaaacgctaatttatggtaagaatctataactctttcttttgtagaacatcacccttgtatcgagtataacattgcgtagataggactgcgtatttcttatggacgatagaagcgcgccgatgccgcttctatcgtatcgagaatgaatcttatattggcaaactagtagcaacacctgctggagagttttggcaacactgatctgcataagtcaaacgttccattcttaacgtgaaataaagaatagtaccactatatcgtcacattttctcattgaatacttttactgttgactgtatttgcccattttgttataaatatttttccaataaataatgttgttgattgtaattttgttagttgtgcgactgtttaataacgtcttagtggattgcctagtgcacactgtgcttgttggcagtagaggattaaattttatgtggaggctgttgtgtggcaaaatatggattaagtatatattagattatgtagcaaattgtataacgtatcattgtttttgataaattatttaaccaaaatcgaaatagtgcgagtaatatttctgcaaggagcatctagtataatacaactgtacataatgtttcgttttgttaaaggaaatgcaaaatgtttcttttgtatatatatgttaatgagaatcttgaaattctaccttttatatttattctaatactaggtaggctatgaaactctaagcgatattataaaaaacgctaagagcgattgttggagaagaatgatttataccagtcatagtaaatttttgagctttttcaaatataaagctccgcaattttcaagaactaatttaaataaattcttgaggcatacgaacctacatttaaatgatttttctccatggttttaaatatatccaacttgattaaggacttgttatcctcagatttagttatcatggtgaattagaatatagatgctttggaatcacacgtaagttccttaactgatacatctctgtcacgatctcagactacaataaaattggtagtatcaattacaaataattgcggtttagactcggctttgtgactgcgattgtgatttaggctatggaggacattagttgattagttttcacttcggtatgggaaaaaaattcataaatataaaagtttctacaaggttaccgtttatcttttatccgttttaaaagatttgcaagtgaaatatatgtaggtttagttaaagacaatcgtaataaaagtccgtgtgatgtttaacagttttaattaataaaatagataactaaattatagatactattaaattgacgaaatgtaaaagtgtttgtgtaattgcgaccaaaattttacgagttctcacaaaagaaaatgtctttgaaataatcgcgtttatctacttaatatttgaccggcttgtcaatatataagtacgtattaaacttcgcgtcctttcgattattgccaaatacaacctctttcctcattcgaatctcaaaatcgactgcctctcgcacccctacgctaaataaaaatctcttgcatctaatctcccttttccgtttactcctgagaaccaaactattaaaagtggttcaaagttgcgaatgttattcttacttaattaggtcttaaagattcaaagttagaagtatttcgcaccggctaccgtagtaatcccaattcgttccacccatctgggccacgcgatgtaggtctatatgtgtgagactattattccgtgctcgtaattaagaaaaaatatatacagagtaagttaaaaatataaggtaaaatatttacaattttacatatatgtaacttgaaagatttagctactaacttcatactgtctgtgtgcgcgtagttcattcatactgtcgttctcataaaaattcactctcaacatttttcttaatcacgcctaaagaagtatcacttcaataaatctgactgacagtcagattctcttttacgtcgagccacattttaaaaatgtttcacataactatataagcggtatctgtatagactataaaaaaattatatgaacaatgaatgggcgataaaaaacgctgcagaagaagataatacaaattcgactggaacttcgtccaaacttacgtacaatttttcaacgatttccggaaaggaaatcaaaacgtcaaaataaacgtattataatcggaaattttcttaaaaaaatactacattatattaaaatgtcacaagaaaatagcttcaaaagaaaatatctgtcggcaatgaaggcttgctacaaagagacgactgtgatccaagaaatcaggttataagcatgtctaatttgccgagacaaagaaagtaatgtttttgattttttgcaaatcttaaaaaactgttacactttattatcatgaaaacttctcaattttaaaaggtttatcatcgccttttgcttctgcggtataaacttcatatgtatgtattaactatgtgcttcaagttaaaaaaaat

SEQ ID NO: 2196 - DNA, 2344 bp, Diabrotica virgifera
gacgaaaaaagcaccatctgcattccacttagaatagtagatgaatatctgaaacgctaatttatggtaagaatctataactctttcttttgtagaacatcacccttgtatcgagtataacattgcgtagataggactgcgtatttcttatggacgatagaagcgcgccgatgccgcttctatcgtatcgagaatgaatcttatattggcaaactagtagcaacacctgctggagagttttggcaacactgatctgcataagtcaaacgttccattcttaacgtgaaataaagaatagtaccactatatcgtcacattttctcattgaatacttttactgttgactgtatttgcccattttgttataaatatttttccaataaataatgttgttgattgtaattttgttagttgtgcgactgtttaataacgtcttagtggattgcctagtgcacactgtgcttgttggcagtagaggattaaattttatgtggaggctgttgtgtggcaaaatatggattaagtatatattagattatgtagcaaattgtataacgtatcattgtttttgataaattatttaaccaaaatcgaaatagtgcgagtaatatttctgcaaggagcatctagtataatacaactgtacataatgtttcgttttgttaaaggaaatgcaaaatgtttcttttgtatatatatgttaatgagaatcttgaaattctaccttttatatttattctaatactaggtaggctatgaaactctaagcgatattataaaaaacgctaagagcgattgttggagaagaatgatttataccagtcatagtaaatttttgagctttttcaaatataaagctccgcaattttcaagaactaatttaaataaattcttgaggcatacgaacctacatttaaatgatttttctccatggttttaaatatatccaacttgattaaggacttgttatcctcagatttagttatcatggtgaattagaatatagatgctttggaatcacacgtaagttccttaactgatacatctctgtcacgatctcagactacaataaaattggtagtatcaattacaaataattgcggtttagactcggctttgtgactgcgattgtgatttaggctatggaggacattagttgattagttttcacttcggtatgggaaaaaaattcataaatataaaagtttctacaaggttaccgtttatcttttatccgttttaaaagatttgcaagtgaaatatatgtaggtttagttaaagacaatcgtaataaaagtccgtgtgatgtttaacagttttaattaataaaatagataactaaattatagatactattaaattgacgaaatgtaaaagtgtttgtgtaattgcgaccaaaattttacgagttctcacaaaagaaaatgtctttgaaataatcgcgtttatctacttaatatatgactgggttgtcaatatattagtacgtcttaaacttcgcgtcctttcgattatcgccaaatacagcctctttcattcgaatctaaaaatcaactgcttcttgcaccccctacgctaaaacaaattctcttacatctaatctcccttttccgttttcccctgagaaccaacctattaaaattggatcaaagtatgtacagactttttccaataaacgaaaaccaataaaattagtcaagacggctactgtttatcttaaactccgattccagacgattcgcacatgtggcataatatgtgttcgtatgcgtgagacccttttttcgtgctcgtaataataattagaaaaaatatatacagtagacttaaaaatataaggtaaaatatttacaattctacattattatgaaaataatattgtaaaatcttacttaccatttaaaaatatgtggtgaatttcaaaatatctcgataagccagttttatcgagatatgtattttgaaaatttgtaaaagccaccacatatttttaaatggttaagcaagatgatagagatctgataatattattgtaggattcgttaaagacaatcgtattaaaagtccgtgtgatgtttaacagttttaattaataaaatagataactaaattatagatactattaaattgacgaaatgtaaaagtgtttgtgtaattgcgaccaaaatttacgtgttcttataaaaagaaatgtattgggaaataattgcgtctaatcaatattataaccggcttatcataatattcgtcttaaagcgcctctttacttcttaaagcgtctctttctattctctcaaagaacacgtccgtctagatcctgatgttaaaatcgactgactctcgc

SEQ ID NO: 2197 - DNA, 2135 bp, Diabrotica virgifera
gacgaaaaaagcaccatctgcattccacttagaatagtagatgaatatctgaaacgctaatttatggtaagaatctataactctttcttttgtagaacatcacccttgtatcgagtataacattgcgtagataggactgcgtatttcttatggacgatagaagcgcgccgatgccgcttctatcgtatcgagaatgaatcttatattggcaaactagtagcaacacctgctggagagttttggcaacactgatctgcataagtcaaacgttccattcttaacgtgaaataaagaatagtaccactatatcgtcacattttctcattgaatacttttactgttgactgtatttgcccattttgttataaatatttttccaataaataatgttgttgattgtaattttgttagttgtgcgactgtttaataacgtcttagtggattgcctagtgcacactgtgcttgttggcagtagaggattaaattttatgtggaggctgttgtgtggcaaaatatggattaagtatatattagattatgtagcaaattgtataacgtatcattgtttttgataaattatttaaccaaaatcgaaatagtgcgagtaatatttctgcaaggagcatctagtataatacaactgtacataatgtttcgttttgttaaaggaaatgcaaaatgtttcttttgtatatatatgttaatgagaatcttgaaattctaccttttatatttattctaatactaggtaggctatgaaactctaagcgatattataaaaaacgctaagagcgattgttggagaagaatgatttataccagtcatagtaaatttttgagctttttcaaatataaagctccgcaattttcaagaactaatttaaataaattcttgaggcatacgaacctacatttaaatgatttttctccatggttttaaatatatccaacttgattaaggacttgttatcctcagatttagttatcatggtgaattagaatatagatgctttggaatcacacgtaagttccttaactgatacatctctgtcacgatctcagactacaataaaattggtagtatcaattacaaataattgcggtttagactcggctttgtgactgcgattgtgatttaggctatggaggacattagttgattagttttcacttcggtatgggaaaaaaattcataaatataaaagtttctacaaggttaccgtttatcttttatccgttttaaaagatttgcaagtgaaatatatgtaggtttagttaaagacaatcgtaataaaagtccgtgtgatgtttaacagttttaattaataaaatagataactaaattatagatactattaaattgacgaaatgtaaaagtgtttgtgtaattgcgaccaaaattttacgagttctcacaaaagaaaatgtctttgaaataatcgcgtttatctacttaatatatgactgggttgtcaatatattagtacgtcttaaacttcgcgtcctttcgattatcgccaaatacagcctctttcattcgaatctaaaaatcaactgcttcttgcaccccctacgctaaaacaaattctcttacatctaatctcccttttccgttttcccctgagaaccaacctattaaaattggatcaaagtatgtacagactttttccaataaacgaaaaccaataaaattagtcaagacggctactgtttatcttaaactccgattccagacgattcgcacatgtggcataatatgtgttcgtatgcgtgagacccttttttcgtgctcgtaataataattagaaaaaatatatacagtagacttaaaaatataaggtaaaatatttacaattctacattattatgaaaataatattgtaaaatcttacttaccatttaaaaatatgtggtgaatttcaaaatatctcgataacaacaactggtatatcgaagacgtactgggaggcaaaaaaggttttaaaaacattgtgattaactaaggctaccacaataatgatttatttggaacgtatagaaatattcgatgggtttaagggagcaaaacgccataaattattatgtggtgcacgggtttcactgttgttttgggatgttcctgtcatcagagtgtc

SEQ ID NO: 2198 - DNA, 3578 bp, Diabrotica virgifera
  SmartBlast Evalue=0; Info=Calcium-binding mitochondrial carrier protein Aralar1 n=1 Tax=Harpegnathos saltator RepID=E2C9H0_9HYME
ggattcattcctgcctggtcctgtttttcattcctcaactattttgcgccacataatcttcatgggtcttgttgtgtcttaacattgacatgcatttaaactttttggccagcagttctaatgtttgcagaaaaccatataaatatttatttacaaatttacggaatccacatttggtccttcgagccggatgctgataattagtacccataataattggaaaaattgtgttcattaataccacgcgtggttgagaaccccgatagaagtttgttttggattggagacgatagctaaccgctagaaacacgtcttgcaaggcatggttctttctattctctttgtgtggatcaatataatatgtataatttgttgttagatgagatattctttcgtttagacttactctatggagatattagataaaaaagtaatttctaatatgtggggtgaatggcaacacggtaaatattatgttccaccccacatatctcaaattcatgacgtgaacagtaataattgttgttaacaaaaaaagttaacagataaatcaaaatatcatcatgttatattgttgtaaaggttagaataaacaaaaaacaatacttttcaaactattttgacagacattttgtaattactgagaaagttttttaggatgagaaatatcctcaaaattaacgactttgtttgaacaccgagaacataggaactagtgacgccaacaacacaaacctaaatttcctaaagccatatcacgttagtcaacttgaaaaaaattaaatagcccaacgaaagtaatatatatgtttaggaagattattgtaattgtttagtgaagttttgttcctattcaccccactgttcctattcaccccattttacggtatataaaattaaatatacaattatctaaataaataacaacacagactaaaatcactaattaatttaacaaataaacgcgaaaacaaccataatattgccaaagtgcaagcgtcaagacaaattacgatgtcgaaatgtgatctcgacaggacttgtgtagtcgaaatcaatttctacccgatagtagaggtcgagatgagttacagaataccaattcctataaattccgatctgacttgctcacctctattcgatttgacttatttctattttatttgtagttacagaataggtctgaatatgagtacactatgcataattaaaatggcttttcatatcttaatttacaatctcttaatccaaatatgtctattaccgatatataaaaatatactataaaaatgcaatagatttgtttgttgattacgaaacaagcgaactaacaattctgaagcagcgataacaacaaaaagatttttttaaaacctatttcgggactaacaaaaatatttctttaggatttttgtggtaccgaaaatttgggtaagcaaagtccgaatttgctttcgattcctgagaagattggaagggatactgagtatccaccgacgtgatctggattggcaggtttctttgtatctcctatcgttgatatctgttttagttcggatcccgatgggcgagttcctccaaagtcgacataaagatatctttggagcaattcatatgtgactagggtaacaccaaattgtggggaagacctcatgacacgagctgtagttcctttccagagcgcactaaatccttcttccttatatatttttctagcagcatccaatagcccattgtaggtcgtttgtcctgatctagcaacgacttgcagcctagttttaattacatcagcaggagttactagggctgctgcaggcataccagctatcataccagccgagagaagtgtcaatggactgttgtatccattttcgtcggcgaatttagccttagtgtgtgcgtagactgggaagtagataccgctgaaaggtatatcacggaggaaacacgcccttgcacctttgtaaagtcctaggaaacctaagtctttaactactgtccatgcccgtacttttgcccctccagcaatttcaccagcaacttgaagtctgattttcactatttccagagggttggtaaatacgacttgtgaaccaccggcacaacaaccagccagtatttcactccatattggaagattaccatttttgtccataagtttgtccctgaccaaatcatttaccgtcaatttaatagctttttctggggcgactcctagtagttgaggtaccagtcccctgtacaatccaaatacaccttcgtgtctaataacctttttgaagcaatcaaaactgtttcggtacatcaactctccaataaaggagcctgctctctgattttgcatacgtgttttaaccaaatctatggggtatactgcagtagcaccaacggcaccagcaatcgaacccaatgcaaatctgtaagtactttctaaaatttgaataacaactcctctatcttccgggctcgaaacagcgtggatttcggccaatcgattcgtaatttgcttaaagtattgctcgggtgcaatggcgtataaatcgttatacacgatcctccctgtttgatgaagaacgtcacacaattggaacaatatgtcgacttctaagggcgtcatttgtgacatagcctgggctgaatgcataaattcctccttgctgacttcttgtgttctatgaccgttggtgacattaaggtaaatgcgtttgaccaattccatattatttaataaggagttaaatgcaataaaatatggaaaacttactcggctgcctccttgtgatattgtcgctgcctcgattagatgcgactgaacttgtttggttaataggtgactttttatactggtcataatttcttggaaggccgagagggaaataaacccgctgccatttgtatctgcccttctaaaaccttcgattgcgtactcttcatggaagtcgtgaagaaactgcgaaaattcgttgtaggatactacgcggctcttgtctttaccgaaatacagctggatgaacggtgaatccatgttgaaaggaatcttcctgtgcagttcagttttcttcattacctcaacgaattcactgaaactaaccatgccatttccattagtatcgaataattgaaaagctgttttatacagagcatccgggaaacataggagtccctcgaatgcttgaaattctgggtaagaaatgagtccatctttgctggtatcaacgattgctgccaacaactttactgtatccttgttgtagttttggtcgtccaagagttttaaatattttataacgaaatcttcagcggtcataaacttctcgccatttttgttcacagtggcgtatctgttgaatatttcgtgtaaactaccctcatttgctcttcgtaaaaatccaccgccctcttgacaatttactttcttaaacaggttgaatttgtccattacagtccaaactattaaacactcccttaaaagtttaagatcaaatttaatacacggaaacaaaaattagcggatcttgttttcttattttattttattttaatcattacacacaccatgcgagtaaggttacgcgggt

SEQ ID NO: 2199 - DNA, 3526 bp, Diabrotica virgifera
  SmartBlast Evalue=0; Info=Calcium-binding mitochondrial carrier protein Aralar1 n=1 Tax=Harpegnathos saltator RepID=E2C9H0_9HYME
gcgccacatatcatcatggttcttgttgcgtcttgacatacatttaaactttttggacagcagttctgattattgcagaaacccgtataaatatttatttcaaatttacggaatccacatttggtccttcgagccggatgctgataatgagtgcccataataattggaaaaattgtgttcattaataccacacgtggtttagaaccctggtagaagttggttttggattggagatgatagctaaccgctagaaacacgttttgcaaggcatggttctttctattctctttgtgtggatcaatataatatgtataatttgttgttagatgagatattgtttcgtttggtcttactctatggagatattagataaaaaaagtaatttctaatatgtggggtgaatggcaacacggtaaatattatgttccaccccacatatctcaaattcatgacgtgaacagtaataattgttgttaacaaaaaaagttaacagataaatcaaaatatcatcatgttatattgttgtaaaggttagaataaacaaaaaacaatacttttcaaactattttgacagacattttgtaattactgagaaagttttttaggatgagaaatatcctcaaaattaacgactttgtttgaacaccgagaacataggaactagtgacgccaacaacacaaacctaaatttcctaaagccatatcacgttagtcaacttgaaaaaaattaaatagcccaacgaaagtaatatatatgtttaggaagattattgtaattgtttagtgaagttttgttcctattcaccccactgttcctattcaccccattttacggtatataaaattaaatatacaattatctaaataaataacaacacagactaaaatcactaattaatttaacaaataaacgcgaaaacaaccataatattgccaaagtgcaagcgtcaagacaaattacgatgtcgaaatgtgatctcgacaggacttgtgtagtcgaaatcaatttctacccgatagtagaggtcgagatgagttacagaataccaattcctataaattccgatctgacttgctcacctctattcgatttgacttatttctattttatttgtagttacagaataggtctgaatatgagtacactatgcataattaaaatggcttttcatatcttaatttacaatctcttaatccaaatatgtctattaccgatatataaaaatatactataaaaatgcaatagatttgtttgttgattacgaaacaagcgaactaacaattctgaagcagcgataacaacaaaaagatttttttaaaacctatttcgggactaacaaaaatatttctttaggatttttgtggtaccgaaaatttgggtaagcaaagtccgaatttgctttcgattcctgagaagattggaagggatactgagtatccaccgacgtgatctggattggcaggtttctttgtatctcctatcgttgatatctgttttagttcggatcccgatgggcgagttcctccaaagtcgacataaagatatctttggagcaattcatatgtgactagggtaacaccaaattgtggggaagacctcatgacacgagctgtagttcctttccagagcgcactaaatccttcttccttatatatttttctagcagcatccaatagcccattgtaggtcgtttgtcctgatctagcaacgacttgcagcctagttttaattacatcagcaggagttactagggctgctgcaggcataccagctatcataccagccgagagaagtgtcaatggactgttgtatccattttcgtcggcgaatttagccttagtgtgtgcgtagactgggaagtagataccgctgaaaggtatatcacggaggaaacacgcccttgcacctttgtaaagtcctaggaaacctaagtctttaactactgtccatgcccgtacttttgcccctccagcaatttcaccagcaacttgaagtctgattttcactatttccagagggttggtaaatacgacttgtgaaccaccggcacaacaaccagccagtatttcactccatattggaagattaccatttttgtccataagtttgtccctgaccaaatcatttaccgtcaatttaatagctttttctggggcgactcctagtagttgaggtaccagtcccctgtacaatccaaatacaccttcgtgtctaataacctttttgaagcaatcaaaactgtttcggtacatcaactctccaataaaggagcctgctctctgattttgcatacgtgttttaaccaaatctatggggtatactgcagtagcaccaacggcaccagcaatcgaacccaatgcaaatctgtaagtactttctaaaatttgaataacaactcctctatcttccgggctcgaaacagcgtggatttcggccaatcgattcgtaatttgcttaaagtattgctcgggtgcaatggcgtataaatcgttatacacgatcctccctgtttgatgaagaacgtcacacaattggaacaatatgtcgacttctaagggcgtcatttgtgacatagcctgggctgaatgcataaattcctccttgctgacttcttgtgttctatgaccgttggtgacattaaggtaaatgcgtttgaccaattccatattatttaataaggagttaaatgcaataaaatatggaaaacttactcggctgcctccttgtgatattgtcgctgcctcgattagatgcgactgaacttgtttggttaataggtgactttttatactggtcataatttcttggaaggccgagagggaaataaacccgctgccatttgtatctgcccttctaaaaccttcgattgcgtactcttcatggaagtcgtgaagaaactgcgaaaattcgttgtaggatactacgcggctcttgtctttaccgaaatacagctggatgaacggtgaatccatgttgaaaggaatcttcctgtgcagttcagttttcttcattacctcaacgaattcactgaaactaaccatgccatttccattagtatcgaataattgaaaagctgttttatacagagcatccgggaaacataggagtccctcgaatgcttgaaattctgggtaagaaatgagtccatctttgctggtatcaacgattgctgccaacaactttactgtatccttgttgtagttttggtcgtccaagagttttaaatattttataacgaaatcttcagcggtcataaacttctcgccatttttgttcacagtggcgtatctgttgaatatttcgtgtaaactaccctcatttgctcttcgtaaaaatccaccgccctcttgacaatttactttcttaaacaggttgaatttgtccattacagtccaaactattaaacactcccttaaaagtttaagatcaaatttaatacacggaaacaaaaattagcggatcttgttttcttattttattttattttaatcattacacacaccatgcgagtaaggttacgcgggt

SEQ ID NO: 2200 - DNA, 3014 bp, Diabrotica virgifera
cttctctccttttttccggtgtgtaagtaacttctctagttctccagtaggtacacttaaaattttcagaggtcattttaaatacctgaaatttattattcttttttgaactggaaataactttcacccaatcgtttggcgaaaaaatgtctttaaaatatcgtttttgtttttcgatcattccaaagtctctgtcacattggcaaatatgagtgaccgtagtgtaaaatgcaagaaccaatttcttgtgggccatgtgaggctatgccttcatgccatgtgtatctgacctgtcgttagatggtggatgccaaaacaatacatccacagctgtcttgtaataagccactcccgtagaaatactaggagtagctaaagttttcatcaaatcaaatgtaattactgttgcgacatctttatccttggctgcatcttcctttactcaacttcaagctacttctgccttccgtagtcaactctttttctgtttccattctgcttttttctacacctacacagctttttattttcatgttataagcgtcacatcgtttgcaagtgtcagtaagaggataacgaaaatgaagattaaaatcttcattaaatattttcgaaaatacgaatttggataccttcacttttggttcttcactttgcacatacaaatcaaaaagttttgagatatttaaatcaggtgacagatactctcgattaggatttttgttacagctattcgctgtgaaccgataagtagaggggatttgacagttttctcgccagcgctgttagtggcagttttgtgtattgaatttgaacaattttatcagaaaagtacaagtttcaaatcgcgagagagcgctaccgacgaaactcacagccaataaaaacagaggtaacctctaaatttcacataaacttcttctttttctcaatggcctcttgcgtaagcagtcatccagtcgcacgaatttatatattaaatattaaaattataatgaataaaataaaaaaacataattacttttactattaattctgtgtattcgttcagtaatcaggttacaataatatttcagttcataatccatgtttttttagataaatatctatttttctcgttttgtatatttcacaaacaccaattttatcagaaaaatacaagtttcaaaccgcgaaagagcgctaccgtcgaaactcatagccaaaaaagaaattgtgataaagaacacggcatataataagtgttttctatcttgtgcttgtgcaaacaggggaggcctatgtccagcagtggattgagaggctgatgatgatgatgatataataagtgacatatgacactgacagttgacagacaatatcagcgtctctatattgaaagagaatgtttctagtaacaattgttaagtgtcacagtgaacacggtttaatattttttattttaaaagaaggtctttcaattaaaaatcacaatctttactgaactgaaataccatacctgacatattgaaagagtacctttctaatagagtatttttcttgctaattggtctttaccaaagccatcaaattaaataaaaaaatagggtatttttaaaagtcaaagtttccatcctaataaaaatatttaaaaatgtttttaaaagatatttaattgaaaacttattggaccattttgctggtaacacctccatggcttctaaaaattgcaagccagatggatgctgaagcgaagaagataagagggaattctaaaacttgcaattcacgaccccgtctgttcagcgtggtaaattccaacgcaaaatggacctatgttactcaaaggagtaatactaatataaaataaaaatttataccatttttattcagttgcaatacgaagtcaaaactgtcttaatttttacttagttcagagagcgcaaccagcactcttatcgacgacttcaccactttttagtggttcttcagagaatgcagagattgctatctcgatattattagcgtatttttaatttgaaaacatttactttcaatttaaaatgaacatgtatactaagttgcttatttaaacgctacgtttaagattattcttcgtggttaaagttaagtgacgtatgacttgtgatagacggtactgacagtagataaacaatatcataatcgccatatagggcttttcaacgcttctcatttgtttcgggcacttttcatttgtcgtatattaatattatacaacgtatgacaagttcccgaaacaaataagaagcgttgaaaatatattgaaaaagatcacatctaatcacaaccgttaattgcctgtttaaaagctactcctatctgcttttaggcttattctgtgcgtataggtgtcaagtaggatagtacagatgacagatagtactgacagcagtagacaataggccttttcatcatgtgaggagcgagtgcgcatctgctatgtttgtcgtactgttttaatcaagaattgagaggttaggtatcattcattacttgtcagcaacctaacctaacatgcttgtttatagtaaacagtacgaaaaaaatgtctgatgaaaaggcctatatcgccatatggaaaaagagcatgtcgttctatcaccaagtgtatctgtaaacaactcggtacttttcatagattacctaccaatgatgtacccttatctgtacgtttgtatacgttttgttcagggcgcaaatttactgaatgtactgtatttattttgtaccggtgactttcttcgtgggcaggttttaagtctttagatttataaactagtcctaagatttaatcgatgttagatagactttttagctgattatttctgttgaaatgttgatatgatatgaagcaggatttggatggagatctggttaaagctgatggccttctgtgtcaatttcaataccaaactgtacttatcaacagagcacctgtttgtaatcgaaggtttatatctgtaaaaatatctacataataaagaattgaatgg

SEQ ID NO: 2201 - DNA, 2367 bp, Diabrotica virgifera
ttcgaaggttggcgattatcacgactatctgtattctgtttacttacagctgccctaaaaagctgctgcgagtcaattaaaccctcttttgatgttgcgtagccatgacatttgtcgccttccaatactacgctttcctattctttcccagcataatattctgcagaagctggtattggctgtgagccgatgagtagaagggatttgacagttttccccagcgctgttagaacaattttatcagaaaagtacaagtttcaaagccaataaaaacagaggtaacctctaaatttcacataaacttcttcttttcctcaatggcctcttgcgtaagcagtgatccagtcgcacgaatttatatattaaacttctacttttactattaattatgtgaattcgttcagtaagcaggttacaataatatttcagttcataatccatgtttttttagataaatatctatttttctcgttttgtatatttcacaaacaccaattttatcagaaaaatacaagtttcaaaccgcgaaagagcgctaccgtcgaaactcatagccaaaaaagaaattgtgataaagaacacggcatataataagtgttttctatcttgtgcttgtgcaaacaggggaggcctatgtccagcagtggattgagaggctgatgatgatgatgatataataagtgacatatgacactgacagttgacagacaatatcagcgtctctatattgaaagagaatgtttctagtaacaattgttaagtgtcacagtgaacacggtttaatattttttattttaaaagaaggtctttcaattaaaaatcacaatctttactgaactgaaataccatacctgacatattgaaagagtacctttctaatagagtatttttcttgctaattggtctttaccaaagccatcaaattaaataaaaaaatagggtatttttaaaagtcaaagtttccatcctaataaaaatatttaaaaatgtttttaaaagatatttaattgaaaacttattggaccattttgctggtaacacctccatggcttctaaaaattgcaagccagatggatgctgaagcgaagaagataagagggaattctaaaacttgcaattcacgaccccgtctgttcagcgtggtaaattccaacgcaaaatggacctatgttactcaaaggagtaatactaatataaaataaaaatttataccatttttattcagttgcaatacgaagtcaaaactgtcttaatttttacttagttcagagagcgcaaccagcactcttatcgacgacttcaccactttttagtggttcttcagagaatgcagagattgctatctcgatattattagcgtatttttaatttgaaaacatttactttcaatttaaaatgaacatgtatactaagttgcttatttaaacgctacgtttaagattattcttcgtggttaaagttaagtgacgtatgacttgtgatagacggtactgacagtagataaacaatatcataatcgccatatagggcttttcaacgcttctcatttgtttcgggcacttttcatttgtcgtatattaatattatacaacgtatgacaagttcccgaaacaaataagaagcgttgaaaatatattgaaaaagatcacatctaatcacaaccgttaattgcctgtttaaaagctactcctatctgcttttaggcttattctgtgcgtataggtgtcaagtaggatagtacagatgacagatagtactgacagcagtagacaataggccttttcatcatgtgaggagcgagtgcgcatctgctatgtttgtcgtactgttttaatcaagaattgagaggttaggtatcattcattacttgtcagcaacctaacctaacatgcttgtttatagtaaacagtacgaaaaaaatgtctgatgaaaaggcctatatcgccatatggaaaaagagcatgtcgttctatcaccaagtgtatctgtaaacaactcggtacttttcatagattacctaccaatgatgtacccttatctgtacgtttgtatacgttttgttcagggcgcaaatttactgaatgtactgtatttattttgtaccggtgactttcttcgtgggcaggttttaagtctttagatttataaactagtcctaagatttaatcgatgttagatagactttttagctgattatttctgttgaaatgttgatatgatatgaagcaggatttggatggagatctggttaaagctgatggccttctgtgtcaatttcaataccaaactgtacttatcaacagagcacctgtttgtaatcgaaggtttatatctgtaaaaatatctacataataaagaattgaatgg

SEQ ID NO: 2202 - DNA, 2113 bp, Diabrotica virgifera
ggattcattcctgcctggtcctgtttttcattcctcaactattttgcgccacataatcttcatgggtcttgttgtgtcttaacattgacatgcatttaaactttttggccagcagttctaatgtttgcagaaaaccatataaatatttatttacaaatttacggaatccacatttggtccttcgagccggatgctgataattagtacccataataattggaaaaattgtgttcattaataccacgcgtggttgagaaccccgatagaagtttgttttggattggagacgatagctaaccgctagaaacacgtcttgcaaggcatggttctttctattctctttgtgtggatcaatataatatgtataatttgttgttagatgagatattctttcgtttagacttactctatggagatattagataaaaaagtaatttctaatatgtggggtgaatggcaacacggtaaatattatgttccaccccacatatctcaaattcatgacgtgaacagtaataattgttgttaacaaaaaaagttaacagataaatcaaaatatcatcatgttatattgttgtaaaggttagaataaacaaaaaacaatacttttcaaactattttgacagacattttgtaattactgagaaagttttttaggatgagaaatatcctcaaaattaacgactttgtttgaacaccgagaacataggaactagtgacgccaacaacacaaacctaaatttcctaaagccatatcacgttagtcaacttgaaaaaaattaaatagcccaacgaaagtaatatatatgtttaggaagattattgtaattgtttagtgaagttttgttcctattcaccccactgttcctattcgccccattttagggtacgtgatgagataaacacaattggctatgaggttcgacggtagcgctgtctcgcggtttgaaacttgtacttttgtgataaaattggtgtatgtgaaatatacaaaacgagaaaaataaatatttatctagaaaaacacaaattattaactgaaatattattgtaacctgattactgaacgaatacacagaattaatagtaaaagtaattatgtttttttattttattcattataattttaatatttaatatataaattcgtgcgactggatgactgcttacgcaagaggccattgagaaaaagaagaagtttatgtgaaatttagaggttacctctgtttttattggctgtgggtttcgtcggtagcgctctctcgcgatttgaaacttgtacttttctgataaaattgttcaaattcaatacacaaaactgccactaacagcgctggcgagaaaactgtcaaatcccctctacttatcggttcacagcgaatagctgtaacaaaaatcctaatcgagagtatctgtcacctgatttaaatatctcaaaactttttgatttgtatgtgcaaagtgaagaaccaaaagtgaaggtatccaaattcgtattttcgaaaatatttaatgaagattttaatcttcattttcgttatcctcttactgacacttgcaaacgatgtgacgcttataacatgaaaataaaaagctgtgtaggtgtagaaaaaagcagaatggaaacagaaaaagagttgactacggaaggcagaagtagcttgaagttgagtaaaggaagatgcagccaaggataaagatgtcgcaacagtaattacatttgatttgatgaaaactttagctactcctagtatttctacgggagtggcttattacaagacagctgtggatgtattgttttggcatccaccatctaacgacaggtcagatacacatggcatgaaggcatagcctcacatggcccacaagaaattggttcttgcattttacactacggtcactcatatttgccaatgtgacagagactttggaatgatcgaaaaacaaaaacgatattttaaagacattttttcgccaaacgattgggtgaaagttatttccagttcaaaaaagaataataaatttcaggtatttaaaatgacctctgaaaattttaagtgtacctactggagaactagagaagttacttacacaccggaaaaaaggagagaag

SEQ ID NO: 2203 - DNA, 2061 bp, Diabrotica virgifera
gcgccacatatcatcatggttcttgttgcgtcttgacatacatttaaactttttggacagcagttctgattattgcagaaacccgtataaatatttatttcaaatttacggaatccacatttggtccttcgagccggatgctgataatgagtgcccataataattggaaaaattgtgttcattaataccacacgtggtttagaaccctggtagaagttggttttggattggagatgatagctaaccgctagaaacacgttttgcaaggcatggttctttctattctctttgtgtggatcaatataatatgtataatttgttgttagatgagatattgtttcgtttggtcttactctatggagatattagataaaaaaagtaatttctaatatgtggggtgaatggcaacacggtaaatattatgttccaccccacatatctcaaattcatgacgtgaacagtaataattgttgttaacaaaaaaagttaacagataaatcaaaatatcatcatgttatattgttgtaaaggttagaataaacaaaaaacaatacttttcaaactattttgacagacattttgtaattactgagaaagttttttaggatgagaaatatcctcaaaattaacgactttgtttgaacaccgagaacataggaactagtgacgccaacaacacaaacctaaatttcctaaagccatatcacgttagtcaacttgaaaaaaattaaatagcccaacgaaagtaatatatatgtttaggaagattattgtaattgtttagtgaagttttgttcctattcaccccactgttcctattcgccccattttagggtacgtgatgagataaacacaattggctatgaggttcgacggtagcgctgtctcgcggtttgaaacttgtacttttgtgataaaattggtgtatgtgaaatatacaaaacgagaaaaataaatatttatctagaaaaacacaaattattaactgaaatattattgtaacctgattactgaacgaatacacagaattaatagtaaaagtaattatgtttttttattttattcattataattttaatatttaatatataaattcgtgcgactggatgactgcttacgcaagaggccattgagaaaaagaagaagtttatgtgaaatttagaggttacctctgtttttattggctgtgggtttcgtcggtagcgctctctcgcgatttgaaacttgtacttttctgataaaattgttcaaattcaatacacaaaactgccactaacagcgctggcgagaaaactgtcaaatcccctctacttatcggttcacagcgaatagctgtaacaaaaatcctaatcgagagtatctgtcacctgatttaaatatctcaaaactttttgatttgtatgtgcaaagtgaagaaccaaaagtgaaggtatccaaattcgtattttcgaaaatatttaatgaagattttaatcttcattttcgttatcctcttactgacacttgcaaacgatgtgacgcttataacatgaaaataaaaagctgtgtaggtgtagaaaaaagcagaatggaaacagaaaaagagttgactacggaaggcagaagtagcttgaagttgagtaaaggaagatgcagccaaggataaagatgtcgcaacagtaattacatttgatttgatgaaaactttagctactcctagtatttctacgggagtggcttattacaagacagctgtggatgtattgttttggcatccaccatctaacgacaggtcagatacacatggcatgaaggcatagcctcacatggcccacaagaaattggttcttgcattttacactacggtcactcatatttgccaatgtgacagagactttggaatgatcgaaaaacaaaaacgatattttaaagacattttttcgccaaacgattgggtgaaagttatttccagttcaaaaaagaataataaatttcaggtatttaaaatgacctctgaaaattttaagtgtacctactggagaactagagaagttacttacacaccggaaaaaaggagagaag

SEQ ID NO: 2204 - DNA, 1465 bp, Diabrotica virgifera
ggattcattcctgcctggtcctgtttttcattcctcaactattttgcgccacataatcttcatgggtcttgttgtgtcttaacattgacatgcatttaaactttttggccagcagttctaatgtttgcagaaaaccatataaatatttatttacaaatttacggaatccacatttggtccttcgagccggatgctgataattagtacccataataattggaaaaattgtgttcattaataccacgcgtggttgagaaccccgatagaagtttgttttggattggagacgatagctaaccgctagaaacacgtcttgcaaggcatggttctttctattctctttgtgtggatcaatataatatgtataatttgttgttagatgagatattctttcgtttagacttactctatggagatattagataaaaaagtaatttctaatatgtggggtgaatggcaacacggtaaatattatgttccaccccacatatctcaaattcatgacgtgaacagtaataattgttgttaacaaaaaaagttaacagataaatcaaaatatcatcatgttatattgttgtaaaggttagaataaacaaaaaacaatacttttcaaactattttgacagacattttgtaattactgagaaagttttttaggatgagaaatatcctcaaaattaacgactttgtttgaacaccgagaacataggaactagtgacgccaacaacacaaacctaaatttcctaaagccatatcacgttagtcaacttgaaaaaaattaaatagcccaacgaaagtaatatatatgtttaggaagattattgtaattgtttagtgaagttttgttcctattcaccccactgttcctattcgccccattttagggtacgtgatgagataaacacaattggctatgaggttcgacggtagcgctgtctcgcggtttgaaacttgtacttttgtgataaaattggtgtatgtgaaatatacaaaacgagaaaaataaatatttatctagaaaaacacaaattattaactgaaatattattgtaacctgcttactgaacgaattcacataattaatagtaaaagtagaagtttaatatataaattcgtgcgactggatcactgcttacgcaagaggccattgaggaaaagaagaagtttatgtgaaatttagaggttacctctgtttttattggctttgaaacttgtacttttctgataaaattgttctaacagcgctggggaaaactgtcaaatcccttctactcatcggctcacagccaataccagcttctgcagaatattatgctgggaaagaataggaaagcgtagtattggaaggcgacaaatgtcatggctacgcaacatcaaaagagggtttaattgctcgcagcagctttttagggcagctgtaagtaaacagaatacagatagtcgtgataatcgccaaccttcgaa

SEQ ID NO: 2205 - DNA, 1413 bp, Diabrotica virgifera
gcgccacatatcatcatggttcttgttgcgtcttgacatacatttaaactttttggacagcagttctgattattgcagaaacccgtataaatatttatttcaaatttacggaatccacatttggtccttcgagccggatgctgataatgagtgcccataataattggaaaaattgtgttcattaataccacacgtggtttagaaccctggtagaagttggttttggattggagatgatagctaaccgctagaaacacgttttgcaaggcatggttctttctattctctttgtgtggatcaatataatatgtataatttgttgttagatgagatattgtttcgtttggtcttactctatggagatattagataaaaaaagtaatttctaatatgtggggtgaatggcaacacggtaaatattatgttccaccccacatatctcaaattcatgacgtgaacagtaataattgttgttaacaaaaaaagttaacagataaatcaaaatatcatcatgttatattgttgtaaaggttagaataaacaaaaaacaatacttttcaaactattttgacagacattttgtaattactgagaaagttttttaggatgagaaatatcctcaaaattaacgactttgtttgaacaccgagaacataggaactagtgacgccaacaacacaaacctaaatttcctaaagccatatcacgttagtcaacttgaaaaaaattaaatagcccaacgaaagtaatatatatgtttaggaagattattgtaattgtttagtgaagttttgttcctattcaccccactgttcctattcgccccattttagggtacgtgatgagataaacacaattggctatgaggttcgacggtagcgctgtctcgcggtttgaaacttgtacttttgtgataaaattggtgtatgtgaaatatacaaaacgagaaaaataaatatttatctagaaaaacacaaattattaactgaaatattattgtaacctgcttactgaacgaattcacataattaatagtaaaagtagaagtttaatatataaattcgtgcgactggatcactgcttacgcaagaggccattgaggaaaagaagaagtttatgtgaaatttagaggttacctctgtttttattggctttgaaacttgtacttttctgataaaattgttctaacagcgctggggaaaactgtcaaatcccttctactcatcggctcacagccaataccagcttctgcagaatattatgctgggaaagaataggaaagcgtagtattggaaggcgacaaatgtcatggctacgcaacatcaaaagagggtttaattgctcgcagcagctttttagggcagctgtaagtaaacagaatacagatagtcgtgataatcgccaaccttcgaa

SEQ ID NO: 2206 - DNA, 2680 bp, Diabrotica virgifera
acaaatatcttctcaaataatctccaatgttgattgaatatactgcaaatgtgtcggtactgaatttctggcatccattctcttatcttttgttgcaaatcataaagtgtttatcttatattgcgtttacatctctgttggtggtcatctgtgtttgtttctgtgttggtgggccctttgcatcaatttgagtagaacaagaggagagtagaactaaatatcgacgaagaaagagatgttctaggtacctctctttgtctggaggagagtagaggcgtgattcaccaactaaaagataataaaacggcttgcctggatgatatacgaacagaacaaataaagaactttggaccgaaaccgttaagtggctcctaaaaatgatgaattgctgtatccgtacattacatatccccaaaacctggaggaaagctaaagtggtagcactattaaaaccagggaagtgtccggcagatacaaagagttttagacctgtctctcttctgtgtgaccttttcaaagtgtgacactgaacttgaccgccgaatctatggagactaaaattattccagaacaagcaagaatgaataaatcattaaacccttaatctcatccaacatattgattttggtttttaacggaaaaaataacaggtgtaacgttagtagacctaactgtcgcctatgacacagttaaccatcaacggctgcagcaaaactctacgaatctacaaagaatttccgacttacaaggttagtggaatgtcgcctacagaatggacgtaaagctccagtccaagaataataattagtggagggaccaaaacaatggacaatgatgaggatggagacaagaagaacaggtagtaaataaatcttttttataagcaatactaaacacaatttttaacacagactctgcaatattcataaagaataaaaactggcacatcctgtactatttggccaagaatatggtgtatattttacagttatacaacgtccttaattatcaattttgcttataaagttatgctcaaatacaaaaaaccaacaacaaaatttagggactttacatgataggtattttatatcacatttgtgaagaaattaatataaagcgactttgattatatctaatcacaagaaatccttaatacattttcatttttacatcaacagatgtgtcacgtccaatgggacgaaacctttactacgttcactctcaagataagctaactcgccagttccatacgcctgatcggtgggtttgtcgtgtcgtggtagcttgtcattggttacaaattaatttataaccaatgacaagttgcgacgttgggagtgaacgaagtatagtagcaaaataaaaattgtttaaacttcttttgataaaaataatagatgagtacaataaaaagttataaaatttgtaaatgcaatactttttttattttaccttttaatgtccaatgactatgacaaataaaataatccgtttctttaaacgtttctcataatttatgtgtgtttcggtttttaaataccttaacgccattcagtagggactaatgaacgaccgatcatcgagccgtgagactttatctctaccatactcttcatctaccgcttattggagttacctgcgtcattactttctataccgcatatccattttggatttaatattgctgcttttggaaaatcatgcctattctgtaactcatttcgatgatagaagtcaggaaaatcgaatagaagtggccaagtcgaatagaaatagtcaaaatcgatattccataactccctcggaatctctacaatcggaatagtgaatagaaatgacttcgacaccatttaccctgtcgaaatgagatttcgatatcggaattgtgcttgacgcaagcgcattgtattttgttttgacgtttatattttatatctactaaaataatttattactacttatttatcattatttatagtattttaccttttgtatctccttaatttgtagtatgtggtggtatttacttagggaattgtatatttaatttaaacatgtacttgtatgcatcaaacctaaccttaaaattgatttggcatccgaaattcacattctgaatgtttgccagtcacagtgttgccaaacttttttttgtttatttcttgtacaatttcaatcaatggcataatgtacaagaatagattgtacaagaacgtttaaaatataaagagaaacttatagcgttgattgataaatatattataccagtttacttgtatttgtatcaatcaacgcttatagaaaagaaaataattagagaaaagacgctgtttttgggaaaagttgtttataagttattttagcttgaattaaatctaaagattgtataattattagtaatatcgtacacgtacatcatatatcttatcctcatttatcttttttatttatcagtttaggtatcttcttttttataacaattttaattaactttgatttaaaaccatttatcatcttttgaggttttgtgtccaatatttacactaatattttattgtttacttttcaaaacgtttcttttttgttatttcaaaactatttttaaaaatgtaactgtatgtaatgtgatagtgtgaaaaattgaagatatggcaacggtgtcgtatttcaaatttagaac

SEQ ID NO: 2207 - DNA, 2561 bp, Diabrotica virgifera
acaaatatcttctcaaataatctccaatgttgattgaatatactgcaaatgtgtcggtactgaatttctggcatccattctcttatcttttgttgcaaatcataaagtgtttatcttatattgcgtttacatctctgttggtggtcatctgtgtttgtttctgtgttggtgggccctttgcatcaatttgagtagaacaagaggagagtagaactaaatatcgacgaagaaagagatgttctaggtacctctctttgtctggaggagagtagaggcgtgattcaccaactaaaagataataaaacggcttgcctggatgatatacgaacagaacaaataaagaactttggaccgaaaccgttaagtggctcctaaaaatgatgaattgctgtatccgtacattacatatccccaaaacctggaggaaagctaaagtggtagcactattaaaaccagggaagtgtccggcagatacaaagagttttagacctgtctctcttctgtgtgaccttttcaaagtgtgacactgaacttgaccgccgaatctatggagactaaaattattccagaacaagcaagaatgaataaatcattaaacccttaatctcatccaacatattgattttggtttttaacggaaaaaataacaggtgtaacgttagtagacctaactgtcgcctatgacacagttaaccatcaacggctgcagcaaaactctacgaatctacaaagaatttccgacttacaaggttagtggaatgtcgcctacagaatggacgtaaagctccagtccaagaataataattagtggagggaccaaaacaatggacaatgatgaggatggagacaagaagaacaggtagtaaataaatcttttttataagcaatactaaacacaatttttaacacagactctgcaatattcataaagaataaaaactggcacatcctgtactatttggccaagaatatggtgtatattttacagttatacaacgtccttaattatcaattttgcttataaagttatgctcaaatacaaaaaaccaacaacaaaatttagggactttacatgataggtattttatatcacatttgtgaagaaattaatataaagcgactttgattatatctaatcacaagaaatccttaatacattttcatttttacatcaacagatgtgtcacgtccaatgggacgaaacctttactacgttcactctcaagataagctaactcgccagttccatacgcctgatcggtgggtttgtcgtgtcgtggtagcttgtcattggttacaaattaatttataaccaatgacaagttgcgacgttgggagtgaacgaagtatagtagcaaaataaaaattgtttaaacttcttttgataaaaataatagatgagtacaataaaaagttataaaatttgtaaatgcaatactttttttattttaccttttaatgtccaatgactatgacaaataaaataatccgtttctttaaacgtttctcataatttatgtgtgtttcggtttttaaataccttaacgccattcagtagggactaatgaacgaccgatcatcgagccgtgagactttatctctaccatactcttcatctaccgcttattggagttacctgcgtcattactttctataccgcatatccattttggatttaatattgctgcttttggaaaatcatgcctattctgtaactcatttcgatgatagaagtcaggaaaatcgaatagaagtggccaagtcgaatagaaatagtcaaaatcgatattccataactccctcggaatctctacaatcggaatagtgaatagaaatgacttcgacaccatttaccctgtcgaaatgagatttcgatatcggaattgtgcttgacgcaagcgcattttgttttgttttgacgtttatattttatatataaaaataattaattacatactacttatttataattatttatagtatttgtttgtacctttttttagctgcttaatttttagtctgtggtgttatttgtaattctatatttaatttagacatgttgtacgagtatgaattggaccttggacctaaccttatttatttgctatttggcttggcacatgaatgaacgtttgcccctcgcagtgttgccataattttgttagttatttcttgtacaatttcaatcaacggtataatgtacaagaatagcatacgatagacttctgatgcgttgatggataaatatattataccagtatcattgtataactagactcctttcttaaacaatgccagtatacttgtatatttatcagtcaacactcatagtctgaacaaattatagaaaagatgccatttttgggaaaagtggtttagcagttatttcagctctaatcgaatcttaaagattgcatattattagtaatatcgattttaaattatagattaataataatgaattaataacatcaatttaaatatctttgatttaaaacatttatacttcttattttcacttatctttttattatcagtttatctttttatatcaatttcaa

SEQ ID NO: 2208 - DNA, 2540 bp, Diabrotica virgifera
gcgctgcctttggactagaatggaggcccaaaaactataaaacaaattgagtacaaccaccgactagattaaccgaggacgtaaaaagagtagagggaaactggctacaagcggcctagtgtagtagagtgagaacactggaagaactgagggaggtatatgtccagcagtggacgcgattggctgattgatgatgattgtcaaagagcttattccccctaacacagctttcccttaccgacttaccttttctttccaaactgcaatgctctaagctgacaaaaaccaacgacctccacgccagttcaaattatgtttaaatacagaaacaaaatctcaaattatcaatattgaaaaaaaatttttttcattctggtgggatatgttatatgccattagagtgaaaacttagtctttttcaatattgactttgtatttgaaacacacaaatatattatgataggcctaacccattacgtttttatagctttagataaactctagctacatccattttaggcataatcaagttaaaaatttttagaactacatttttattttagtttagtttaaaaaaatgtcactatgatgcttgttttcatctaacaaataatttacaacacatcgatatgaactatttaaaatataaaggacgtattttttggaagggaatatttaatatacaacaatgtaggtaaatgcatggatctcatgtaaagaatttgaggtagaaattatattctttaaaatttatgatactaaactattcacttaatcaaattatttttatatttgtcactggaatttcacataaatttcaaaggtttgcatcaattacaaaaaaaaaaacgaagacctgttttttttcttgtttccattggcaccgggtgattttcttaacagggttattttacacatgttagtcaacttaaacgatttggatattcgcgatcctctaagcatgaacacgttgagagagtaactagtaggagtacctttgtaaagagtggaataatctatggcaacaagttactggcaagtgaacttttgataccagcgctaattgttaaatatataacgatttttttaattgaaagaattttttaacacgcaacagatacatcttgcaacacattataatatttgtttctccgcgacattttaaagtccgagagctacactataagtagacatatttgagtaggtatttaaaaagtattggcttaacagaacaatcctcagaatattttacgtagactgagtcacgaatgaagaagtcttgcgaagactctcaaaagaaagagaactgaataatgaaatcaatacgcatgataatcaaatacagattatcatgcaaggaaagattttaggaaagcgtagcgtaggaaggagacgaatctcttggctgcgcaattgagagtggtttaattgctcgtctaaccagctttttagagcagctgtaaagagaatacagatagtcatagtgatcaccaaccctccacaaaaagcggcatcataaaaagtatgaatatctgtgtaggtaaaacctcttccgcaatcatgcctactctgtaactcatttcgatgatagaagtcaggacaatcgaatagaagtggccaagtcgaatagaaatagtcaaaatcgatattccataactccctcggaatctctacaatcggaatagtgaatagaaatgacttcgacaccatttaccctgtcgaaatgagatttcgatatcggaattgtgcttgacgcaagcgcattgtattttgttttgacgtttatattttatatctactaaaataatttattactacttatttatcattatttatagtattttaccttttgtatctccttaatttgtagtatgtggtggtatttacttagggaattgtatatttaatttaaacatgtacttgtatgcatcaaacctaaccttaaaattgatttggcatccgaaattcacattctgaatgtttgccagtcacagtgttgccaaacttttttttgtttatttcttgtacaatttcaatcaatggcataatgtacaagaatagattgtacaagaacgtttaaaatataaagagaaacttatagcgttgattgataaatatattataccagtttacttgtatttgtatcaatcaacgcttatagaaaagaaaataattagagaaaagacgctgtttttgggaaaagttgtttataagttattttagcttgaattaaatctaaagattgtataattattagtaatatcgtacacgtacatcatatatcttatcctcatttatcttttttatttatcagtttaggtatcttcttttttataacaattttaattaactttgatttaaaaccatttatcatcttttgaggttttgtgtccaatatttacactaatattttattgtttacttttcaaaacgtttcttttttgttatttcaaaactatttttaaaaatgtaactgtatgtaatgtgatagtgtgaaaaattgaagatatggcaacggtgtcgtatttcaaatttagaac

SEQ ID NO: 2209 - DNA, 2543 bp, Diabrotica virgifera
acaaatatcttctcaaataatctccaatgttgattgaatatactgcaaatgtgtcggtactgaatttctggcatccattctcttatcttttgttgcaaatcataaagtgtttatcttatattgcgtttacatctctgttggtggtcatctgtgtttgtttctgtgttggtgggccctttgcatcaatttgagtagaacaagaggagagtagaactaaatatcgacgaagaaagagatgttctaggtacctctctttgtctggaggagagtagaggcgtgattcaccaactaaaagataataaaacggcttgcctggatgatatacgaacagaacaaataaagaactttggaccgaaaccgttaagtggctcctaaaaatgatgaattgctgtatccgtacattacatatccccaaaacctggaggaaagctaaagtggtagcactattaaaaccagggaagtgtccggcagatacaaagagttttagacctgtctctcttctgtgtgaccttttcaaagtgtgacactgaacttgaccgccgaatctatggagactaaaattattccagaacaagcaagaatgaataaatcattaaacccttaatctcatccaacatattgattttggtttttaacggaaaaaataacaggtgtaacgttagtagacctaactgtcgcctatgacacagttaaccatcaacggctgcagcaaaactctacgaatctacaaagaatttccgacttacaaggttagtggaatgtcgcctacagaatggacgtaaagctccagtccaagaataataattagtggagggaccaaaacaatggacaatgatgaggatggagacaagaagaacaggtagtaaataaatcttttttataagcaatactaaacacaatttttaacacagactctgcaatattcataaagaataaaaactggcacatcctgtactatttggccaagaatatggtgtatattttacagttatacaacgtccttaattatcaattttgcttataaagttatgctcaaatacaaaaaaccaacaacaaaatttagggactttacatgataggtattttatatcacatttgtgaagaaattaatataaagcgactttgattatatctaatcacaagaaatccttaatacattttcatttttacatcaacagatgtgtcacgtccaatgggacgaaacctttactacgttcactctcaagataagctaactcgccagttccatacgcctgatcggtgggtttgtcgtgtcgtggtagcttgtcattggttacaaattaatttataaccaatgacaagttgcgacgttgggagtgaacgaagtatagtagcaaaataaaaattgtttaaacttcttttgataaaaataatagatgagtacaataaaaagttataaaatttgtaaatgcaatactttttttattttaccttttaatgtccaatgactatgacaaataaaataatccgtttctttaaacgtttctcataatttatgtgtgtttcggtttttaaataccttaacgccattcagtagggactaatgaacgaccgatcatcgagccgtgagactttatctctaccatactcttcatctaccgcttattggagttacctgcgtcattactttctataccgcatatccattttggatttaatattgctgcttttggaaaatcatgcctattctgtaactcatttcgatgatagaagtcaggaaaatcgaatagaagtggccaagtcgaatagaaatagtcaaaatcgatattccataactccctcggaatctctacaatcggaatagtgaatagaaatgacttcgacaccatttaccctgtcgaaatgagatttcgatatcggaattgtgcttgacgcaagcgcattgtattttgttttgacgtttatattttatatctactaaaataatttattactacttatttatcattatttatagtattttaccttttgtatctccttaatttgtagtatgtggtggtatttacttagggaattgtatatttaatttaaacatgtacttgtatgcatcaaacctaaccttaaaattgatttggcatccgaaattcacattctgaatgtttgccagtcacagtgttgccaaacttttttttgtttatttcttgtacaatttcaatcaatggcataatgtacaagaatagattgtacaagaacgtttaaaatataaagagaaacttatagcgttgattgataaatatattataccagtatacttgcatatttctcaatcaacgcttatagtctgaacaaattatataaaagagaccatttttggaaaaaagttgtttagtagttattttagctggaatcaaatcttaagattgcgtattaccacgattacgatgattacgatgtgagttacagaatgccaatccaaacacgaaaatgacgcggtagatatcaaacattccgatttcgggtaattacgattcgacttggtaatttctattcgatttgttaaaagttacagaatagggctgatt

SEQ ID NO: 2210 - DNA, 2421 bp, Diabrotica virgifera
gcgctgcctttggactagaatggaggcccaaaaactataaaacaaattgagtacaaccaccgactagattaaccgaggacgtaaaaagagtagagggaaactggctacaagcggcctagtgtagtagagtgagaacactggaagaactgagggaggtatatgtccagcagtggacgcgattggctgattgatgatgattgtcaaagagcttattccccctaacacagctttcccttaccgacttaccttttctttccaaactgcaatgctctaagctgacaaaaaccaacgacctccacgccagttcaaattatgtttaaatacagaaacaaaatctcaaattatcaatattgaaaaaaaatttttttcattctggtgggatatgttatatgccattagagtgaaaacttagtctttttcaatattgactttgtatttgaaacacacaaatatattatgataggcctaacccattacgtttttatagctttagataaactctagctacatccattttaggcataatcaagttaaaaatttttagaactacatttttattttagtttagtttaaaaaaatgtcactatgatgcttgttttcatctaacaaataatttacaacacatcgatatgaactatttaaaatataaaggacgtattttttggaagggaatatttaatatacaacaatgtaggtaaatgcatggatctcatgtaaagaatttgaggtagaaattatattctttaaaatttatgatactaaactattcacttaatcaaattatttttatatttgtcactggaatttcacataaatttcaaaggtttgcatcaattacaaaaaaaaaaacgaagacctgttttttttcttgtttccattggcaccgggtgattttcttaacagggttattttacacatgttagtcaacttaaacgatttggatattcgcgatcctctaagcatgaacacgttgagagagtaactagtaggagtacctttgtaaagagtggaataatctatggcaacaagttactggcaagtgaacttttgataccagcgctaattgttaaatatataacgatttttttaattgaaagaattttttaacacgcaacagatacatcttgcaacacattataatatttgtttctccgcgacattttaaagtccgagagctacactataagtagacatatttgagtaggtatttaaaaagtattggcttaacagaacaatcctcagaatattttacgtagactgagtcacgaatgaagaagtcttgcgaagactctcaaaagaaagagaactgaataatgaaatcaatacgcatgataatcaaatacagattatcatgcaaggaaagattttaggaaagcgtagcgtaggaaggagacgaatctcttggctgcgcaattgagagtggtttaattgctcgtctaaccagctttttagagcagctgtaaagagaatacagatagtcatagtgatcaccaaccctccacaaaaagcggcatcataaaaagtatgaatatctgtgtaggtaaaacctcttccgcaatcatgcctactctgtaactcatttcgatgatagaagtcaggacaatcgaatagaagtggccaagtcgaatagaaatagtcaaaatcgatattccataactccctcggaatctctacaatcggaatagtgaatagaaatgacttcgacaccatttaccctgtcgaaatgagatttcgatatcggaattgtgcttgacgcaagcgcattttgttttgttttgacgtttatattttatatataaaaataattaattacatactacttatttataattatttatagtatttgtttgtacctttttttagctgcttaatttttagtctgtggtgttatttgtaattctatatttaatttagacatgttgtacgagtatgaattggaccttggacctaaccttatttatttgctatttggcttggcacatgaatgaacgtttgcccctcgcagtgttgccataattttgttagttatttcttgtacaatttcaatcaacggtataatgtacaagaatagcatacgatagacttctgatgcgttgatggataaatatattataccagtatcattgtataactagactcctttcttaaacaatgccagtatacttgtatatttatcagtcaacactcatagtctgaacaaattatagaaaagatgccatttttgggaaaagtggtttagcagttatttcagctctaatcgaatcttaaagattgcatattattagtaatatcgattttaaattatagattaataataatgaattaataacatcaatttaaatatctttgatttaaaacatttatacttcttattttcacttatctttttattatcagtttatctttttatatcaatttcaa

SEQ ID NO: 2211 - DNA, 2403 bp, Diabrotica virgifera
gcgctgcctttggactagaatggaggcccaaaaactataaaacaaattgagtacaaccaccgactagattaaccgaggacgtaaaaagagtagagggaaactggctacaagcggcctagtgtagtagagtgagaacactggaagaactgagggaggtatatgtccagcagtggacgcgattggctgattgatgatgattgtcaaagagcttattccccctaacacagctttcccttaccgacttaccttttctttccaaactgcaatgctctaagctgacaaaaaccaacgacctccacgccagttcaaattatgtttaaatacagaaacaaaatctcaaattatcaatattgaaaaaaaatttttttcattctggtgggatatgttatatgccattagagtgaaaacttagtctttttcaatattgactttgtatttgaaacacacaaatatattatgataggcctaacccattacgtttttatagctttagataaactctagctacatccattttaggcataatcaagttaaaaatttttagaactacatttttattttagtttagtttaaaaaaatgtcactatgatgcttgttttcatctaacaaataatttacaacacatcgatatgaactatttaaaatataaaggacgtattttttggaagggaatatttaatatacaacaatgtaggtaaatgcatggatctcatgtaaagaatttgaggtagaaattatattctttaaaatttatgatactaaactattcacttaatcaaattatttttatatttgtcactggaatttcacataaatttcaaaggtttgcatcaattacaaaaaaaaaaacgaagacctgttttttttcttgtttccattggcaccgggtgattttcttaacagggttattttacacatgttagtcaacttaaacgatttggatattcgcgatcctctaagcatgaacacgttgagagagtaactagtaggagtacctttgtaaagagtggaataatctatggcaacaagttactggcaagtgaacttttgataccagcgctaattgttaaatatataacgatttttttaattgaaagaattttttaacacgcaacagatacatcttgcaacacattataatatttgtttctccgcgacattttaaagtccgagagctacactataagtagacatatttgagtaggtatttaaaaagtattggcttaacagaacaatcctcagaatattttacgtagactgagtcacgaatgaagaagtcttgcgaagactctcaaaagaaagagaactgaataatgaaatcaatacgcatgataatcaaatacagattatcatgcaaggaaagattttaggaaagcgtagcgtaggaaggagacgaatctcttggctgcgcaattgagagtggtttaattgctcgtctaaccagctttttagagcagctgtaaagagaatacagatagtcatagtgatcaccaaccctccacaaaaagcggcatcataaaaagtatgaatatctgtgtaggtaaaacctcttccgcaatcatgcctactctgtaactcatttcgatgatagaagtcaggacaatcgaatagaagtggccaagtcgaatagaaatagtcaaaatcgatattccataactccctcggaatctctacaatcggaatagtgaatagaaatgacttcgacaccatttaccctgtcgaaatgagatttcgatatcggaattgtgcttgacgcaagcgcattgtattttgttttgacgtttatattttatatctactaaaataatttattactacttatttatcattatttatagtattttaccttttgtatctccttaatttgtagtatgtggtggtatttacttagggaattgtatatttaatttaaacatgtacttgtatgcatcaaacctaaccttaaaattgatttggcatccgaaattcacattctgaatgtttgccagtcacagtgttgccaaacttttttttgtttatttcttgtacaatttcaatcaatggcataatgtacaagaatagattgtacaagaacgtttaaaatataaagagaaacttatagcgttgattgataaatatattataccagtatacttgcatatttctcaatcaacgcttatagtctgaacaaattatataaaagagaccatttttggaaaaaagttgtttagtagttattttagctggaatcaaatcttaagattgcgtattaccacgattacgatgattacgatgtgagttacagaatgccaatccaaacacgaaaatgacgcggtagatatcaaacattccgatttcgggtaattacgattcgacttggtaatttctattcgatttgttaaaagttacagaatagggctgatt

SEQ ID NO: 2212 - DNA, 2186 bp, Diabrotica virgifera
acaaatatcttctcaaataatctccaatgttgattgaatatactgcaaatgtgtcggtactgaatttctggcatccattctcttatcttttgttgcaaatcataaagtgtttatcttatattgcgtttacatctctgttggtggtcatctgtgtttgtttctgtgttggtgggccctttgcatcaatttgagtagaacaagaggagagtagaactaaatatcgacgaagaaagagatgttctaggtacctctctttgtctggaggagagtagaggcgtgattcaccaactaaaagataataaaacggcttgcctggatgatatacgaacagaacaaataaagaactttggaccgaaaccgttaagtggctcctaaaaatgatgaattgctgtatccgtacattacatatccccaaaacctggaggaaagctaaagtggtagcactattaaaaccagggaagtgtccggcagatacaaagagttttagacctgtctctcttctgtgtgaccttttcaaagtgtgacactgaacttgaccgccgaatctatggagactaaaattattccagaacaagcaagaatgaataaatcattaaacccttaatctcatccaacatattgattttggtttttaacggaaaaaataacaggtgtaacgttagtagacctaactgtcgcctatgacacagttaaccatcaacggctgcagcaaaactctacgaatctacaaagaatttccgacttacaaggttagtggaatgtcgcctacagaatggacgtaaagctccagtccaagaataataattagtggagggaccaaaacaatggacaatgatgaggatggagacaagaagaacaggtagtaaataaatcttttttataagcaatactaaacacaatttttaacacagactctgcaatattcataaagaataaaaactggcacatcctgtactatttggccaagaatatggtgtatattttacagttatacaacgtccttaattatcaattttgcttataaagttatgctcaaatacaaaaaaccaacaacaaaatttagggactttacatgataggtattttatatcacatttgtgaagaaattaatataaagcgactttgattatatctaatcacaagaaatccttaatacattttcatttttacatcaacagatgtgtcacgtccaatgggacgaaacctttactacgttcactctcaagataagctaactcgccagttccatacgcctgatcggtgggtttgtcgtgtcgtggtagcttgtcattggttacaaattaatttataaccaatgacaagttgcgacgttgggagtgaacgaagtatagtagcaaaataaaaattgtttaaacttcttttgataaaaataatagatgagtacaataaaaagttataaaatttgtaaatgcaatactttttttattttaccttttaatgtccaatgactatgacaaataaaataatccgtttctttaaacgtttctcataatttatgtgtgtttcggtttttaaataccttaacgccattcagtagggactaatgaacgaccgatcatcgagccgtgagactttatctctaccatactcttcatctaccgcttattggagttacctgcgtcattactttctataccgcatatccattttggatttaatattgctgcttttggaaaatcatgcctattctgtaactcatttcgatgatagaagtcaggaaaatcgaatagaagtggccaagtcgaatagaaatagtcaaaatcgatattccataactccctcggaatctctacaatcggaatagtgaatagaaatgacttcgacaccatttaccctgtcgaaatgagatttcgatatcggaattgtgcttgacgcaagcgcattttgttttgttttgacgtttatattttatatataaaaataattaattacatactacttatttataattatttatagtatttgtttgtacctttttttagctgcttaatttttagtctgtggtgttatttgtttagagaactatatatatttcatttagacatgttgtacgagtatgaataattggacctaaccttatttatttgctacttggcgtctgaatgtttcccattcacattgttgccatattttgttcgcatatttcttgtacaattgcaatcaat

SEQ ID NO: 2213 - DNA, 2046 bp, Diabrotica virgifera
gcgctgcctttggactagaatggaggcccaaaaactataaaacaaattgagtacaaccaccgactagattaaccgaggacgtaaaaagagtagagggaaactggctacaagcggcctagtgtagtagagtgagaacactggaagaactgagggaggtatatgtccagcagtggacgcgattggctgattgatgatgattgtcaaagagcttattccccctaacacagctttcccttaccgacttaccttttctttccaaactgcaatgctctaagctgacaaaaaccaacgacctccacgccagttcaaattatgtttaaatacagaaacaaaatctcaaattatcaatattgaaaaaaaatttttttcattctggtgggatatgttatatgccattagagtgaaaacttagtctttttcaatattgactttgtatttgaaacacacaaatatattatgataggcctaacccattacgtttttatagctttagataaactctagctacatccattttaggcataatcaagttaaaaatttttagaactacatttttattttagtttagtttaaaaaaatgtcactatgatgcttgttttcatctaacaaataatttacaacacatcgatatgaactatttaaaatataaaggacgtattttttggaagggaatatttaatatacaacaatgtaggtaaatgcatggatctcatgtaaagaatttgaggtagaaattatattctttaaaatttatgatactaaactattcacttaatcaaattatttttatatttgtcactggaatttcacataaatttcaaaggtttgcatcaattacaaaaaaaaaaacgaagacctgttttttttcttgtttccattggcaccgggtgattttcttaacagggttattttacacatgttagtcaacttaaacgatttggatattcgcgatcctctaagcatgaacacgttgagagagtaactagtaggagtacctttgtaaagagtggaataatctatggcaacaagttactggcaagtgaacttttgataccagcgctaattgttaaatatataacgatttttttaattgaaagaattttttaacacgcaacagatacatcttgcaacacattataatatttgtttctccgcgacattttaaagtccgagagctacactataagtagacatatttgagtaggtatttaaaaagtattggcttaacagaacaatcctcagaatattttacgtagactgagtcacgaatgaagaagtcttgcgaagactctcaaaagaaagagaactgaataatgaaatcaatacgcatgataatcaaatacagattatcatgcaaggaaagattttaggaaagcgtagcgtaggaaggagacgaatctcttggctgcgcaattgagagtggtttaattgctcgtctaaccagctttttagagcagctgtaaagagaatacagatagtcatagtgatcaccaaccctccacaaaaagcggcatcataaaaagtatgaatatctgtgtaggtaaaacctcttccgcaatcatgcctactctgtaactcatttcgatgatagaagtcaggacaatcgaatagaagtggccaagtcgaatagaaatagtcaaaatcgatattccataactccctcggaatctctacaatcggaatagtgaatagaaatgacttcgacaccatttaccctgtcgaaatgagatttcgatatcggaattgtgcttgacgcaagcgcattttgttttgttttgacgtttatattttatatataaaaataattaattacatactacttatttataattatttatagtatttgtttgtacctttttttagctgcttaatttttagtctgtggtgttatttgtttagagaactatatatatttcatttagacatgttgtacgagtatgaataattggacctaaccttatttatttgctacttggcgtctgaatgtttcccattcacattgttgccatattttgttcgcatatttcttgtacaattgcaatcaat

SEQ ID NO: 2214 - DNA, 2999 bp, Diabrotica virgifera
cacgtcaaacgcaaatacatccactttctaaaaccgatcgtaatttagttctattgttcttgaattgttaagtccgttcgtggaatcttagtcactaatgtttttcactttccacgaaacactgcttacgattaaaaatatattatttacaaattttggccctatacaaggcgatagaactacgatctcgtggtattggacataaaattaattttctgaattcttcccataaaattatataacagtattgttagaattgttgtagaattgtttttttaagaaattcaaaaaattaaatttatatcaatagaccataagaccatagtttttcatcaccctgtatatgaccaaaattgtatagaatttaattttgctattaaacaagtgtttcggaaaagtgaaaacggttagtgataatgattcgacgaaatggacgggacattaacaaacaattcggtgattagaaagtggacagagcgttgacgggaacaatgacgtttttaagatctttccgggaaggtttttaatttggtaaacaaattgtattagtttttagatgtaaaagtagaaagtagaaaagaactaattatatttcttgaaatttgacaaattggaaaagttatgtggaagaatatttggtttctcaagaaataaatggtttaagagaggttgttgttgattggatggaaaatatcgggagtagggataatgaatgttggagtctggatttgagagagaaataaggggtactgtgtaaggaacatcgatagcaaggcagtcgagtttttaaaagtgtgtaatcagtgtagagtggtgtgatcagcctttgcgagcagaatcaagttgaaaccaaattgtcgaccggttgaagagttaattttcctggtccgagggagattcctttgttttgtctagaacgagtagctgattattatcctttggtgcacaagatatcgagcaaggaaaactgaataatagagttcgagcaagtcctgtgtgtttttcttgaaagcagttttgacgtgagggactttctcgcaacatccagagagtacgtgttgggagaatcaaggacggcgcaatccagaaaacgaggaagtgaagaaacaaaaaggttagtgaaatcatttgtcggaatggagaaaatttgtgtatatcaaaaccatatttgttcatttgtttattgaacatttttttaacgcagttagtcatttcaaatttgagaaatcaattcaaaagaagaaaagtaaaattcattaaatttagtaggagtaaataataaattaattaaataatttttgaagttatacttctttaccggcgatagagggtgatttttatatgttaaaacctatcagcccggcgcatgcgcattataactttgttctgattggatgttcaaatgacatgtcaaaaattatccgatatggcagctgtggtttggaggtaaaggtaaaggtaaacaaatgtataatatattagttttattgttgtgaggacagaaacaaaaaagtttataatattgtagtgacttttaaatagtttttaaaagcaacaggtacgtaataattgttaatgtatcatgggtataaacctacctatttgatctgccaaaatacatagtatgtaatacttttatttatataatttgattaccatcaaaatttctatcaatattcacctaatatattgttttcttactctatgttttgttgtattttttcaattctaaatcatttcaattcaaaattaaaataatttgatcaattttcaaaatatcaaaatatcacaagtttaatccgtttagttagtcgatcttcgtaaataatgacacatagtgtccgtggctaagcgttgaaggcgaatgaattccaataccaaccgcgcttatcagcgctggttcgagtcccaatagaaactttctttttgtttttttttaatacattttatgattgtaagtatatttattatataattgtattttcagaaaatacgtatttagttaaaaaaattttcgacaattaatgttcagacatcatttgtggcttgtttaatgtgtttgtgtgtgttttattcttttattattttaatttttggcactgttctaataaaaatgtttgagaagtagtaagtataaattagtttaatatttaaacaaaatataaataaaaagtatattaatttcgtttaaatcatataatagaagtataacttcttacgtgcgtacaaagtacacacacattcttttttttttgtcaaaacaaggagatatcagagttatcagatatcagataagttagaaattgttgcaacaaagttgaattttagtattttttgaatcatatgtacacggcttatttgataaaaacaatagattacatttatatgattttgagtgttttcaatttccctatttccaccctggaagaagtaagcaactagaaatactagaagccacagatcacaggtattgtaccaaatacaaaattagccctgagaataaaattgattggaaaatttaatttgaatttagttttgtttttacataggcagtgaataaaataattgaataatcaattaaattaagaatttgctaatcaatctaaataaatagataaagtagagcataacaatacattgtaaatcccaaatcatgatttcaaaattatgattcgggagtgcattaacgtatttactcttagtagcatttaacgtgtattggtttgtttatttctactgcatcttgactgtacatttactatagctatgtctgcttcttctttcaatgtccaaatatcgttgaaacgttgcaaaaagtctgttgaactgaagatagactatattattgagaagtaaatgcaaatttaaaacagaaacagattccagaaacgtcccttttgtttttttttaatagtttgcaatgtatttgcacaagagttggtaattttaaggcctttgtaaaaacgaagaaatgttcaaacgataataaataaaaataa

SEQ ID NO: 2215 - DNA, 2776 bp, Diabrotica virgifera
cacgtcaaacgcaaatacatccactttctaaaaccgatcgtaatttagttctattgttcttgaattgttaagtccgttcgtggaatcttagtcactaatgtttttcactttccacgaaacactgcttacgattaaaaatatattatttacaaattttggccctatacaaggcgatagaactacgatctcgtggtattggacataaaattaattttctgaattcttcccataaaattatataacagtattgttagaattgttgtagaattgtttttttaagaaattcaaaaaattaaatttatatcaatagaccataagaccatagtttttcatcaccctgtatatgaccaaaattgtatagaatttaattttgctattaaacaagtgtttcggaaaagtgaaaacggttagtgataatgattcgacgaaatggacgggacattaacaaacaattcggtgattagaaagtggacagagcgttgacgggaacaatgacgtttttaagatctttccgggaaggtttttaatttggtaaacaaattgtattagtttttagatgtaaaagtagaaagtagaaaagaactaattatatttcttgaaatttgacaaattggaaaagttatgtggaagaatatttggtttctcaagaaataaatggtttaagagaggttgttgttgattggatggaaaatatcgggagtagggataatgaatgttggagtctggatttgagagagaaataaggggtactgtgtaaggaacatcgatagcaaggcagtcgagtttttaaaagtgtgtaatcagtgtagagtggtgtgatcagcctttgcgagcagaatcaagttgaaaccaaattgtcgaccggttgaagagttaattttcctggtccgagggagattcctttgttttgtctagaacgagtagctgattattatcctttggtgcacaagatatcgagcaaggaaaactgaataatagagttcgagcaagtcctgtgtgtttttcttgaaagcagttttgacgtgagggactttctcgcaacatccagagagtacgtgttgggagaatcaaggacggcgcaatccagaaaacgaggaagtgaagaaacaaaaaggttagtgaaatcatttgtcggaatggagaaaatttgtgtatatcaaaaccatatttgttcatttgtttattgaacatttttttaacgcagttagtcatttcaaatttgagaaatcaattcaaaagaagaaaagtaaaattcattaaatttagtaggagtaaataataaattaattaaataatttttgaagttatacttctttaccggcgatagagggtgatttttatatgttaaaacctatcagcccggcgcatgcgcattataactttgttctgattggatgttcaaatgacatgtcaaaaattatccgatatggcagctgtggtttggaggtaaaggtaaaggtaaacaaatgtataatatattagttttattgttgtgaggacagaaacaaaaaagtttataatattgtagtgacttttaaatagtttttaaaagcaacaggtacgtaataattgttaatgtatcatgggtataaacctacctatttgatctgccaaaatacatagtatgtaatacttttatttatataatttgattaccatcaaaatttctatcaatattcacctaatatattgttttcttactctatgttttgttgtattttttcaattctaaatcatttcaattcaaaattaaaataatttgatcaattttcaaaatatcaaaatatcacaagtttaatccgtttagttagtcgatcttcgtaaataatgacacatagtgtccgtggctaagcgttgaaggcgaatgaattccaataccaaccgcgcttatcagcgctggttcgagtcccaatagaaactttctttttgtttttttttaatacattttatgattgtaagtatatttattatataattgtattttcagaaaatacgtatttagttaaaaaaattttcgacaattaatgttcagacatcatttgtggcttgtttaatgtgtttgtgtgtgttttattcttttattattttaatttttggcactgttctaataaaaatgtttgagaagtagtaagtataaattagtttaatatttaaacaaaatataaataaaaagtatattaatttcgtttaaatcatataatagaagtataacttcttacgtgcgtacaaagtacacacacattctttttttttataaattcttaaaatttttcaacctagtcaaatatcgatgggttcctgacgaaacattgcaagcgacaaagtgcatatctttcaggagaccaccttttcttctaacaactttttggccaatataattaaaattctcaaaccatgataaattagtacataatctgctaatctactaatttatcatagttcaaaaactttaattatattagccaaaaagttattagaaaaaagtcatctcctgaaaaatatacgttctgtcgcttacaacgcttcgccaaaaacccatcgatattattttagattttttttaatcattctaacaaaggtaaaaaaaggtcttttgtaatttttctcttaagcatttgagttacaaataaaaaaaacgaaaaatgacggctgaaaaacacaagtaaaaaaaatcattgtcgaaaaaaataagaagtacctaaatttaagttcaaaccttattccatcagttcttgatacttattttgggcttataggtttgaactttaatttgtac

SEQ ID NO: 2216 - DNA, 1977 bp, Diabrotica virgifera
ataacatctcgagcatttgaaggcgaaatacattatttgcatacagtgtgattttgcaccgttgttttgaagttatacttctttacgggcgtaatgacggtgaaattttatatgggaaaacctagcgaccgggcgcatgcgcattataactttgttctgattggatgttcaaatgacatgacaaaaattatccaatatggcagctgtggcacagctgtgggactgtggtttggttataatgtatgcttgttgcgttttaaaatttgtaggaagagaaacaacaaacaaaaagttagttaatggttatactgcctttttaaatagttttcatattatatttttggacttatttacatagaagagatgattgttgcatgccaatgtgaaagctcatcaaactgtgctagtatgagtgccgcagatctcgcttattcaaagctaaagaatctttcactggtaagtgttttataaatagttgatcaaattttgttatgatatttgaacatagccactttgcacgacgcaagtgattgcgaaatttattagtcgttatacgggctccgatacctaccttgaacctaccaaaatacataagtagtatgtaatacttttatttacataatttgattaccatcaaaatttctatcaatattcacctaatatattgttttcttactctatgttttgttgtattttttcaattctaaatcatttcaattcaaaatcaaaataatttgatttacataagttaaaaatgtcaaaaggttaatctgtttagttagacgatcttcgcacataatgacaagctgtctctgtggcgagttttaatgcgagtgaatcccaatacaacgcaaataccagccgcgtggtaagttggttcgaatcccaatagaaacttttattttttatttttttttatacattttatgattgtaagtatatttattatataattgtattttcagaaaatacgtatttagttaaaaaaattttcgacaattaatgttcagacatcatttgtggcttgtttaatgtgtttgtgtgtgttttattcttttattattttaatttttggcactgttctaataaaaatgtttgagaagtagtaagtataaattagtttaatatttaaacaaaatataaataaaaagtatattaatttcgtttaaatcatataatagaagtataacttcttacgtgcgtacaaagtacacacacattcttttttttttgtcaaaacaaggagatatcagagttatcagatatcagataagttagaaattgttgcaacaaagttgaattttagtattttttgaatcatatgtacacggcttatttgataaaaacaatagattacatttatatgattttgagtgttttcaatttccctatttccaccctggaagaagtaagcaactagaaatactagaagccacagatcacaggtattgtaccaaatacaaaattagccctgagaataaaattgattggaaaatttaatttgaatttagttttgtttttacataggcagtgaataaaataattgaataatcaattaaattaagaatttgctaatcaatctaaataaatagataaagtagagcataacaatacattgtaaatcccaaatcatgatttcaaaattatgattcgggagtgcattaacgtatttactcttagtagcatttaacgtgtattggtttgtttatttctactgcatcttgactgtacatttactatagctatgtctgcttcttctttcaatgtccaaatatcgttgaaacgttgcaaaaagtctgttgaactgaagatagactatattattgagaagtaaatgcaaatttaaaacagaaacagattccagaaacgtcccttttgtttttttttaatagtttgcaatgtatttgcacaagagttggtaattttaaggcctttgtaaaaacgaagaaatgttcaaacgataataaataaaaataa
